United States Patent Application Publication US 2014/0057251 A1 - sequence listing, part 53

SEQ ID NO: 69913 - DNA, 1278 bp, Cannabis sativa
tatataaatgacttcatcaagatctttatttaaaaaagcaatcttgatgcccatgtgtcatatcttgtagttataagtgtgtttcactacttagtatgttttagagatcatattatcaatgtggattacaaaaggttgcgacaaattattagagagacaacatcacaacacattggacttcatggaaggggtccttcaccgtacactatataattgtttcgagtcactctcccctaagaaaaagacacacgattgtcatacttttctttctttcttttgtggctaacctcatattctcatacttgattcttgtgtgattgtccggcaagaaaaaacaaaatgcgaagtactgagttttgtgaattaatagtgaacgtaagaaatgatgccacatgtcctcgatgtttgacgtctttggcaaacaaaaaacgacatatgtagagactaatcggtgcggcgtgaagtgacgctcgctgacttgaagccgattcgagaaagagacgtgtatatatcaaaagtgggcccaacactccaaaataaatatggattttctacttttcacaatatttccttctttgtttttagctaaggcatatccccaaattaaactttgcccattctttttcccagcacatgccattcattcaatacgaacatgcttgtaaaagttttatgtttcgaaagacaactcaaaatatttgatactaatgaggatggtggatgaaaagaaatagcacatgggtcttataatttttaatccttccaaatcaaaagaaaggtgaatggcaaaagttctataatttcacaatataggatccgatggaatcttcttaagactatttcttttcttttaatataattttggaagaaaatgtactttgcaattgttttgtatatctataactacaatttttattttaatatattatattactaataacttatctttgttaccatattacttttgtttgtatcgccattactctattaatttggttgtcttttattaaaaaaaattcaataattttggtagaatcatatcaaatttgatcactaaccagtttttacgttattcttttgaaaggattacatgtgctacttaaaatttcgaagtataatgtagtataaagaataattttatatattcttttaggtgattctacaatgtacttccttaaaaagaatatactgatgcaccttctatttgtttagacattcagaaaaaaaaatctagtttaatttttttcataatcatgtacgttataactatttaagata

SEQ ID NO: 69914 - DNA, 1354 bp, Cannabis sativa
gatactctccatgtgactctcttcagagtattttgggtacaatacatataaaattagaagtaaatttgattaatcgattaataaaagtagtatttttaaacttattcctagaaaattgataattttgaaacactgaagaagcccaagatagaggcccaatcatattccttctccactaagacaaccacgccacatggcagcctccgaaatgagcaccaacaagtgccctgactgttgactttagttgttgactagaatttttattatcagaggccacgaaaccttcttaaaacaatatgtgaaaagctaattgttataattaatcatgaaaagtcaaaataactactgactcaataattattaagtacgatggataaaaatcttattatattcaatgaatttccggagaaaaaaaaatatcaaagtatatatttattataaatataaagtttttttttgaacaattaatattttattgataaaaattagagttaaatacatggaaaaaataagatggaaaactatctatctaaattatagtattaattaatgagagatagaactgagtaatttttaatggatgttaaagttaaaaaagaattaattaatcttgactatgttgagttgacccaattaattaataattaagctgaccatatattatatcctcagacgtcaatgatttgatagttaagattccatttgttaggtaggataaaaacaacaagattccgactactttggcattggaatggccttgtattggaatagaactcacgtgcaagtcatgtgatcaaaagcaaagcacgaggaacttacattattaattcaaacattttaatggccctgcacgtacgtacgtaaacgagtaattatttatgaatgtcgtaaggttatgaatttaaatttgaaattgattttagatatttaatttattatcatttttagccttctagagagtttgaatgttcctcgtgctcctattaatattctatatttaaattctaatttaaccctaatacatatcatataaataaaaaattatgacttttattttcatgacgtcacgctactttcttgtttgagaaaattatatatggaatttgaaaaatacagatgagaacagtacacaaaaggaaataatattatgttgatgatctttaaaatttgatttttatggaaaataatagatgaaaaaaaatacagtgtatatattttaaatcaattttaattaagaaaactactaatcggccacaatatggaataaatattttcttcatacatgtaaatattctttagaaatgaaattacattgttaaaaaaaaaagtatttacgctttgcagatatataagg

SEQ ID NO: 69915 - DNA, 1219 bp, Cannabis sativa
cagtctcactcctacgatcctatcactattttgtgctctaagcttttaatcgtgttttatagggggtcccaagttgagaagatggtatggggcacctgatcttcttcctaaagatggctccattgttgacgatgaagacgaagacgaatcttcaggtaatttcaatatgtgatatagtaattttcttgagcaatttttaaaatatatatatataattatttcgagaatgcgagaattctaaattaagttattttgaaatgtacaagaaaatggagccagggatgcaattttagttactgatggagatagtgagattggtcaggtgtgttttgcaatatacatttggacaatctcagctcagttgtttcaaaccatttttttactgttttgtttttcaaagtgtttgtagtattctaagtcttgtgatatttagcccgtgtagatggttatattgtcattgattgtcaagagagcccgagttaaagcattggtcaaggataagagggttgcactcgaagcctttggaacatatgttgaggtagctagctttaacttaacttccacttaaatttgtgcaatgttttttagactattgattccatgctaaaattttagttgttttttcaagtcaattgctggtgattcaagggacaaaccatttctgaagagagctctaagaggagttcggactataatttgcccaaatgtaagctcaagtgtaaattgaatccactatgctatgctatgtagtatcattatcttccacatttttaagtttctcctaaagaagcatacaaacaatacataactagcttgagaaagagctagagaagagagtaattttctggggtcctgtgactcaatggcttggaatgaagaatgttgttatgattattttcaggagggttttctatccaatgttggaaacttgaaaggggtacaacatataattctgttatctcaggtaacctttacatattatatgcatgggaaaggaagaaaatggtatgtggttgtggtttaattaggttgcagttgtgtgtttataaaggtgccgggggcattcaagctctcatgaaaggcaacacaaaaaaaaaggccgagcaagaggaatcattggtggctgcatcaggaattccttacactattataaggtgtggctctttactaaacactcctggtggaaagcaaggctttagctttgaagaggtatatatga

SEQ ID NO: 69916 - DNA, 1489 bp, Cannabis sativa
cctagccgttggattgcttagcacaatacacaaggacacgcatgctctgtatggtcgcatagcgtgggagacaacctctaacatagtacatgaagaaaggcacgattagcaggcccatagcctggcatacgcgggctgaacttccgcgggtcaaaggcgtaccctagaccaatgcatcgtggtggaagctccatattcctcgcaggagcaatgggtcctgtcttctaaattggagagagttgttagctcacagacatctctctcgtggcctgcacttggaaagacttctcttgcgcagacctgttgagcgaggttaatgcagttatcttcccgaagcgcgaagtgagacacgtatgcgtcttaaaaaaatagtggagtgattagttaaaatgacataagtgtaataaaatatcaaaagagtttttttggttaatttttattttttaaaaaagaaaaatgagtgttttaattgattgtgtaattttttaaaaaatatgagtatttttttacatcaatcaaacataacattaaatgagtagtaataatatactacattttagtagccatgaacccctcttatatgcacaaaatgcaataagacctattttatttttaaatttctacaaatagaatatatttttaaatctccacagctaaagagtcttatatattatatattatagcagatagtagagactgaacattggaaaatagactgatttctaaattttttgacaataagttacggcacatgtttatatgatcttatctttgactaactgtaatattattcaacttctaatatacgcgaagatgacgctaagtttgaaaacttataaatttctcgttgtggcataattaccgaatgactacatgtaaaatggaaataattccacaaaacagaaaacgcaaatacagagcattcaccaacaacataaattaatattaagtcatgctctgaattccttgcaagaaaagagtctcacaagtcggctcttttgatatcagttgtcaattcctaattttctcttttttttatatatatatcatatatatatttgcttaacataacttggtcgatgagcacccttttttttttttttcctatgatgttttaatttttgtaataattgtattttttgttttgtttaattttaatatacctttctatactatcttacaatttatttctataatttttttaatcttatatatgttagtagcttattcaataaattaatgaatatttaataacttataaattcaaatgcattatcatttcaaaaaaaacaaaaaaaaatcaaatgcattaatatagacaatcaccggtaaattaaatatctctatttttaatataagtcatttttttttccttttttcttggtatttatttttaaaggacaaatatataagggctttctttttttttttttttaaataataagtacacacaatcacattgtatataataattcaagataattatttt

SEQ ID NO: 69917 - DNA, 2609 bp, Cannabis sativa
actttatattattgttgtcattaattagcttataaggcaatactatacatacataattagctacaatatatataatctcattcttttcactttttttttaaaaaaaataataaaaaataaaaaaatctcttcgtacatactattctagagtataataataattagcttaagtagattattaatatattatttcttgccttgaatcagaaaaacatgacttaatgactactttaaatatgaatctatcgttttaataattttcctttttttacgaataaaataatctagtgtagacattattaggtcaaataatttgattgattaacttttgtaatttaatttagatcttattataattaatattaagttaattactggattatgctttctatttggttggattctttgaaatgtcacaacaaaacaaactgctgctgacctaatcaaaatattttgagcatctgccaatcctgagaacgaagttgcaagttgggattatccatatagatgagaaaagattcgcatctagttcagttcaacaagagaagaaaatatatatatacacataaataataatattaatttattcaggaagaaaaatgaatataatttaagaaagatgctggcttacaaattttaaagataatattatttcattctctcttaccctaattaataattatatacatcgatcatggtggaaatgcatatatatccacgtgatggtatagtactcatcatagactatatgtaaataaagaacctacccatttttattttatttgaatcaatgcaaattggtcacactactaaagcactttattagggtataatataagggctgctagggtttttttttcctttctaatattgatcattatatcaacgtgtggattcttctaatatgcaaagtgtctactaacatgtactgttttatataataaagaatataattaagttctattatacatattcttttgtcggatgaatttttggcaacactaagaagggtgagtattcaagtttagataagaacaattaccgttagttatgcgagtattcacttaaaattgcgagtactcaaaatttaggctacaaaatagacaaaatataaaaagaaatatatataaaagagacaattaaaattatagtggttcaatcggtcagagacaacaaaaattcaactaattggtaagatcacccttttatatacaaaacaagtgtttgttgaaattacacaaccaattaatttttcatttgatttttgttttagatttgataatcttgttattgccaatcgtttgattgtttaaagtttagttgattttattttgtatttttaatcataattttcccacactaggtaatattgttgttttacttatttcaaatctttagctgcactaaacttgtaaggatgatattattgtgattaacaatcagacactggaggatcaagaacataaaacatcaagcatcaacaacacaacagtagcaagaaccaattcgaatttaaaccaaaaaataaaaacaagaaaatagatgaagagaaagagtacttgcaaaaaaatggctcagcctttatttcacttcttaatcaatcagcttgagagctttataataagagctagctatatataagaacagtatgtacaagatgatcagcacatctccttctaacactataacaaccaagcactaagctaagagaaattgaaaactaaatgaaaatggaagattagttaatacagttgctcgattggacatttatatgctaaccaacttaactaactaaatttatttaacaaattaatgaagtgatgcaaagtgtataagactaagactaagtgattagaccataaaactaatagatatctttatggagtataccaagcgagatcggttggggtccggatttaaattcggggtctctagatctgagatttgggtttagatttagggttcgagtgcgagtttggctccaagtctgggctggggtccagattcgggtctaggccatgggtcaggagtcggggttcaattaagatcaaaattcaaaatattgatgaaaaaatacaaatagttagactataaataagaaaaaaaaatgtttaaacaaattttgaaatgattttttattttcaaaattttcaaaattctggctctcattttaagaaacaaaaattgaaagtttcacgaaacatattttttgagaatatttttattttataattgttaaaaatagaaaaaaaaattaaaaataattatagaagacattcttagttgttcgaataaacactgagttttcatttagtaatgttttgttctatataatttgacctattaactatttacatgaaaatgatcacatgaaatatttgatgttttacccataatatatgacatgaaaatgatcaccaatattaatgggaatgtcaaatatattaatgtgtagatgagaataattattagagctagaatataaaacaaacatttcaacaaaggacggttcttagcatcacaaaaataatttcgattcctttcattaatgtcatgatgtgctcatgagtcatcatgtgcctatgtttctaatccatatatgcccatac

SEQ ID NO: 69918 - DNA, 1284 bp, Cannabis sativa
aattcaaatttgtgatttaattattcgttgatcaaaattcgatgatttgatatttttgaagttaatatttatagtcaaatttgtttagtaactattcatggataagaagttcataggtaagaagtgttccatatatagataaatattaatactttatctttaaccatggtgtgtgattagttatctttatgggtcctattacttactttttttctttcttttaatggctgaagaaaccatgtctgttgctttacaacccaaccagaattcaaccacttgatttcatatatattgacaataattcaagttgaaaaaaaatattttaaataaataaaataacgtttgtgttgttattgtttgaatttggcattttctaatctacactagattattattattattattattttccaaattgatattgatatttttagaaaattataagctaacagtactaaacaatctgtgtggaaaaaaacattatttgaaatattactacaaaaattattttaataatctcaaattctgatcactatttgaatatattgtgttttttacatgtgtgtggttgaatctcaaaatattagtagatggttttcattgaattaatgacaaaaaaaaaagtgatattattataagagagaaatgttacatacactttattgatgtaattaattggattaaaatcttatgggcaaacatatatctataatgtatttatctgcaaaattaattaactaatatattatgttttacgtattaaatagtattaaattatcataaaaataatatatagttacaataaattaatttataatttaatgatggatcaaattataaataccaaatattaattctataatcaatctataaattagtagtgcatatggttcctaaaaaatactaaatttattatgaaaattcacctcaacaggaacaacaatgcaaaacaatgacaagataagaatcaatgcataaaatattatgaattgaataaaatacacaaataagtaaaaacacacaatagtaataataaacatataaacataaacatatacattttctaaaataattacaaaaaatgtgcaaaaaaacacaattttaaaaatgtacacatttgaaaacatatttacaaaaatttatacaaattattaattaaattataatagatatattaatgagtcaacttactatatttaggtttgtataactatttttatgattaatttatatagtattaatgagtaagcctactaattacataaaattataaattaataatta

SEQ ID NO: 69919 - DNA, 3517 bp, Cannabis sativa
atatttttaagattttaaagcatatcatttaaatatcatggtatatttatattaattttgttaaaattatttttattttaaagttacgttaatatttttataggttattgtgagttgttggtatacacaatttgttgtatagtatatttatttttgagtaaattacaacttaaccctcaatattttctgttcgctaactaataactcttaaaatataaattttggctgcaaaacacccaaaactagcattatgttacctttaccataattagttataaagaatgaatttgattttcattgatattaaaatgtttattcaattaaattacaatgacaaagatatatgttaatataactaacagtaacaacatataactaacataactaacacaactaacttagcctcttaagtcttataagccccctcaagatgaaatgtaaaagtttttgatattcatcttggagacaatattgtggaaatgagtgggaaagagaggcttcgtgaggatgtcggctatgttagacttggatgcaatgtgattcattttgatggtgccattattgaccttttcttggatgaggtgacagtcgatttctacgtgtttagtacgctcatggtagacggggttttatgatatgtaaatggctgcattattgtcgcagaataaagttgatgggagcctgttttgtatgccaaagtcgtgaagaatagaatggagccaagttagttagttcacaggctgcattagccattactctgtattctgcttcagcagaggagcgagataccgtgtgttgctttttggacttccaggagatgagagatttgccaaggaagacataatagcctgagatagatcgcctagtatccaagcatgccccccagttagcatctgcaaaagcttgaaggtgtattggttaaggtgttgaggcatataagaagagtccttggccaggtgttcctttcaagtattgtagtatgtgatgggctgcttggagatggggttcacttggtgcttgaagatattggattaatttattgacaaaaaaaaataaaataaagaaatatatggtctcgttatagttagatatatgagtttgccgattagacttccatattgtgtggggttggcaaggagttttccaaactcattgttaagtttgttattaggttccataggagttgatactggtttaacgccaaggcagccattttcttgtaagagttgtagagtgaatggcctttgtgtgatagagatgcctttgttgcaccgtgctatttctaggtctagaaagaagtgtagactgccaaaggatcttgaatagaagatcatattttgctaaatatagaaagatagtaattagcaatcaagcattaaatgtttctttattctccatgaagattgggcatagtttaggcagctaccaatatgatgtggcatccacatcagcatataccaagcgtcttatgggtcgggcttcactagataagtccaaattaataggttacttgtagttatctcattagtagagaaatagaaatgaatgtgaaatctatacacaatgaatacacgaagaactcttcatgcaaaggattagatactgattcctcaattactaaggaaaaatctagagttcatacattcttgtaaatcttaaaacttttctagccttaaagtaataatcttgactcgtgtactaagtcttattaatacccaaactacgtaaaaattcttattgttattttctttatctttgattaatttctttagctttcacatacaataaatcggtttttgaaaatctcagtaaacaatataatagttatccaaacagtaaaaataagtcaaaatttatacttatcttatctgttgacttccatgtatatttagtccttttttttttttttttcaattttaggaatgaaatcaatcatacctctgagaattttcctaaattttttaatataaaagtacaaccttaaaattatgaattcagattgtaaacaaaagatagttagaatagaaaggtcttttaagctaagaggattgttctgagtgaactggtacagagaaagttaaaaaaggacatctctctaagcttgaaatccaatattttaatttcattgtgttactgtgatttgatcattcttttggttttctttccactcatcacttttgctctttctattggtgtttttcttttacaacttagtggtttcataaaatattaatatacaaggaaactacggccatgaaatattatcaaaatcaaataagcaagcagtagcataattgttgtcttttttattatcaattggctcttgagcaaaaagtatttacacacaaaaacatatataaattaaaaatttaaaacaacaataattggtatgtacatattctcaacatgcggatgctccaacataagtggttgaggcaatcacagacgctgtcgccatgattgcagcttcctcttcctcaagaactttcaacttcttcttaacatctttgacgatttcctctataaattttgattccggcctaaacacatacacatacaattacattaattagtcacttaagttttctaattaattataagtagatattctataataataaaacacaaaaatggagatactagttagttattacctaatactcagtgagtcccatcctgataaactagcagctttgttcaaggccttcctccatttatcaagatctttgcgttttctaccctcaaagcgttttgatgtaattgtataacttcctttttgtttcctgatatcagatggatctacaccataaaaaataggcacaacaatctgtttcttcttgtccttgcgctcgagtatctgaacgagttcatccaaacaccaagacgaagaggcatagttttcagagaaaacaattacagaaagctttgctgttttgatggctttctttagtgttggcgaaatttcatttcctttcttcaatttatcatccatgtaggtactgattttctttgctcttaaagcatggtaaagatgactagtaaaaccatttcgagtgtcttcacctctgaaactgataaacacatcacacattgagcttgagaaacaagaccccatgatgtatatgtagctgtatgtgaaaagtattcaataattaatagtgagataccgattaaaatgaagatagttcataaatagaaagatcacagatactaaaaattgacactcttgctttattaacacgaaatgttatttgacctttatgttctatgagctgattgcttttgggtcaaagagcgcgttttattaagttgataatatacaataataattgaatcccgtatcatatgcaagtcagattcgcgttttgtcatttttgttttttcaaacaatagaataagaagactaacgcatattatcaatagttttagcaaagtcttagtaagtgcaataatatgtatgcgtatagtatcatgctaccttgaaactaaaaaaaaaaggactaaattaagtatttga

SEQ ID NO: 69920 - DNA, 2934 bp, Cannabis sativa
ccacacaaatgtatttatttttttaatagatatacatttttaaacaaaaatatttaatatgatcgattactttattgataattaatcgtcattctttgtacagatttaatcgtcataattacaataaaaatacttctaatgaacttattaatataattttctttaaaaaaaaaagaataaacaagctaaaagatacttattattatcggtcttcaatttttttttttccggtagggaatgcttaggtggagtcgtactattgcatctcaccagactcgtcagcaaaggttgaccaatgagttcaacaagaagagataaaccctattcagaatgaacatgccacgtgtcatcatgtaaggtaaggcggatatgtgataatggactggtgaccgtagattgtaatgatcaaataattaggctaataatggtgtacccttcagtacaccccttttatataaatgaaacacactttatcctttctcagatcatattctacatgttattcttatttatattcctactatatggcatccacctcctctcagactctctcactctaatttcttcatcaacttcttctctcatctctaacataattctttcaacttaggctttatctcaaaatctttctgtctgtaattttttttttggggttgttgtagttgtcactttatgatggctatgattcagaacaacgaagctgaggaagagaaaggcagaagagttgtggagatgaaaatcaacggcggaggtgaggccgagcgaaaggacgccgtcgctacggaagaaacaaaccaaacgttgtcgttaaatgaagcggcgcctacttcgttgtcggttgagccaaaggaagagcccgaggaaaggtcgtcggcggacgcgttgcaattagtgccgcttaccgttaaagtgccggggacagtggcgaagagggcttcgacgaaggatcgtcatcgtaaagtagagggacgaggccggaggatccgaatgcctgcggcttgtgccgctcggatctttcagctgacccgggaacttggtcacaaatccgacggcgaaaccatcagatggctcctcgaacacgctgaacccgccataatagccgccactggaacaggaaccgttcctgccatagctatgtctgttaacggaacacttaagatccccaccgatacgcccgacccggagccagatgacccgactcttaagaggaagcggaaacgaccggtgaacagtgagtatgtggacgtaaacgaaggcttttcagtctcagtctcagccgggttggcacctctaactcaaacccaacaacaacaccaacagccccagccccagcaccaacaacaagcagtgcctcaaggtttcgtccccatgtggaccataccttcaaacgccgtcgtgccaggagcgttcttcgtggtcccacctatggcttccgttgccggacataataataccccatcaacaagccaaccccatatattcacattccagaactcagcgacaccgtttatcaacatctcagcaaccagacccatatcgtcgttcgtctcctccatggccaatttcgtcactgccccagttcaattccaagctacaactactacggcttcctctaatttaacctcaatcaattcagtgcagaaaccgccaccaatggcgactccaagtgtaataacatcagatagcgccgccaccgcctccgccgccgcagcaacaacgacgagtacggcaacaactcagatgctcagagatttttctttggagatatacgataagaaagaactccagttcatgactcgttcctcgaaaaattgactttcaaaaataaaaaaaaaaataaaaataaaggagtagagagagaaaatctgaaggcggagagacggggtgtgggtcacgtggtcacgtgtggacgcgtttaaaaggtagtgcacgtgtaaagtggggtcgtatttgtagtaggtagggaccactcttgtggtgggtcaatacatttatatatatataatatattttttaaagtttttagaaagagggaaggggaaaagggtattggttgggcttttttgggtccgtggaccgtgcgagaaagagaaggaatgggacccagcaagtggtgtttggattggtcatgtgatggtgggcgcgggccccaaggggcgaggtggggaggggtccgggagggacctcattagagcacaattctcgatgtaaggaaggcgtgtgtggggtgtggggtccggtccagtggtccccagagaagaggaaagggaaggatagttgggcggggttctgtggtccaaccaaaaggtttggggttttaggtttggatgtcgacacgtttcaaagtgctgatgctggtgtgtcatgggccccatattttctccatttaaatatcggccaagtggttgtattgtatattggtgggaccatcttcggttgttgttgttgttgttggtatttttattttttatttaggattatgaacgaaactgataaaacctcccgtttttattctctctatatttaatatttaatgttttttttttttaatcttatttgtatctaactaataattttatgtttcttaattatattagctcacacagtactatttctggaaatattgtctttgtaattttttttttttattattatcattattatgtatgccgaaactattttaattgttctaaaaaaaacatggtagaagatttcttttcaacgatataagttcaattggtaatttttttaacacgtaattatataataatgaatgaattgtatgtttgcacaaacttagaaaaaaatgtattttttttttcctcaaacaaaatgattaggaaataaggaaaaaaagtaaagaaacgtataaaaagcatattaccatgaagctatagattagataaaatagaaaactcgaagaggaaaaatagc

SEQ ID NO: 69921 - DNA, 1743 bp, Cannabis sativa
ttaacagtgcttgaacttcctcaaaagaccatgtgtcacttcgagatatgataccagaaacaaaaaaaaattgaactcaggtccaaaaccatttaacagatgaagaatcaagtcaagatcagtaatagagtgtctagcaacaacaagggaatcgcagataactttgagtttgtcaatatagtcagagatggattgattacctttatgtgcattggacagttggctcttcagttgcaataacctagccttcgattgacttgagagtttctattctaaggccttccaaacagcatttgagctagtgtagttggccacgattccaagaattccttctatcatcgatgatctgatccaagaaatgagaagctcgtctttcttgcgccattgtgtaaaagaaggatttggatcaccattgatgagatactgaagtggagacaaatttgtgtgcaagatttcatccagttcatgactaataactaggggtagaacttgagacttttaagctaggaagttagttcgatcaagcttgatcgtgagagaagaggtaagagagtgagaaaaaggattccaggagggagtcaccatagcagccagagttgcagcaggatcagacacacttgtaggggatgagttgtcgaaagaagacaccattgacaaaggccagtggctctgataccatgaaagaaaagaaacaaaggagaacagagagaataaaaaactaaaaaactatggcaaaagcttgacctcattcgaggtgtcattagtatatatagctcaaacaaagctttacaagcacatgggtgcaaaaccgttacaaacagaattagctagtgagtattacagttaaccacactaattaaaaaccaagatcaacttaacaaaactaagtaactaaacaagaccttagttatcaattaaatatttgaacttttaattataaaaaaattaaattgtttaatagtatgacttataatattttttttaaaatgtgacttaaagtaggatattttgatatttaaatattcttcattccaacttccatttgaaataatctattttacatcaagtgtcttttgcaataagtctcattaaaaaaatatatatttcttttttattgagatatatatttatatataaatgtgaatatgatgtatatgtatataatatgtacaaattatgaaattatgtttgtttctttttagacagaatatttaagatattactacatagtaaaacatattatatgcattagactatacatttttataaaaaataataaaatataattcatccaagaattaatcatttgcgtgtattgaatattcataaaaataacttcacaaaatagttatattacttttatttgtcttatatcattcataattaaattatatagcacctaataacaaaaaattaagtatatgtttcttgcacgtactatattcctagtatatatatatatgaaacacttctcaatgggaataaccccattgatggttactaaataaatttaaatataaatattaattttaaaaatattaaaccattagattttgatccaataataaaagagaaatttaaatttctatgattaatttaactactttaaatattaagagtatacccatatatatataataacctaatttaatattatttatttagtaactatggtaatacctattgagaagtgtttcatatatatgtatatatatactagattaaagttacgtgcaaaggcac

SEQ ID NO: 69922 - DNA, 1082 bp, Cannabis sativa
attctaggaggatatggggttcctggtcctggagccaacaaagccacgctagccggagctggtagagtaggaagagcaggcaaagaaattcttggagcttgagggtgtgtaacccccatgtgtccttgaactaccccctattcgggataaatgatagggatactgacccattgccccaaatgcccacctcagactaacattttgatctcgtctttcaagtatgcacactcatttgtagtgtggcctttttccctgtgatattcgcaatgcttgatttgatcccgtatgttcctcacactattggacatgcaggggggctttcggtaatggaccatgttgcatgtcgctttatagatattctctcgagtgtctatcaaacttgtatactcgatgtactttggattgtaatctttccttggtttcttcactgaatcatttcgactatggttctttcctcccatctttaacttgtatactcgatgtactttgcatctctccccacaacaaagaacccatggccaatcctgattagagagccaacaacttcaaatcgtcgctgaccttggtctttgcggctgcgtccatcatccattgaatgaaagctttttagctcttgttcggttgctatttgacattggtcaaggaaccaacttccatgtctttctcgcacatggtaatgaattgcttgcggaacgtggactgtaaatctttccaactattgatttatcaaggagctagtcgcttccactagtcttccgcggacttagttaaagttaaggaaaaccgtaggcacttagcttcatcactgacttgagcgacttgcatcatcttgttgtacttggctaagtgcattcacagatcaattcttccctcgtacaactcaatgtgtggcatcttaaagtttttcaggaagtgggatctccgtaatccatttgacgcatggctttaggtcctcatcttcaggatccaataatgctccgctttgctttttttaccaatttcgtcaagacagcaatctgcttttccagcctcttgctgttgctttttgggaggtcacgccccctgaatttatcgcgcagatg

SEQ ID NO: 69923 - DNA, 2271 bp, Cannabis sativa
aaattatttcggatgctaaaacacataggggtgcattaatatatccattttaagggggtacattgtagaattttcctaaaagatatacgtggataataattttttaataaaaagttgacatataaataatgatcgtcatttaatggtcagtacatttataaatataacttaaatattattaccgtgaaaaattaaacttaactatttattgtatttaaatttagttaaattttttagataattgtataaaaatatacatctatcgaatgggttaaacaactaattaaaataattaatagttatttcttaagttaaatgtaactcaataaatagaagtgaattaaatatattatacactaggaaattaagttacacttcacacaatattatctaatttttgtaatctttttcttttataaatatattgtacttatactgagtgctaaacgtttcatgaaaatcaaggtcgggagtttaatggtagctagcctttggcgaccaagcgagccttgaaacaatcaacaatcccatcgacattagtttgagacgatatatgtacccacttacaatatagccaatgattttggcactaggaggtggtgtaacaagtatctaagttcgttaagaacgaatggcatctacttcacgatccatggcatagttccattctttgtgggagttggcctctcgaatatttgtgggttcaacagggactccataagaaatagagtaaaaaagccttggtttatgaatacttgattttacacgagtaaccatatgatgaaaattcattggggtaatggtagtctcaggtataccatgaaaatctactactaaaagtacagttggaggagaagggacatgagagggcgagctaatcatggtactagaatgataagaagaagagggagagggaggaataatgggtggggaagttgagaaggggaggtatgagaggatactcgagagggtggtgtaatatggggaaaagaaaatattgttgaagtagaagcgagagaaagaggaactggaatagtgggaggagtagatgtatgaggagaaggaaaatgaagcgggttaataacagtatgtggaggagtcatggaagcggagggaaaagagatgttgaggaactggaatgtagatcattgaagaaaacataatgggagatataaatacgattagtagaatgatgaagaaaaatataacccttgtgttggttgctataacccaaaaagatacgagaagagtatcaaaattttaacttatgataattgtaagggcgaagaaatgggaaacactcgcagccaaagatccaaaatagagagtaaatggggggttttgttgtagataacatgaaagagattgcgagactgtaaggcccaagtaggaagaagattaatcaactagacaacggtagaaaaggtatagggcaaaaaatgaaggggcatatgagcatggccgagaagagtaaggcctaattcgagaacatggtggttttgtcgctcaacagaatattttgttggggtgtataagggcaagagagatcatggtgaacaccatttttattgaaaaaggaggaaatggaacgatattcactaccccaatccgagcagaccatttgaatttttgagtcaaattaagtggaaaaaatctgttggaaagtaagaaagccttgaaaaacttcatcattggttttgagtgaataaatccatgtaaaacaaaaaaaaatcatcaatgaacaaaataaagtaacgaactccagtaatagcagtaatgggggaagcacccaaaaaatctgagtttattaattcaaaaggcttgaaagcctgtgatcagaatttagaaatacaagacaacgggatttacctagttgacaggtactacaaaatgcattacatccatttgtttttgaaaaagaaaaattacaaagagaagcaacttgcaaaatgacatctcgtgaagggtgaccaagatgagaataccagagatcgatagtagaagcgaaagacaagagcagatgaggctgagaggagacaaacgcgggaggcagatgggtagaggacctgtgatgcaataaatgccattatcaagtaggcctttgaggagtgcttaagtcatgatcgcgtacttagaatatggattagagaggcaattatcattaattatttatattttaagattaaatgtgattattttatgggtcctattttcaataaatatgcattaggggttataatttctcaatttcggagattttattaaactcta

SEQ ID NO: 69924 - DNA, 2768 bp, Cannabis sativa
aaaaaaaaaaaaaaaacacaccaacaaacaaatatctcttctcttcaccttaacaatttgtttagaaatatatattttttttttgaaaggaaaaatttatactatggagttattcgacctaataaagttccaacattcaattttcccattcctaattactttcgcacactactatatttggtataatatatatagttaattataatattgttttttgtttttgttttttatatttatgcaatatatataaaaataaagaaaaaaaaaaccactaccatattgagaaccactcctctctgctgaatgtttgttgaaaatgaaataaacaatgtataaatagaagttgttggaaattatagaaaccaacaatccaaatttgaaatgagcacatacatataattatatataaatagtaaaaactataacccatgattatgcatgccacatatttcctctgctgccaaaaaccattctctttctctatattaaattcagacaaatactttctgcatttttgtatataaatcctcctgaccaaatttctctcttcccaccatttcaatccaaaaaaatatatatctatcattattatcttcaatttgagatttggtatatggaaaaatcaggtacagagatgcggagggtggtggtggtaggaggcggtgtagctggttctattgtcgctcaatctctccaattttgtgctgacgtcgttcttatcgaccagtaagtcatgcatatttcgttattgaaccaattcaatatctgttcttatacattattatttactctaatgttctagctctttcaattatgatcctttttctgtttttgtaattcattaagtaataaataaaaaattatttttattttcgaattgagggaaaatggctggtacgtacgtagctagcttgatgatgagaagttgaaacattcatacattgattatgtattaattccttctcaatgctgatttcattattattgaaaatgaataaccaggaaggagtatttcgagatagcatggggtacgtcgagagctatggtaatgccatcatttgcggagagaatagtgattaatcactctgattatcttagaaatgtgaagattgtggcatcaactgcagttgatgttacagatacgcaagtttccaccgcagatggccaatctcttccctatgattatcttgtcatagccaccggtcacaaagacttttttccaaaaacaagagaagagaggttaggtcaatatgaagcaggtactaatttatattatgttagaattataaataaattgaattttatttttattttttcggctgtaatttataaatattcattaatagaatgtcattgtattattataacatgttttcattttgtgtgtagagtatgaaaagattaagtcggcgaattcgattttgatagtgggaggagggccaacaggggtagaactagccggtgaaatagtttatgactttccagagaagaaggtgacaatggtgcattctggggcaaggttactagaatttgtggattccaaggcttcacaaaaggcattagattggttaatatcaaagaatgtggaagttcttttgggtcaatcagtgaatgtggatggtgtatctgatggtcattttcaaacctctaagggagaaactataaaagcagatcgccattatgtttgcactggtaaaccagtgggttcatcttggctaactgagactgttttgaaggatagtttgggtattcatgggaggttaatggtggatgagcatctcagagtcagaggccataaaaatgtctttggtattggtgatatcacagatgttaaggtaatatataattaactttactttctttctttttggggggtattatatattattgtttttactatatatataatgtgttgtgtgtaggagaggaagcataggtatatagcacaaaaacatgcacaagtggcagtgaagaacttgaaggtgttgttagtgggagggaaagagagcaagatggcaaaatacaaaaactttttagaagccacacttgtttcacttgggagaaaagaaggtgtagctcaatttccatttgtgactattagtggatgcattcctggcaagattaagtctgaagacttgtttgtcagcaaaactaggaaacagcttggtctaaaacctgattgctaatcctacaatctctctctcatttggtttctttctcaattctttttaggcaatgtaattagttggattttttttctcttacatgttaattatagcatttataatgtgttttgcttaattgtcaacactacattgaaaaccaataatatatatattcctcgaccgtagagactagtatgccatttttaatttttttttttttttgaaacatgaaatatcaacttcattgaaatagagcattcaaattacaaatgggcatgaaagtctgccagaacatctacatcatgaatgttacgatctgaatagaaacaagagcgcctagctaagaagtgggcaactttgtttgctgatcgtctaacaaaacaaaaactaacattaggtagagaggataagagaattttacaatcatgagtaatcaagccaaagacagaagacatttgctgattactaaagaccgcttggacagtgagtaagctatcagtttccacctctaccgaattccaacctttatctttgagccaactgagtgcttccttaacccccagggcctcaacaacctcagctgagaacgagccatgatagtac

SEQ ID NO: 69925 - DNA, 2109 bp, Cannabis sativa
  modified_base (2055)..(2079): a, c, t, g, unknown or other
ggtatgtatttttgggattttgaaaaagttcgttcatatattttcaatgtagaaaagtattagtttagggaaaaatttatcccctaatgcatgtagtgaaattcaaatttcccttttcttttgtatttctcgacccacacacctttaagggtcttttggtcattgatcagtttagtttagtttagttttctacctcattaacttcataaacttcatctggggatggagattcttggaaacatgtatcttggaattatctccctaatttttatataaatttatatttatgcagtctgtaattacagtactaattaacttaagaaactaaaattctatagatttattaagagaagttatgtaattttacttgcttggtcattgaatgtcacgatattggtcgggtttggactgattgttgggtttgatcagatctcgaaaaccataaaattaatgactgaattctaccgtgtatgcctggagtacgtaattctataatgaatcttgctgctgaccatgtattagagattaatacaagattgtatttggactcaaaattcaagaaagaatcttttatccctaaatgaaaggagactcaaaggtaccacagtaattggtttggtattaatatactcttattacttggtttgtgcaattttttttatcttaataattaaggattcatattataagataataatttagtagaggtattaaaaataattttatttagagttattttttttaatatatgatggtttgagaataattttgtattagtttagatttaaatatatggatatgaggaataagtactgtttaatggttgttatggtaatagaagtaatgatgttgatgagtaattgttgatttagtatatgagaagaagagatgattgtatgataaggtagtaagttttattgatagtttggatgttagttatactagctcctcaatccaagcatggtatttatagggagctaagtttgatactacaagtttatagatttttcttattttgaattacaatttaacttttcaagaaattttaaaaaaatttaagtgtcttagcttacaaatatagtttctaagtaattctagttttctctaatttttgtagctttgtatagttaatactagaattttctagataaaaaagtgtagaaatgtgtagcacttttcatcactcctccttggtacttatttcgataactccgatcatgtctcgcaataattcaaacttgcctcttggcagtgctttagtaaatatatctgctagttggtctttaatcttgcaatgtttaagttttatttcattgtttgtttatgatattccttaatgaagtggtacttgatgtttatatgtttagttctactgtgaaatactagattttttgccattattatagttgatttgttgtcgcaatagacactacaagaaatgtcacttttgctagcacatttttgtgctggaaaaaattggtattgcgctggtaaaatagagaatttacttgtgatgtgctgacaaaagggggttgacaaattaatgttggtattagaacttttgtcagcataaaatgaaaagcgctggcaaaaatgacttttctcagcgcgtaaatgcgctggtaaaagttagattttagtcactgcaaatgtacgctagtaaaactttgacctctttgccagcgcagtttgcgaaatgcactggtaaaagtgatattccttgtagtgagatctttgtagcttcttcttgtaattctcccatgtcttcgagaattcttttgagccatatagcttggcttgtagtcattgttgttccaatgtactctacttctgttaatgattgcgcaacagttgcttacttctgctaatgatgagcaacagttgcaatagttgcttgtttaatttcatttaattttactatttcagtgattgtttataaactatgccccctagttttttatatctaccaaatcatgtacctcgaattttgacatgtgtacttaattatgccactgaactttcatccatagtaatcttttttactaaaattagacnnnnnnnnnnnnnnnnnnnnnnnnnaatagttcatggggcatttttaacgacctt

SEQ ID NO: 69926 - DNA, 1617 bp, Cannabis sativa
gtttactctagcttaataatgtatcttatgtgtgaagatgagcttctactaagtttttatatttgaaattttgtgagagatgagctgtaaattatgttagtccggtttatattttttgtattttttaaaatacgggttatgtcatcataaaaaaaaatatgagttgtgcgtttgcaacttcccactttctcagaagtattcattcattgctcatttgcttctttctaacccaacataagtaaataatttattaaatgaacttgtgtttgccaaactttccaagcacaatgctaaaacatggaagctaggacattatgtttgaaactataaaaatgggaactattacaatggacactatcttcgaatttggtttatgaggcataacgcaagaaccaataaataaataaaaaccttgcataattcaaaaccctgaaatgattatgaaaattggtcataaataatacacaataaatagaagcagcatacagggagctttattattcagatctcagaagattgtccatagtcgaaactttccacctctgaactggaaccagagaaagatccacacaccctaagaaagaatataacaatataaacttgtacccatatcagaaaattatatcttcatccttctccgaagacaatatgtcttgagctgaatgaagagaaattcctctcttaagcgacaagtgctccgcagcctgctcctcggcaaagttcttggcagctgccatctgtctctcgatttcccttttcttgtagccctgaatcttctttagcctgaagaaatcttccctttccagctcatccaactctcccttgatgtaagttatggtattctctattcttggtttcacaacattctccaaggcattaacacgacgatttgttgtcttgattgcttcgtcgagagttaaaaatgatgtttgaagtgaggcgagctcaacaagaacctcgattgctttcacataagcagcacggcagagttggatctgttgtccaccacgagccaatccagtgaggtcattcttggtttcaccctcggtaaaataatcaaacttcggaagcttcacaccagcaatgttctcttgccttgaacgaactttaagagttgcagtttgaacattctccaggacaatgtgcttaatgttttcaccagcaacatatttggcctcagttagcgcaaatgatgaagctttcatcacatctcccattgattccttcgttgacactatctttttcagaatctgacggaactgcacagtcaaagcatcactttttttcttgagaagagcatggcctcttgttgcaccaacaagacgtgctttcataactcccagcatagtaacagtgggaactacattcaatcgttgattttgcccagacatcttttaaaaaatctacaccaaaacagaaataccaattaatagcagaaaaaaaaattctagtactgtaactaaaggaaattcaaagagatattaaagtttcataagaaataaaacataacactacacaaaaaactacagatattaactcttgaatgccgaagaagcaaaacttctaaaataaatgacagttgaaaatgtaagaaagtgttcttaaacaagcaaaact

SEQ ID NO: 69927 - DNA, 2348 bp, Cannabis sativa
  modified_base (531)..(540): a, c, t, g, unknown or other
  modified_base (625)..(625): a, c, t, g, unknown or other
gatactactatgtaaataaaagttaatagttacggggtatactactaagtaaataaaactaagtagttatgagatactattagactaaatgattcagatgagtgtttacggggtattgccacttggaattttggacgatgaagtgagcaattttggtgtatcgccacttttgggagagtgaccgtatgcgccttatagagaacgatcaactataagtttggttaacgggtatgcggggattagtattacttagttgtttttttggtttttaataacctattaatctttagaggtaccttaaatactattaaattgtattatttagtgtaatggtaaatatatattaaagtttagaaaaatcacaagttcaaatctccatacattcactttgttttttatatgattgttgaattttgaacctaataataaatgtagaatgtgatttacattaatataagagcattgctattaggcatcagttgtacctagcaccttctcgacatgttatgttgcgattggctagcgatactnnnnnnnnnntattatattaaattatgtgggaccagatacttagttgaaccaataacgatactgacacataagagggtgttaggcaccactggtnccctttagcatttctcttaatataattgtgtattattttatgttttattatagttaattttataatttttattaaatgttgtctatataatataaaaataaacattgcaattaagcatcatagtatttagtatcactatgaggttgattttttatgatcattattaaaagttaaataaatgagatatggtattaaattgtagcaatagtttatgatacttcataaaatgctaaccactataaatactctttaatatttcattataaaaatagataattgtcctacttaaactttatttctgtcatcgcccttgttgtaacatctatatttcttaagtgtgatgagaaattcttcaacaattagtgattataactaaattaaatatttaaataaaatgagctaatttttattttattaaaaagcaaaaaatattaataaactaaataaaatcaattaaattaatatcaagttacatataatttattaattgatttctgaattaatcacaataattacataatttattattactatttttttttttaagataattacataatttatttgattaaaacatgactgttaaaatatgtgcttattctagtcttgtctatgataaggagaattgtggaagttattttgctgaggtgttcaaacgtgtttttgtcaataaaacttacatattatcaacaaacttaggacaacatacatatataaacgttgatttttatttaattttaactttaaaccgtgataagttacgttgctcaaatgtatataactgaattcaaattcaagatataatctgagaaccaaagggttttgttaataatataaaacaaataaaaaaatagtatttaggatttttgtcctctaattttaatctatgtatttttgtgtttttaaattttttagcctgctaaaataagaatatgtttatttagataattgtatgttagtgtctcgttaataaaacatgggtaattaattttttaaaaaataatttaaaatatttttaatttaattttacataattttttaatcattaattaatttttatttaatgatcttttaaaaatatatatatttttattgttttaattttaaattgtacaattagtagtgtttatagtcatgtcatctacctgtaacaaaacttgagagatgagttaaggtacaattcgaggtgtgcataatttgatttaatcaaataacacctgaccgatctaattacgaccgaccgctaccagggccggcccaagtattgggcagcttgggccattgcaaaagacccccattttattaaggcctaattttattttattttttttaaaaaaaaaaaaaagaaaaggcttattttttctttttttttttccttttatatatatataaataaaaaatttataattcaaaatttatgaacgaatgtttaaaaaaaatattaataataaaattgtagttttaatgtatacgattttttttaaagagcgtaattttaaaattttgcacaaggcccccaaaatgtttgggccgaccctgaccgctacattggatatccaattataattgtatcgaattagatgttatttttaaatattcaattggatcggatcaaatattggatgatgtgtttaaaaatccaatacatccaatattcaatcaaatcaattagtatttttattaagttttaatgagtaattagattttatattgttatacataa

SEQ ID NO: 69928 - DNA, 3307 bp, Cannabis sativa
attaattccgcatgttattgttatatatatatacacgtacatatacatatatttattttattttatacatataaatgtctaacacctcaatgcctaagaagtagcttaaggagccaaggtctttaagtgcaaactgatcatttagagctttgattacggcattaacagtagtaaagttattgcctatgataataatgtcatcatcatagacaaggataaatgtgactgagctgggagtatgcctgataaagatactatgattaggttttgaggagagaaatcccataaataatagtgttgggttttatgctctaaataaaatcctatttcaatataatcttatttattataaataaagttcagaaattatcttttgaccttgtcataagctttgtttacaagtttatttacatgattatatgtataatatatataagttttattaaattttaaatatataattattcataattatagtaatatcatcacaataaaaaataattgtgattatatattttaaacttatttagtcataagatttattagtgcattagatttacactaatgtaatgatcggtgatgtcgtttacctatactaaggaaagttgattgtcttttctaggacattagtaaagtagattaggatcggatgtatatggtttatattagactggatcgatattgacattaaaaaagatattataaacttaccgcaatatctatttcaatttgattcacttagttgatatagcactaactgatcaacaacagaaagtaagggctcaccaactaacactaactaactctcataacattaacaaattgaattctcctaatatagcacaatagaaatataatctctaggtatgtgagaggtccatggttcgacttgcaatatctataaaggtactaaattttatcggtaaggtgtatacttttatgcacatgacacatttatatttgtacacataatattattatctaaaaattataaaacaaaaatacttcaaactttattttaaaactaaagttatgaaattagtaaaagaggaaattacagcataagtccccaaaaagtttactttgatgcagataagtccataattaaaaaaaaaaatgcagtaatagtccccaagctcaagattcttgtaagtctgttgatcctcattttaacatattcgtaagttgctctaaaaaatttcacgtattgatattaattgtgccataagtccctaaaaagcttattttgatgcagattactccccaatctaaaaaaattgtggtaatagtcccaaagctcgagattctccttagtctgtaagtacccaatttaacagctctgtttgtaattcttaaaattatcatgtgttaaaactttattagtctatatcataaaaattatttacaaatcatttaaaaagtcattaaaataataaaaaaaattaaaaattttgataacttttttttctattttcttttattaaaaattaaaaatcattatatataaagaaaataataaacttctatgattcccaatctacctttttcaatggtggaggcttgttgccgacctgttctatccctttatctccacttttttccttatcctattgaaatttcaaataaccaattaagcaaaaagcccgaatacactaaatcgatgcaccttatgctcatcccctccctaaatctattttgctggtccccatctccagtcaccaaatctctatcattaacttgtagagagagagagagagacgagagagagagagagagagagagagatagaatcaaaaaagaaaaaaagagacgtgatcgggatcttggaaagagatgaagctttttgttttttttcctttttagtttttaaaataatttatttatttattttaaattatttttaattgaaattacgattttgaccaattgaacattaacacatgatatttttgggagtaacaaacggaacaattaaattagatacctatatactagcgagaatctcgagcttaaagactattactatagttttttgagattggagacttatctgcatcaaagtaaactttttggagacttatgctacaatttaatatcaatacctagaacttttgggagcaactaacaaatttgttaaaatgaggaccaatggacttagaagaatctcgagtttggggactattaccgtaattttttgaggttggggacttatctgcatcaaagtaaactttttgagaacttatgctacaatttttacttagtaattcttttttttttaatttttctttctctgattgtgtcttcctctcttttttttttcttttttcaaattttatttttactcattcatcttcttcaaatagaaatttagacatcatacgaatcactacctagttaagaatcatcaaacaaaaaccaaatctcaaataaaagattaaaatcaaatctttagaataaaccaaaaaccagaagaaagaatattaaaaaaatcttatatctgaaagaaacccgcaagctctgtatagtaaaaattccaacacctgaagatttaacaaatcagtaaagagagagattgagatctaaggtttagggcttaggggatcgtcgactcccattggttgtgatgggattaaaggtgcacgataacttgtggtagttcatggggtagatgcttacagaggacatcgttggtcaagaaaatgagagtaggagggagagagaaggaggtacaaagagataagagacagagagagagagagagaatctcgttgagggtttagggttttgtgaattttgtttgaacattttcttctctacattaaaacttcctcaaaggaaaagctttagtgagagtgagggggagggagagagcattggaagggaagaaagagtcagggaagaaagaataaaaggaaaaaaaaatatttatttgttgattttttaacattaattctttttttagttttaaaattaatttttaaataataatattatgtataccaatataaacgtgtcacgtgtataagagtgtatacataagctatccatattaacagttaactatggtaaatagatgacagcttaaatttattaacagctcaatagtttggagggttttaccactaaaatttgagattgaaagagtaagtgcaagtaaaataataattggaagggtttaaccgtcaaaactcaaaaaattaaaataaaagtgcgagaaatggaacttcaactcctattcttaataagtgagagataaacttaccactacaccaagcttagagaggatgatattgttggaaattatttt

SEQ ID NO: 69929 - DNA, 1458 bp, Cannabis sativa
ttgatagaacgaggtcgtttagaggaagggaaagctgttcttagaaaaattagaggaactaacaatatcgaacctgagtttcttgacatcgttgaggccagtcgtactgctaaactagtcaaacacccttttagaaatctccttcaacgctcttctcgtcctcaactagtcatcgctgtctgcttacaaatctttcaacaattcactggaattaacgcaatcatgttctatgccccagtcctattcaacacactaggtttcggagccgacgcatcactctactccgccgtcataacaggagctgtgaacgttatttccaccgttgtatcaatctattctgttgacaaagttggccgaagagctctgcttctagaagccggggtccaaatgttcctgtcccaatccgtgattgcagtaatcctaggcataaagcttcaagatcattcggatgacatgagcaaagggcttgccattcttgtagtggtcatggtatgcacctttgtctcgggttttgcttggtcatggggtcctctaggttggctcatcccgagtgaaattttcccattggagacgaggtctgctgggcagagtgtgactgtgtttgttaacatgcttttcacattcgtcatagctcaagctttcttgtccatgctttgccactttaagtgggggatcttcgtcttcttttcgggttgggttttggtgatgtcttgctttgttgtatttttggttcctgagactaagaatgttccgattgaggagatgactgagattgtttggaagaaacattggctttggaagaggttcatggtctgaattctttattattcgaggattaatttagcttgtttttcaacttttaatttctaattttaaattttcttatggattttacaagttattgttatagcagtatttgtttttatactgttcttaatttgtatctcttcagatttttattcgtaatgaattattccttttttccatcctaacatattcatttttattttgaacatttattaagattatattactatatcacaataatttaataggtatatttgtgtatctgatttggtcaaagtggtaatggccataattctatataaccataatatagccataattctatggacatgcatagtttagactttagcttgtaatattatggcagacgataccaacccgactggtacggctgcagaagaatggctgatgcctatttttcatgactaatttaatgggattaagtgataaattctgacaaatactgaaaaaagtttcataaattaggaacccataaatagattttaaaattaaattaggaacctatttttcaagatagcgtttttggactggtgtgtgcatgatttcacacagtttgcagccgagaaacaaggcctggctgctgctctttgctgggcagtttggggagcaaggaatgatgttgtttggcaa

SEQ ID NO: 69930 - DNA, 3232 bp, Cannabis sativa
tttttgatggtttacatcctcaactattttcaagtttctacctctaagtagatcattgaggtaaaatacttgtttagcttgattaaagcttcacatgtgtttttccagcttctgattctcctacaatgcatgctaattaggctcaaaatacttagggagatgatggaatctggtaccctgactctggagctacaaatcattaattacatgatctgcacaatatctcatgagcagtggtgaatacaatggccaagattgtatctatgtgggtaatggctcaggtctgtctatccaacatattgggcagactctcattgcctctaatagctgcttcttaataatctccttcatgtgccagaaatcactaagaatttattaagtatgtctaaatttgctcttgataacaatctattttttgagtttcatgttgatgtttgttatgtcaaggacaaggcgaccaaagccatcaacctgactgggacataccacaatggcatgtatacttttgatctaggtcaattcaaggtgttacccttcccccgtcctcattcagtcaagcactcaacacctcagatatgaaattaaactttactatcaccaataactcaagtaattcagattcaactcttcttgtactcattataatagtctctattatttctggtttcgagcagtggcataataagctaagccatccatataaaaaagtgattcaaattgtcttgaattcatgtaagaaagatcctttacagttttcaagccttttgcttaggcaagattcataaaatgccatttttaaaattttctactactgctatactaagccatggcatcttattatttctgatttatggggttcgtcccatattctatcttataatgaatataaatattacatgagctttattgatgcctatattatatttacatgaatttaccaagaataaatccgaggcccttacaacatttcaaacctttaaagctgaaacttagcttcagttaagaaagaaaattaagtttcaaactgattaagggtgtatataagataaattttgaacctcttaaataagctaggatagttcataggcatccttgccgtacaacccatgaacataatggattagttgagagaaaacatatgcaatttgtagaacatgggctaagtttagttgctaaagtatgtatgcctttgaaattttgaggtgaagcctttaggtctgttgtctatctccataacaggttaccactcccgtgttaaaataactttctccaatcgaacttctcttcaacattaagcctgattatatgagcctaagggtttttagttgccttaatgtgttacccaacattaggccatataacaagcataaatttgagtttagatcctcaccttgcacattcttgggttacatccttaatcataaaggttattagtgtcttgattcaaatggaagactttacatctctaaaaatgtaatttttgatgaaacttagtttccttatagccatgccatttctaatcctatacaagaattttttactcctgagtctcagacatcagctaagattcttctaactctaattagctatactatttctcgattattattttaatagtctaacaaaatgtattgaacaaatcagaatatcaaatatgtggacaattttaaaatatagagtacttaattaattactgaaacttaattttggtaaaaacataatcaaaatgaacattacttttaagcaccaatgttgcctaacactaccacaaataacgcatattataaataattaacgatattttataataatatgacatcttaggtaatattacacactattggtgccttttagcatatgcattctcaatcaaaatacccaaacaagactattatcaggcaggttgactcttttgtcaaaatgaataggaatatttatatcagaagaaatgatcaacaaaacaacaactagtgaaaagccaaagaaatgaactagttaattatatattcatctttgtataattttcaaatcacactttgtagtatacaaaataagagaactagcttcacatgactctgtttaatttaaataaaagaaaaaaaaatgagtttaaacacccaagaataccaaactaaaattccaagagaaaaaacaaaacaaagcatatgtaattttatttgcattggagagagagcataatcgattctattaatttggtgtaagagatatgatatttgaaagaataaaatatattctttcttaatattattccaagagaattagggtttgaaaaaaaaattaaattatatatatatttataagagagagcctacccctactatatataaggtccgaaatgcataaagccaaaagtggttggatcttcaaaaatgttaatttataaaattaatgaagcatttctttgatttggactacatattataataaattaataattaattaacagttctgtgggacaattaacctaattagctagtgatgatatctaaattaactaataataattagccattataaaaaattatctagatagagatgatctatgaaaatttaattagttcataatcatattatttaatttaatttatatagcactgacatactgtttaataaatattcaacttgttaattaataaattcattcaatttgattaatcactaactcttcgtaaaattttggttgtgccattcagatgagaatttttgagatacatactgataattataactgtaaatacgtgtgtgtcgtgctgacttattatttttttttgtgctttttaaaatataggtcatgtcgtgctagatcataaaaaaaataagtcgttctgtgttgtgcaacaattatatagggtaggctcagtatgacccgcaagtccggtaattttgtggcgtgctttatttgagttggctcgttttttcttaaatagagcaatttgctttcttacataggctcaaattcgtgcgtcatatttttaagtttttattacatagccaccatcttgagggggaatattggagaacattatcccacatgcattaaatgtgaaagcattgagccatatatgagaacatggactactccactcattgccaattggtttgagatggaaccccataattctcaacaggcaccagtggtgtctaatattttctataggtagcattctacgattagttaatgatattccctaaaagctattttttaagttat

SEQ ID NO: 69931 - DNA, 1849 bp, Cannabis sativa
acttaaggtgtccttgcacctggtgccatttttgggtacatcacttggtccgatgtttccatcatcagtcattatcctcatcatcactatcatcctcattttcaccctcttcagaagccatgaggaaaaagttcaccatgcaaaaactattagtgattgacaagtatttttctcatagcagaaaaaatgaagataagtcccagtacttcaacttgagacaatatttatagatgtatttcaccgaccacagaaaaaaccatgactctgataaacatgcggcgcatgctgttttccatcacacccctgaattacacacgcattaacatacaaacatgtgtgggaggcgtgaacttggtaaccctagagttgggttggtggcctgtacatggtaaacatacataacatagtagggaacttcattgtgcagtgtcccataaatggtaaacttacatatggaactacatttgatatatattaaaatctcgtgacattttgtgctaaaacatatatactatactaaatacattcaacgagaattatgagcatgaatggtaaatccagaccactaaagtggactgttatctaatggcactcaaaaaagtgtagtgctttgccgtgtatacaaagttcatcatttctacttgagaaatgtgtgttcataggatgctgatgcaacaaagtccacatttttggcttgtttatagcactgacttctgatgtgatgtgacaccttataaacaatgtgtttctcgaacaaaactaatgagcttcgtaacgtgaattttcataattggtattgttagcatgtgtatgtaaaaggtatcaccagattattatacatgcctcaactatggtagaaaagccaaaccttactatttaggcaactatgttcttgttaatatgatatagacatccttcaacagctctttatccccgttaaaagggtctcctataaaactgctggccttcactggaaaaaccacactatatacagccatatactctttgatataatatttttaagagacatcttctttatatatataaatacatatatttaaatatatagatagataaaatcatagcacaatacaatttcctccaagaaaaattagcatataactagtaaataaactagatatctcttagtttaagctcacctaccacaccctaagaatggcataaaaaatcacctgagttattagacattgaatcaaataaaaacctcaagtgcaatttcttgttgaactaaatgaataactgaatctttaatccagtgtgactcaatgaaagaagtcaaaccaaatatcagtaattctgacgaaagcagagtgacaaaaataggtttcaagacctaaaaatatgaatgcttaatatgcagtcaaaatattcagtaagccaaaatgtactcactgacgatgtcctattgcacatcattatcataccgagcagttgcaattagacatccagaactgaagatgccttgaagttcaaattacttttacaatcatattaaaagtttataatataagttattgacaatgaaaatcccaaagagcacaatgatatggaagaacaactgaaatggaaagagaacaaatataatatataagaacaactgaactgctttaagccttaatttctcctattgacaacagagtaaaattcgtttcatttagtttgtaaaaaaagctaagtaaccataagaagcatcatattgttcagcttacaacagaaatggaaagaaaacaaatctttacaattactataaatataagcaagtctaatattactcgtcacctaagaagatcatgcctgaaaggatgagcttgaaaaggctgtccaataa

SEQ ID NO: 69932 - DNA, 1527 bp, Cannabis sativa
gttcatacacatccagccctaaaattgttcaaatgctatggcgaaaccacccctcgacccctttgaatttgtccattcttctccaaaactagcctctcgatcgtcctctatgaaaccagcctctcgacccttctgatcatcttcttcaaaattggccacttcaacccctttctctttcaatcgtcctcttcctcacagtggtggtttgaagctttctggtccgacgtaacggtggtggtttgaatctctctgcttcgacgtagctctcattcaatttcatcgtcagcttctcttcaacaacactcttttggttttgccctttctttgtttttccaaattacgatgcactgcactcatttttttaagttttccttagtttaggaatcgaatgtaataatagtgtttttcttgaaatatttgaattggaaaaactcaactattttctccaaggtagcttcttcttcatacttgtcctctgcagcaaactgatccctcactgaactctctagttgaactccgtatcgggatcctttggtccccttgatcactacaatccttaggtatttttccacaggaaatatagatagatatatgaaatatctgtgatacctgtatattatttatagtcaacattaatttcattagtaataaataataaccaagaattgtatatagtaaatattgtattagtcatgtatatctctatcaagacttgagtcttcacagcagcttatggtctgctgcagtagctgagtatcacagcagatgaatttccaatgatagctcagctgtacctccagaatattcccctacgatttgggaaataattatgcaatgattgtacaaatccccatggtgattttctgttattttgagtcaaattgtatgctgccacttgtcatgttgatagtggtaactgtttgtaaaaatcttctttaaaaggaatgaaaatctctcagcatattttgagctgagttttattactacatttattctctgatttctttcttggtattagagctgatttaggctaacaccaatgtctacaaatcaatctcaaattactgcaggagcccctggaaataacaatggagttccaacctatagtaaccctgggatcacaaatattccctctactcaatcgagctatgtcaccaacttcacacagcccttcaacactttgaaccagccttttcctctaaaacttgacagaaacaactacaccttgtggaagactatggtctccaccattattcgtggccatacacttgacgggtttgtcaatggaactcgaatctgtcctacagaactcatacctgcaactgttccctcaggtgaagaaggagttgagcttactgttcaaatcaatccagattaggaacattggatcattattgatcaacttttgatgggctggttgtacaactcaatgactgaatccatagccacagaagttatgggatgcagcacttcagccgcactttggaaagctttggaaaatctctatggagctcactcaaaatccaa

SEQ ID NO: 69933 - DNA, 1246 bp, Cannabis sativa
  modified_base (27)..(41): a, c, t, g, unknown or other
aggatgttaatgaaacatacatggtannnnnnnnnnnnnnnggtaaaatatttccaacaaaagctatatggaaattctctggtttcaattttggtctaaagcttcctcaatgcacaaaggggattatttgattcacttattaaatcttcactctcaagctgaaatagaacaaattatatgcaatctatgatcaatttggatggagcgaaatagagtggttcatggtcacaaggcaaagtctgcaaaggagctgtctctttttgccaccaattacatgctgaatttcagatcagctcaattgaaatatcagcactcttctcaaagctcaggtgcacctctggcaactaatcctactccacacactgcctcaagctgtcagaatgtcccctggaagcccccaccatctggtgtttttaagcttaatgtcgatgcagcagtcgaccggtcgaccaaaactactggtttaggggctgtttttcgagactctactgggatggttgttgctgctttctccaaaaaattactgggcagttttgatcctcacgaaatggaggcactagctctctttcatggtgtgcattatgctttacatttccaattccgtcaactccaaatagagacagatgctctacaggtcaaaaatgctctatgtaatccaactgcagcatgttccacttttaatgatattattatggatgtttcaagtcttttatcctttttccctaatgtaagtgtttctcatgtcaaacgtacgctaatacggccgctcatggtttggcaaaatttacactaggggtggatgaagattgtttttggtcggattgtattcctccgcctataaactctgttattgtaaaggactctatgttttgatttataataacagttttttcctcaaaaaaaaaaaaccttatttagctcactaattacatatatatatatatttatatataaggaggaggttccaatggttacatttttattgtaatcatcatggttgcatttttttagccattgtgattaatttagaaattaaataaaaataaataaaaaatacatgtaacttgatattaacctgttaatttatttccttttaaaactttaattaagattaattatattttaaaattaaattaagtatacttataaattaattttttgcaatttattattaaataatgatcttttagcaatttatttttttacacttaaattattttaatttttataacaaaactcttaataa

SEQ ID NO: 69934 - DNA, 2197 bp, Cannabis sativa
gattgaagtttaaattatcgtgtttatctttctagtaatcccatttaggggattagggtttcttaatcaccttgggtaacgtgcctaattgttagggcgttagaaatggcttcttgatagttgaatacttctatggatgggattagctatcgatgtcgttatcaagtcacgcagtgttgggagccccctttgagtgtttgcttggtggtccacaatttagttattcttccttttgtcctctctggcgacaagaggttgatgtcatcttactatgatggtcggctagttttcatctaagtgaaatctattttttctaatatgatgggaatgtcttgacatctaaaaaatgatagtgaattgtttaggaactaatgtagctagagcttgtcgttcccacagacggcgctaaactgttgatggtaagaattcgttaagtaaattttatttagaaaatcaaatacaaaaggggtgaagatgaaaagcttaagagaaactcatactgttaatggagaaaaatagtgttctattgaatctctaaaatcccttacaaatgattatttttcaaccccttcttcaatggaagataaaggtatttatagggaactctaatggctccaccatacaagtggtccccaaaattaggagacaaaattacttttgtacatgaagatcatcatctcaaatgggtagtggtgaggtggttttcgggtgtcagttggtactctaagtgagacaaatagtgtctctactacttgtactcgtcgtacaaccgctacttcctcagaggcgtgcgtgctttaatgacctcatcttttgttgtaagttcccttggcatccctctctttatagcttacgctcatgatgccaatataacacttaagaaatttagctaagtgatgggtctttgagaggtgagtcttgctgtttaaacttagtaggaacttcctcctcaatttcctttggtggtcactccattgtagcatatatactctaagtatgattgctcccttgtttggagtaggtggtattaggtggtgattaggagagtgattgagtaaggaaacaagggagagtgaggagtagggagagagagatggcgagaagagggaatgaaaacggggagagagggaatggagtggggagctccgatgtgggcagtatggcacgggaagctcctcatgtgaggagcttaacccgtgccttggctcctcctcatgttggctctccctcttgtgtggtgtctagcctaagtagttggcctcttattttcttgcttatacactaataaaatgtactttgggattttccccctcattaatctagagatctccaaaaattacacttaggccccttttggcataacttttgaaaaaactgaaagctgctttttaaaaaaactatgatgaaaaagtatttgataagtagttaaaaaatagattattgaagaatttatagagaagctaaagctggtacaacccaacttttagaaaaagctgttttgattaaaagactttataataaattattttgtactaaaaatatatttaattattcattgtatattaaaaaaatcaaaagtatttttttaaaggaaaaaatatttaacataaataatatttaaatcttttttttttttgtttttaaaaaatattttatattttatatttttattattagaaaaccaccacaacttagagtttcttataaacttcaattttttttgcaagtcataaaaatataatttaaaaatattatttttttttttcaaattgttatactcaaaatttggctaccatctcagtgggggacacgtgtcaggttaaaaggaatatggatcgatgcaatcgctttttatagaataacttattaattacgtcagtgtcagagtatatttataacatgctgactgtaaggtcttatgtgagaaattaatatacaaactgtggcttagtatattaacgagaaatcatatgtcgctgaatgtgattacttaggtattatgaacgttacagctaggaagacgaaagcattacacatcgactgcggaagtacataatctgtaatgtacaaactaagtataacagtcgggttggctcgagacctaataagcgaggtgccaatctcgctatagggaggcttccaagaaatttcagatatcttctcggtgaggcttacaatcctgacgagtcagaagcta

SEQ ID NO: 69935 - DNA, 1952 bp, Cannabis sativa
aggcaattcggaaaagaatagatattgtgctctgaagagctggaatgacctctgtcagcctaagaagtgtggggggctgggatttagaagaatggcggatatgaacgtggctttacttgcaaaattgttttggatggttttgaaaggggaggacaagctatgggttcggttacttcgagataaatattgcagaattttaactccttggaatgttgagaagaaagagatggattcgaggggttggaagagtatccttgaggctcgcaaaatttgcattgagggggccggtttgctagtggcggatggtaatagtgacatttgggacagaccttgggtccctcacagaagcatggaggagttgaagtgtggtttcagtattaggcaaaaccagtcttgttggaaagtaaaagacctgtttgagaatggtcttcgagtatggaatcagcaactgattagaaattgtttttctccaagcaatgctgaggcgattctccgaattaaaccccttgatgaaggggctgatgttctattttggaaggcttctaagtcgggtgagttctctgtgaaaagcgcctattggctaagtcaaagtcataggtttaaagaaccttgcaagctgtggtgtaaattgtggaaatcaaggttacatcctcgtttacaactgatgtgctggaaaaaaaatttcgatagcttgccaacgaaaggaagaattgggctatgtaggggagaacaattgttgtgtagtttctgtcagtcctgcgaggagaccactttgcatcttttcaaaaagtgccatgtggttaggaatatttggtttagaagcgtgtgggggttgaggagtgatggactcaactggaattccttaaaagactgtggagattggtggtgtggtctgatggaggacaatctgatcttgtttgctgcgtgtgtttgggacacggtgtggaaatggcgcaatgacatagttcacagtgagaggctctgcagtgttgaagatatctacgacgattgtatgagacggtttagtgagttccaatcgactcactactcagcttgtggagatatctcttatgagttgggcggggagaaaccccaccaacagatgaatttggatggatgctgttttcaggtggatgcatctgtggttgaggactttgctggttttgctgcggtttgtatctcggaggtccattcggatgaggctgactctgctttgcctctgaatgaccctttttttgctgttagcaatggtcgggttttcagtgttctggaaggggagttgcaaggaattaagttagccttactaatggctaaggactttggaactgattcagtgtacattgaaaccgactctatggctgcagctaatgctttcaagtcgggtcgcatgcctttttgttgggatgtttatcctctgttctgtgaatgtattagactttgtaaaggttttcgtaggtttgctgtgttgtatattcctcgtgaggaaaacagattagcagataagttggccaattgggcaaggaattgttccatggtttgtaagggtcgaattggggattgtgttccttctgtgttttctagtttgctgtagtttctttccttttcttcaataaaaattttcacttatcaaaaaaaaaaaaaaaaaaaatctccaaaatgtaaacatgatatatccctaatttttgtattgaaaaataacatacatgtactagaaatctttaatcacagttagtaaacaaaaataaacacaaaggattatgctctctaatctctaggatcctatgcattataactgataataattatagtctttacagttctaaacatttgaatcatgcttcaagtaacacaatctattgttaagaatttcctactttggggaaaaccaatttacacaaagtgtgagagagaggttgagcgagacgagtaacaagtgactgagagagagagag

SEQ ID NO: 69936 - DNA, 1402 bp, Cannabis sativa
ggatctcttgggttgatgacatctgtattggtatgtttttccagtgtctttttaattgatcaattatcatggatcggtcccttgtgaaagaaattttttcttttttctttttcactaaaatatctgttgaactggttgttgttgtgaatggtttgtttggatgctaaccttagttacaattgggttcaggtgtgtcctgatggaaagaccatagaagcagaagcagcccatggtacagttactaggcattacagggttcaccaaaaaggaggtgaaactagcacaaacagcattgcttctatctttgcttggtctcgagggcttgctcacaggtatatttattaagtttatcctagttcatatttgctaaaacattcgtgaataaaagctaatttaattttgctcagggctaagcttgataacaatgagagacttctggatttcactgagaaactggaagctgcttgtattggagcagttgaatctggaaagatgaccaaggatcttgccctaattatccatggatctaagtatgtattataaaatgtaataaattcactgatagttgcgtgaccaatgcttgatatgtgtatggacatgatggtgcaggttgagtagggaacattatctgaatactgaggagttcattgatgcagtatcggaggaactaagagcaagactttcttgcaaggcataattgtatgttaattataattttactaatgcgcttttgcaatttttatatttgatttgctgtcaggaagaatgactaataattaggcgaggcctcattttccattcttgaatattcagggcactgaataaagtgaggttttgctgcagggccaggtatggtggatggcattttaaaagttgggatttttgagaagaaataaagtagggatgatgatggaaaagtggcctctcgatcccttgtgggagaaatgtgatgtgttgtttttgggttgtatgattcagtggagggaattgggggttttctttgttattgttgttcccaaagacagttcaggttcaatttaatctcatttttactattaactgttctattaatcgagcaaaagtgattattagttaagtttatgctttactatcgacaatgccgagattatttcacactatatgtttacaattctcgtctcgtaattatcatatagtatcaatctatttttggtttaattaacatttataagttagcacttgggatctactttgcgagaagaagcctaaaactattaggctatgcctatgttcacataagtttacactttttaggtatctgttttagcccaaaaaaaaagaatttttttttgagtgaaaaaaaatagtatctaaattaatatcattttggtatcagtttgcactttgttttttgttttttctt

SEQ ID NO: 69937 - DNA, 1595 bp, Cannabis sativa
  modified_base (35)..(42): a, c, t, g, unknown or other
ttttaatcacaagtaattttttgttgtgactaaannnnnnnnttagtcataaaaaatttatgttgtgactaaaaagttgtcactaaaagtaccagttgtatgttatcttagactctctcttacacctttgatttcaagtattaccttttttaattggttaatattacaatgcttaaacaactatatatatatatagtaattagattaactaacataattaagaggctaactaactttactgccttcagcctttagattgtcaaactgttatatttaaaattttaccatgtcatcagtcatagaaaagttaagttaggattaattttaacccgtctgatatattttgacccaactgatatattcacgttacgattttaattcaatcgtatttttaagaataaataatttaatttagaaatctccatctagtggttggaaacccaaattatttttgtgtttttagcaaacatggcataccgcaacaaaaaaagagtgtaccgtcataagcggagccacatacactccaacagggactgtggccaccctaaatttttaaaaattatgtactaagcataaatatatatagtcatctataataacatataaaaaaatattgatacacgattttttataattgaaaaaactaaaatgttagtatttaccttactcgaatataattttattattttgcaaatatatagtcttattatatatatcaatgtaggttcaacaactatataataaagtaataattgtattatcattttattataattaatttgacttgttttaatttaaaaatatatttagtaaaatattggttaattaatagtagtaaaattaaccaattatactattttttaaatcaatttgagttttattttgtttttcagctacatatcaataacaatttcggtaatattaaattgaactctgtcaaattttaaagtgtactcgcgttttatttttaatttaattacttgatttattattttttaaaatattgtaaaatatttataaaatttaaaaaataataatattttttttacaattgacacacacctttaaaagagatattttaatcatcaaaatttaaatttattgtataatatattgatatatatctgctctcctatggtaaaaaattctccctttacaaatatatacattgtagaaaaataatataaattcttcattattattcggcatgttcttataatttggtagtatttttcttagtaaagtcaaattacactcgtaattaatattattgttattattatcttatcttcttaatagtcaaaaaataaaataaaaagagagacaatgtggatgtggtgacgtgctttgcttgcatgaattctcctcttttgttccaaaataaattatacataaatatataatatatatttaattatagaatttataaatatgcatgttccctccttttagttaattaattaattaatcatgtgaaaattaaagccaatataaaatgtgtgcttgtgtctaaaacatgcattattggagatgagcagtactgtaatttttaattattatttaataagagattacaagtcaatgaaattatatat

SEQ ID NO: 69938 - DNA, 2073 bp, Cannabis sativa
  modified_base (1999)..(2002): a, c, t, g, unknown or other
gtcccctccctcttacagttagtgtacttgacagtttattatttatagcttctttaattttaatacaatgtttcaaattaaattaatcgagtaatttgcactataaattacttaattttaatttcagttagagataaatattaaatttaatttttgatgatcataatacataagttatattttttgaactttcctagatacttgataatattaagtcaatagctgtgtaacattttctattggtccacattattattattttttatttatttaaaaattaattgaaatatattaataagaaaatgagatgtggataataattttttactttatggttaagtacttatagaagtttcaaaaataaaatttagacattattactgtcaaaaattaaatttaagtatttaggcaaaccactcaaattaattcttattataattcatttgaaaagaaaagttctttctttttaagaacaaatcaaacaattttagtagacaaaattgaccaacaaaatagccttcaagaatagtattttgtttcgagatcgcttaacaaaagaaacatttacattagaacaaccttgcaaaaacattatgcaatcagtaactagtaaaccataaaccaaatggtgaatacaaatcaattgcactagaaagggcttgcattaacaccaagcagtcagtttcaattaagagtttggaaccctgctgatgttgaatattttctggttttgtattatttgttttaatgagaatagttattaggtattagtggtgcctaacactatctacaggtggcgtcccacgattggttatcaatattctctaaaagttattttcttaatttatacgagacccgatacttaattacaccaatagcgttatgacatcgaggagggtgctagacaccaataatgcctgtatgttctctagttaagcacctctttcaatccacttgctttagctaattgaagctccacagtccacacaccccaccttgctgtctgctataggctctaacaatcttccttcccaatccctagctatccaagcattgttataaggtattaatgatgtttagtattacttggaggttgcactttgtaattggttagcgatattttataataattattaaattaaattatgtgagatctgatacttaattatactgataatatgtcatatatagatagtgtatatagatagcaactcaagcacgttttagcatttctcacgcccaaatccatatctattttctaaactaaaaatagaaacatcacaattaatcttgatagtgccaacttctgcttttgaccactgctctaccacaccagcagccatagctaatgttgaattgtgatcttcaccatctctttgagctaacatccaaggaccaaggcaagcaattgcgtcactaaccaactaaccaccctttcatccacaacaatcttttttttattctataattttaatagtaatagtaacaacttgattttctttctattgtaatggttgaatcttcttattaataaagttaccattttccttcaaaaaatagtaatagtaacaactaacaagtaactaattttttagggcacgtgaaaaaaaatatgaaaaaaaattcaatttgtaatgtttagtatagaaagaaaagtcgtactaaaaaaattttcatttaacaaaattatccatttcaaacataaaaaaatattttttcttttaattttttacacttttttttttattctacattttctttactctttttctttatccactaaaatttaatgtatcctgttataaaataacttctggtttatttatttaaatattttttgagaatttctggtttattttcatgcaagataaaattagcgacttacttcctacggaaaaattacaaatactaaatttatgaaaaaaaaaataaatttacaaaaaataatagtttttataaaaaatttacacttacatttaaatatatatatatttttttnnnnatttttacggtattttataaaaacaacataaaataaaaaataaaattcaaacaatattaaaataatataca

SEQ ID NO: 69939 - DNA, 2065 bp, Cannabis sativa
  modified_base (728)..(764): a, c, t, g, unknown or other
atcgtattttcagtgagagtactgctcctgctgatcttttatctattgtaatggttgaaagttcattctaataaagtttaccattttccttcaaaaaaaaaactacacgtacatacatttttttttttgtttttaataataattatgtatacatatacatatacatatacaacacattaatatatgtgctttctataaattacacgtgtcattttataggtcacctttaattgctcttgaaccttcccatattcatactcttgtctaaaaaaattaagaagattagaacaaaggagttattattgttacttactggtatgtatataatatagtttgattactatagtctatatattatataagttaaaataaaacattataaatgaaagagtacactagtagatatatattcatgtacaattaataatatgttcttgtatgtaagtgtaactatagttttttctagttataattgttttattactattagtttctgtactatttatcagaacctttggttgagaaatttatttataaaagaatgtactacagtaatatgtggtaatatattaaattttttgtactatgtttatgtccccttttaaattttaagaactttttccaaatgtatatatatagtgagctgtaaaacggaaaaccacttttacattttgtaatattttgcatttattgagagatcatcatatcatataataataataataatnnnnnnnnnnnnnnnnnnnnnnnnnnnnnnnnnnnnnataataataataataatgaaaagtgtattgctattaggtaccagtggtgcctagcactttttcaacatgtcgcgttgcgattggctagcgcgatactccttaaaagctatataataaactatacaagacctaatatttaattagaccaatatcgatattaacacataggagggtactaagtaccactggtaccttttaatgttttctctaatgaaaagtgtgaagcttagggctacatgatcacttcactatttataaatatttaatatatttattattaaatgtacaaccgacaattcctctccatatataaatatataagtggtgtttgttagtattttattttttaattttaaaaataaaatataaaagtgtaatattctgtaaattttattttttgtttttatttaaattaggtttagggttcgaagtttgggatttgagtttgggttcacgattcgaggtctgaggtctggggttcggggtttggggtccaaggtctaggttcggggttcgggttccggggctgaggctgaggtctaggtccgtggtctgaggctggggccggggtcggggaccgagactgggtccgggttcaaattcaagttcgggtttgagtttgggtctggtaacgaatttgggtaaagggtccagggacaaggatcggggatctgcagtctggggccaaggttggggtcgtgtgtcgggttcggggtcaagttggggttcgggttttggggtacgggatcggggtcggagtcgggttctaaaatattgatgaaagaaaataaaaataaattataattaaaaaaaatgtttaaaatttttttgaaggtgactttttttattttttaaaattttgatttttatttttttaaattaaaaagtaaaaacagttttatagaatatattttctaaaaatatttttacttttctaattaaaacaatacaaaaactaattaaaaaaaatattatagatcgcaccctatgaaaaaaaaaattgaaatatagggacattattacttttctcccacagttccgattttattattctattttgggcacttatgaaaaattgtactttaattttttttgtataatatgttatcacagtcataacatcaatttcattttggaaaaatttagaatagtttataataatgttaaaaataaagtttaaaatagtaaagtagggtttggtaattgtaacgtccccgtttcaagcctccattgggtccttacacccacgaaaaaaatgactcttatacacgagtacggcactttggctgcttcctggattg

SEQ ID NO: 69940 - DNA, 3129 bp, Cannabis sativa
atcttcaaaaataaaagataaaaatcataaaattgttccaaacaatagtagaactaaattaaaaacacactaaaaattaacttaaaaataatactaaaaacaacctaacatgcatcaatactcagagcatagttgatgacatctgtaaaaccaaatctctctggtggtcttgttgccctttctttctatccatagtcaactgtaatcttgagtgtcatcttctgcatctggttcttcttcagattcaaccctttcttccatttcttcttcttcatctggttcaattgatctgtccacaacatgttccctgttattggactccacctcaatttgaatagtgtcacttgagtctttttttggtatgtcactcttttgtttattggaaagatccttgtagatggttttctcatcaaagacaacatctctgctcagaaagttcttttgatggttgtcttcttctatgctccacaccttgtaaccctttactccttctggatatcccaaaaaatgcacttccttgctctgggatctagttttccttcttcgatatgagcatacagaaggcagccaaaaattttgaggtgatcataccttgtaggcttacctttccacacctcaataggtgtcttgaactcaattgcagatgaaggacatttgttgatcagatagaaggttgtgacagctgcttttgcccaaaaagtttttggcaaaccagcatagattagcatgcatcttaaccctctcaagtattgttctattcattctctcagcaagtccattttgctgagggtttttgggcactgttagatgcttgctaatccttacttggttgtagtattctttgaattcatctgcacaaaactcaagcccattgtctgttctcaacttcttcattttcttaccagtttgagtttccaacatgattctcagttccttaaacttgttcaatgactcatttttatgttttagaatgaaaatccaaacatatcttgaaaaatcatcaacaaagatcaggaaatacctagcacttcctcttgattttgttctagatggtctccacagatttgagtgtagataatccacaattctcttggtagtatgcttcccagttccaaacttcactttggtagtttttccaagtatgcattgttcacacagctcaattggttgtattagatccttgccaaatactccatgtttactcaaaatcttcaaaccaccatagttgatatggcccattctcctgtgccaaattagtgtttgttcttcacctgtaagagccactgtatttacctgatctctgaaggtattgtcctacagtacatatatgccattcatcacagtagccctcataaccaccattgatccttttgtcacttttaatgagccattctctactttaattgagtatccatcctgatctaacattgccattgagattagatttctctttatttctgaaacatgtctcacatgttttaacattgtaactccacctctagtcatttgtagcttgactgatccaattccaataattggacatgaatgattgtctcccaatttgacagtaccactgctgatagttctataattagtgaattgtttcttgttaggagagatatggaaggaacaccctaaattgatgatccaaccagtctctgttctagcctttgaaatcaccaacacactagcactatcataaccatcgctatctcctccatcagacactacatctgcatttccacttttcttggagatatagtctttcaggattgggcaatcttttctcaaatgacttgttttgttacaaagaaaatatcttctcttgaacttggcatttgacttgcctttgtttgcatttctttgttccctgttctctttctttgaaccatttcctcatacaaagagcccttcaccagcaatgtcatcttgcttgtctgcctttctcttcatctcctttgacattaaagctctatggacctcctctaatgtcaaagattctctatcatacatcatggtgtcaatgaaatgctcatagcattttgttggaagagagttcaacacgatgattgcttggtcttcatcctccaccttgatcccaatattctctaaatctagaatcactttattgaaatcatccaagggatcctggtgtcattttaaaagagtacagtttctgattgaggaacaacctatttgccagcgattttgtcatatacaaactctccaatttcttccaaacaccagctgcagattcttcttttgaaatttctctgagaaccttatcaccaaggcttagtatgatggcactgtgtgccttatcgagaagctctgttttctcttttttttcttttttttgttaaaccttcaggcaggttcttctctccgaaaagagcatcttgcaagccatgttgaaccaggagagctctcatcttgacacgccacaatccaaagtcattcttgcctgtaaacttttttagattgaatttagcattccccatcttcttgctcgattgatcacctggttctaaaactatcttcactgatcagatcctcttcttgactaacaagattctacttcgaagtttcaagatccatctttgatcaatcacagctctgataccacttgttggagattcaagactcaatctcacacactagtaggttcacaacataaacaagaacaatcttcaaagcacaaaaaaaaaactacaatgtctattgaacacacgtaagaacttaaaattaaaataaatgaacactttatttatttgcttttctctgaattacaaagttagagagcagaaaacttattacaagtatatgggtatttatagctaataatctcgagtatgctacatgagttagcctactctaactaactagattaactaacttctaaaattagtgaaaaactggttgcttaggtgtcatatttctaaggcatactattctaacacgaaccttgacatcggacctcaaattttggacccaaccacggacctcgaacctcaaagcccaaccctggatcccgacttcgacctcgaactcgaacccgaatcctaaccgtaaccctgatgaccctgaccccagcctcggccccggccccaaaccctgaatcccaaccct

SEQ ID NO: 69941 - DNA, 1344 bp, Cannabis sativa
tatttaggttctagagatgtcatccatgaatgttaacttctcatcttcctctagttttaaatttgtgatctcctttttatgctttgtatcatccactgcaaaaatcgtatctatggtgtctatgttgttgagttgtgactggcttcaagtagttgtcctcttcattgtctcctcttcatagcctcatccatgttttatccaaattgatagatgcgcctaatcctcatttgtgtgcctctttttttttttttaaccatgcacaaattactctgttgctcctccacaatatagttaaccttgagtttaaagattacaattttccatttgcaatctaatatttgttgatctgcttatctctttgtgttcaagataccttcatagtcctttatttcaagaattgtaaccaaatctctttctaactttttaatttggattatgtctggcacactacactcctttttatattatggcaccaaccttcccgggcaaaatcctataaacgacttatctctaaagttgacacatatactagtcatatttttaccatctaatttaggtgtgtgcaatcttagaatatccaacaagattgtatttgttctttagagatctattctttcattcttctttagtaaattgattacatagaatatatgtcttagtccagtataacttccactattctaagtcattcactgactcttgtttgtcagacttcatttaacagcaaggtgtggagactactttctgaattgttcgaagacagatcctactccatgcatccgtatttatttcgacactagtacctttcattatgtgcttgaggttgcaccgctggtgctagtgacctattgtgttggacctatgcaaactattcatcccatcgtctcaattatgctcatagtctcactaattcccctataagatcgttagccttaggggttatttcattctatagatcatcgatcatttgtgggtcagcggaaaaactcatccttagcccccacctctattggtctttcctctcatattgattataacatatcttctagttacgatagcaagttctaacaatatgagtctaaacgtgagaaagggttgacttaatagaaacaatagagttttattctaagtaaaaaaaactccccatgcatatctaaacttaacgttttcaaacataactagtactattccatatataaattaaagttttatgaacttctaatacaatttattctaaatttgtaagaaaagagacaggttcttcctatcacgatgttattcgatactagatttttttttattcatagtcatagagtaatcttgatgtctttttttttttttttt

SEQ ID NO: 69942 - DNA, 2270 bp, Cannabis sativa
atgcatagctattagctactgatcaaccaacctattatgcatcaatggcaataatagatcataatgaggtgaggcaattagaagcagagattaagaacaataattcgagtactcccaaggatggatctgtttatttctccatcaaggttaggccaaccttgcctgattttctcacttcaatcagcctcagatatgtgaaacttggttttggttacctcatttgccgatggttttatatcttgatgattgcaccaattgtgttattgatctttggagctgaaatatggaagcacatacgccaagatttgtccaccaaatgtgatcttatggatgctttctttttagttggcttgtttgtattgattctatgtgtctacttgtactacttggttcctcgctctacatatttattggactttgcttgttatcgtccgccagatgatctaaaggtaagacttcattaacagaacacccatgtccgtttggtatctctaatatgagaatgtactactaactgattatacataatggtctttttccaaaactgaagatatcaaaggtggaattcatcgagttagcaagaaaatcaggctacttcagtgaagcttccataggctatcaacggcgagttctcaagaaatgcgggataggcgatgaaagctacatgcctagaatagttttcaagccagaccacaagataacgttgaacgatggcagagaagaggctgcaatggtgatgtttggggccataaatgagctgtttgccaagacaaaaatccggcctaaggacattggaatcttggtggtcaactgtggagtattgaacacaacaccatcgctctcttcaatggtcataaaccatttcaagcttaggaacaacgtgcagagctttaatataggaggcatgggttgctctgccgggatcatagccattgacatggctaaagaccttatgaaggcctatccggggtcatatgcactggttgtgagcaccgaagctgtgagctatacttggtataagggtgaccatcttgacaagctctttcccaactgcttctaccgaatgggagctgctgctatgttgctctccagctctcgacaacacagatggcgggccaagtacgagctgcatcagctgctgcgaactcaccacggcatgctagacaaaagcttcaaaagcattcgtgtagaggaagatgaggaagggaggcaaggtgtgtgtgtgagcaaagacgccgttgaggctctgcttctcccagtgtctcaacacaacgattttttcagcaaccaaatgaagtctaagacagtgtttgagcacatctgcatagtggcaaccagcaagaaagtgctggatgaaatgcagaggagactaggattgggagacgaacacatggaggcgtcccggaaaacgcttgagcggtttggcaatacttcaagtagcagtgtctggtatgaactggcttacttggagtcaacttcaaagatcaaaagtggagatcgcatttggcaaattgcctttggctctggtatcaagtgcaacagcgtcatctggaaagctctcaagaatgttgggagccccatcccaagtccatgggattgaattcattatccccagattagcaatgaagtatttgttttttttttttctcttcaatttgaaatcaaataattttctttccgttactatgaacacattattgcacaaagccccttcctcaaatatgatgttcacccgcttaaggctcaaggctccaaacaaaattttaagatttatccgtatgaattgaattattatcctaattgaggtctttatatattctaatattgctaggtaaacactcgctggatctacagtgtaatgacaaaacgaagataaggttgatcaagagtagacaaattagtatcgaaagaaaaatatggcattcacacaaattctttaaggctacaagttattacatcataatcacaatcaatcgctcaaaaaaatgatatgaaataacctggttgttaagaaagaattatgaacaaaaagtaatacacacattggctgattcttcatgtaacgtccactgttccaaaaatgtggatggtcctttggctcgggtatgtgtcaggagtaaaatcatgctgtcaaacaaaataccatactcaaactagcacatcgaagtgctctggcccagctgccatgccaaaacagcaagggaaaacaatgggatgaccaaattttctggtcctatgccgaactgctcaactcaagactgattaacgta

SEQ ID NO: 69943 - DNA, 2279 bp, Cannabis sativa
gtaaaagtgtgagacttagtgggttggggctcgagttatttaaaaaggcttgtgggctgggctgctctcaattccatggaagcccatgtatgcattcaagttctgtcgtgggtcgtgatgcctcatgtggtggtaatgaaaagagggccttgactcaattattttaagccaaagaattatatgtcgatgagctaaataagcttaatgggatgaactttaatagcaatgacatccctttggacttaggtggatagcccattgatggtggtgattttgcatccagtaacattaaaaaaagaaaggcataatgcatggatattggagcttcaatttctttagaggttaatgagagaaccatgccttttaaactttgtaagcctgatcatctttctctctcattatgctctattccaaaagcagggatgaaaagctgcctgggggttagaagagactttcctgtggatttgggaaggacagtcgaaccatctcaagaccaacaccatgagcgcaactcatcttctgaagaaccttttgagtgctcagatgagattgatgtcaatatggctaaccactccgaagatgactcttaccaagtggataagcctatctctcggggttaatcttctaggctcacaacttagaagaaaagggcttgaattgctgatatctacgccccttggagagaagttgtgttgactaatgatgaaggctcgcttgttggatcgacacttgccggtgtttcccctgtggaagaggattttgtatcccctccacaggaatcatgacgggtattgcttggaactgtagagggttggggcagacctctacagttcttgaactaaaaagcctcatttggcagtgctattcaaatttcatctttttgactgaattgaaagtgaaagctacttcattggtacatcttataaaaaatttacacttgtataataatattgttgttcctattgtgggatgtgcgtggaattttgttagcctgtaaaacaagatttattttttagaatatttatttgtccaaaaattatatttctggtattgtgtactccgatccggctaatcatccttggttgttgtcatgtgtgtatggcaaaccatattttcatgaaaagaaaaggttatggtcgaatattttggctcttggcgttaagtttggtggcccatggatgcttcttagggatgttaattttgtgctgaattcttcgaaacgtgtcggggcgaaaggaaaggaccaattcttgccatttatttttgagccgataaactcccatggcttgattaacttacccattaaaggtgacaatttaacttgggacaaccatagggaggtttcaactcatattaaattttctttggacaaggtaatcgtgaatgaagaatggcttcaacctttcccaaaggcagctattcaatcacgtcatacctgttactcggaggacatgttgttatgtgtattttttggggtttttgaggcctcttttaaatgtcaattttgttttgaagcctagtggatgagagattcctatagtaatttggttgttgaccatgcttggaagtctacctatcatgattgggccctggcgagggttttcaagaaagtgggtgctactaggctggctttgcggaaatggaataaggagaaatttgacaaatttgactctaacattagacgcctggaaacgcaactacatgacatccaatgtatggagataggatcttataggtggactcaagaacagagagtgagggctgacctgaatgaggtgctgagaagaaaggcattattttagcagcagagatctagagtctcttggattaaggatggtgataaatgctcaaaattctttttcatctctgtcacagttagataccgaaggaatgctattgaaagtatcttgaataagaatggttgttgggtctcttcgtgtgatgaaattggggaagagttcactagtttccttggtggaatcttctcggggtctaattttggcccgttggagagtttagactatcttatctaggaccatctctcccctatagaacaagatgatttggttaggcttcctgagctcgaggtaataaagaaaactctgtttaggatggggagtatgaaggcacctcgacttgatggtatgtttgttctctttcttaagaactattggaagtcagttgggtatgacttttgtgaagctgtgagtgatttctttcggtctggaatgatgcataaggggattaatgcaactaatgtgtgttggaatttattttac

SEQ ID NO: 69944 - DNA, 2833 bp, Cannabis sativa
aaaaaaaaaaaaaaaactagtagacatcttctttgtccatatacatcttccatgtaggcattttgaatttgggcggcaggtcaagggcattgatttacgatgagaagggtgatcccctagtccggcgaagttctagagcgatgagttttgggttcgtgaggctttgtaaaaggctcttaagctgatctatttgggcatgcaccactagatcaacttgacttgcttgtggactgacctgtgtcacctgcagacccccaagaacattattaagcacgtagttgtctacatagattggatgagaattagatgggatgaagtgtccatcctttccccttctatgattaatatcatatcttaaatcttgtacatgtaccaacctattgaagactgattcacctggatgccttattgtttagttgttatcagcagttgagtggttcggtatatccgtctgaggacagaagttatactgaccattctcccaagataataggctagaaaaacatgctcgtctaccgtgtggcctacaatttaattttgtagcctaagtttggacaatccattatcttgggtttgttgaatgttgttggctaggtgttcttttggcccatattgaggtcccttagggatatatatgcgtgcccttctgttcgtatcttgtataactggagtatctcccgctgattgttgtctagttaactaataagcttccctaattagcacagtcacctacctagagcgattgtcaattaccggttgttgggctctcacgatccccgtttgtcgatccatctactcttggaattggcatttttactactcaaaggccaaattcaacgctactcgggtatcctgttgatcatggtgaaaagtgtcggtatgctctttcatctgcctaaagcatctcacaaattttgcagtttggtatcatcaccaatctccactcgaggatttctaacaaatggattttcagcacttggtctagtctgctcggcatgagtactaatggttctagtttcttgtatgctctgagtgaatccagtcagaggggttgtcactccctattctgttgattggggaccccttggaggttaaggaatggttggatcgggattcgtcctcactgtatctctttgattctctggagtttgcacattaggattcgtagcaattggatcagtttttaacgtgagagtacccctccttatggtcacaaccatcctcatgtgttttgaagagaattaaaacaccaatcgtgttcttttgctctcaatgaaagtaccaaaatattgacctcgcttttggccaacaacactgactttttaaagagatttgaaaaaaatagaatttgaataaataagcaaaataagaatacatatttgttatagaagttcggccctgtgatggtggtaatagcctattctcattttatttgtattaacttgtaagaaaagaagcaacaactcttgatctctctcgaaagcttctacaaaaaatttagcagcataaaagctttttgaaaataagattttggatgccttgaatagtgaaatggctccactatttatatggaataattacattcattaggtttcctaaaaaaaataataaaaagagaaactagttacttttctaaattacattatttacatgtggaaatcccataaaattaaagatttaattgacaaatataggaggaaagtatatttaaggctttctctatcacatttgccctgaatgggatacacgaagtggccataaaattgacattagttggatggtaccgtttaccctgtgcgatacttttactttatttttcaaataaatagtatctaatggataatccattgtcgacgacactgacgaaggttccctccatccaggtctaaaaatgcttcatgtgtcacccaaataagcgtcacgtcaccttgtgtagattttgagatatcataaataatataacctggctttaaatatttcactattattactaggataagtgtaagtcagacgtgagatacaataatgataattattttgaaattatatgatatgttttcaataaatatatagtcttctttttattttagatctatattttgtgcgaacattgttcaatttttattgttttttcactataatatatatttgaagatatttttgtatgtgttttattttgaatacctttagagttctttatgtatacatcttttaataaatgtatattttaaaattatacataaaaataaatttaaaattatttgatacaattttattatttaataaatagttatacatatatttaaaaattttataaatagctgcatgcgaaacgcgacctgttgactaattttttaatgaaaggaagtaaaattttgtgttggtcaaagtaaaaaaaaaaaataaacataattttataactgttatattttaagagaaatttttaacaaagatttatattttaaaagacaagatttcaaaaaaaaaaaaaaaaaagacaaaattaaataattccgaaaattcaagtgggaaaatggaaagtagtgtttgttaaggatgatgaaggtaatactgtagaggttgtctgtgatttgattggtattttgggggcgttacaactgggccgacatgacaggcaagtattgtcggctgctggagaaagttgggcatcgtctgccacgtggtggtcccttgcggcacttccttctgctgatgatgacgtggcttactccagctggaccaccaaacaaatcacagctggttccacacgtgtgcttacataactggccacatcatcaatctttccttctctcatgtacttttcattttatgg

SEQ ID NO: 69945 - DNA, 2603 bp, Cannabis sativa
ttttatcatttaacaaaacacaggatccaattggtaacttttgtaaaacagatggtctaaaatagtatttaacaaaactgaaaattcaattaataacttttacaaaacacaatgtctaaaataatatttatccaattttctttagccaataattttttcacaatgattgagttttaataataagaagaaaaatgagattatgatgtcatatgatttaggtgtcatatgcataatcatcaccattatctcttattgtaattgagaagttctatatatatttatatgaaaattttaattagtaaacaatcatgaattatactttgcaaacataaacgatcatagatttataataaattaagtgaaattatatcacggaaaaatctgcgctttaattttcactagcccaattaaatagccaagaaactccaatataggcctctttatttaacttaactcgaaattagagtacatagtaacagacacccagattgaccaacatcactgatcaacttgttctaaagaatgaatgaacaacttaataaaaatgcactactaaatatataaatattacagtcgaatttctcttttaaaattacacattactcagcatggagttcgaaacaacgaagggtaacaatcttgtgttgtctacactttactctccttcactgaggattggaactattagcggtttcatctgcgcgaggtaaacaatcgcccacctacagatatgaaaacgaaaaaataagtcattatctatacgaacgattcttctctgctccaacagaagacagcataagcaagaggaagcaaaatccaatccaagtacttagtaaatctagattgggaaaagaatgtgtgacgaaatgagaggacttgttagttaaaataacaaacaaagcaatagtaggcttcaaatccaggtttactactaaagagtggatcagaaacatttgaagatttggtataaatttgttgttgttttttcctttttctttcaagggttattgaccgctaaactcttaatctttacacttagtaacaactaacccccaatttaaaattctcccaaactccatttctattttgccaatttaaggttcagttgaaaaccctctgtgttatttgccgagttggatcatccacgtgttattttcaacgaatcattagatttgcaaacgaaaatagagtttgagaagtattgccactaaaattttagattgagagttatttgttacaaagtgtaaagtataagattggtgtcattattgctaaaccacaaaatggtagctactaataatgcatactcaaaataatgaaagaaactcaaataaacaaagaaaaatgcaataacttacatcatccaacagcatactactgctgtgacaaccaatgtcaggtgaagcctgcacaaaagtaaatattgaattagccatctaaggagttgaaggagtttcaatagagcaaaaaatttaaagagcttgcaacctaaataacccaaaattcaccaaggagttgacttgaaaatcttagtgtagatcagcagcaatatctcacatcatgtataattggaggatttatataactttgaaacagcatggacacatataactcgtactcatcaattaaatatgctaaattgtagagaaaacaatggaaagaacgataatgggtgtctataataaagttcttcactttataattacttatactcttaaagatctaaaatttcaatatttactaatagatgcttataatcaagttcttcaatttacaatgacttatgctcaaagatctaaattttaatatgtgctacattccttatgaacacaaaatccccaatcttcaaaatttcaaactatactaagaaagaagcactcaaatcatattctatctggtaaatcctaataagaccaatttacaatctaaacattattctatgatgaaacagatgaaaacccacttggcaattgaattaaaagtgacgaaaaattaaaactttgaattggatcaggagaacatacaaattagtcgaaggggttctgttgcagcagattctgaccagaagagatgcaattacgcccaccacagcaaaaattagggttgtaatcaaaaaacccatcacgtctgaatctgattccaacccttttctcaaacaaaaaaaaaaatcaaatcgaccggaaaactggattaatcgatctgcaaaataaataaacaaaaatccctgccacaaaattcttctcagcactcgaattgggtagataacattaacagagagataaagagagtaccctttcggcggcggggttgtggctgtcgacggcggtggggatcggaggtggcagatcgtggaaggcagttgatttcggttgtggaagtgaaatagtattttctttctaatttttttttattatgtaattaaataaatatgatttttttgtatagatatttgagatttttttatttttatattttagaataatttttttttaagaaaattttatttagaaattgatggagtaatttaaatggcaaccaaaatctttatagcaattcacataaataaaattaaaaatttatggcaacacaaatcttaaatttga

SEQ ID NO: 69946 - DNA, 3728 bp, Cannabis sativa
  modified_base (3461)..(3462): a, c, t, g, unknown or other
aggaagacttttctttttggtaattaaggaaaagtatacaaagactttatattaaatagtagataataagcataaataaatacgtagctaacaattaacacaaacatgaaatctatgattgaatatataataaaagaatcgctctaacacaaattaaagaagggaattgaaggcagtattttaaggtgtcaaacactacgaaaaacggtatgtatacacattttaatttattaagtaatataagaaacggttaaccaattatttagtgttgtacaatttaagataagatatgcaaaatacgaatattggcttttgatagatttatgctttaggtaagctatcacgggtgacacgatacttggcactgaacatattgactcccgtgtaaatcccatcatgcatttgcgtcacggtggttttgccgtcgtagtgagtgtcgcgcttaaaataagagaaaggaacatcacactctcccttcttcacatcaagagtgactgttgctaaagtcttaggaggtactttagctttgtaagtagtctccactgtaatcgcatctgacgattcatccttgccttctctttcgtaagtatactgaccagacgtttcgatctctccatcgacgattagaggaattgcgccaaattttaaggtggttttccatccctaagctgagcgaaatgtttgttcggcaaactgagattttgttttctggtaagaaaccttgagatcaatattgtctgtttctttgctgccgaagttagtgtattctatgcttgaaccctcgacgattggattatggatgttgtatactctaccgttggctgtgtcgaaatcgaatccgtacatagtactcaagatgacactttcggacacccacagctttgtttcattcatgatggtgtcctcttcagctttgagagacttgccgcctttttccttgttacaaaactttccgtttcccagattcttgagcgccaccacctgtttcgcgaatttttcaggacggaatatcgtgttttggtccatccacgtggtgtcggcagagttggccaagatatagttatcttcatcgcgcttccaaaactttccggtagaaacattctttatgcggatgtaaccatcagatttggtgatgatctcatttactacccttaaatcgccgatgctctgatcgtcgacgaagtgtaggtaagcatcgccgtcgcgcgacaactcagaaatttggctttgtcattaatatcagagaaggacacactatttggaaacatgactaaggatgcccagtccaaaacagtgaaaacatagctgacattaccagcgtcgatggggaaggaatcatcggtgtaaaaagcttcgtcgtacaccgtggtatcgctcttcagaacagcgtaacgtttagtacctgggtggaaaaatcggaaattgtctttaggataaccaagagcttggacagcctggaacatgatacttgatactccatcattttcaatgggattaggagccgcaacttggatatacaaatcttcagttacgcacaagtatttgttgttattgcagcaacgtatgcaccaatttctcatttgtctttgctgcctctgtttcgaattttatcacaggactagtaatgtcgtcttctttaaaatacacaaacgtttctgccacattatcttccacactttctttcttacttatccttctcaagtactgaaaattgccgaatgatttcagaaccataatccgcggcaacgcaatcgccatttattctgctatgaatgaatatagcttataatattgttgggtgaattaacaagtgataagagatcaagtatatttaaacacgatatatagacagatatgaatggtcgaatatattatatataaaaatttcaactcatcaaatatatatatataacgtcatcataatataaagctcatcatgacgttaattactgaaacgataagagatgacttatctttttattatttattataaaagttgtccaaagtaaactatgattaaagttagagcaaaacccattgattgtaatagccaaaatatggactgaaacatttggttataaagtctaaaaaatggataaacattctcacctattaaattatatatggactcaatagacacttagaaaagtactaagtaccccaagtaatttttagcatttttcttaaataaaaagaaaagaaaagaagagaaatggaaaaaaagaaaaaaaaaaatagaagcaacctcttaacgaatcaaaatctccggttaaaaattagtgtttgtgttaaaccaatctaatatgacaagtcaattaattcagttaaaggtttaattttttaataaataaaaaattaattaacgtgttaaacttatgagacaccactttttaagagggatcttaattccgacactttgaacatgcatgagttagttaaatgaaagacccttgaaactcggatctaataaagtcattctctaattaaaaaaagaagtctttctctattataggtcaatgtctatatgtttttttatttttattaaaacgtttatatatatatattctacattgcataatttgagattttgagattggatcacaaaaccccacacaaacgcaccctcccatctatggcctgcagtggttaaggtcaatgtttatacttggtatattattatgtttagattttgtttttatttagttacaaattataggccatgtcggctataacgtcccacgtcaagtattattttaaaaggttataaaaagaagtattttttttgaagaatgatgaacaatcccactcattacatattttaatatttgacaatttcatgatattaagatgctctgcaaaaactgttaaaaaaaatgctctgcagaagagatctttattatttgtagtagtgaaagaaacgtgtctctgctgtctatatgtgtattttagttttaaataagaataagataaataaatgtttatagaaaaaacaaattaaaataccgccataaagtcaaaatagatgaaccaaaacttagaatacaagttcatttatataacaattaataaacaaattgcgttgcgcgtgcgattataatttttttaaaagatttaagtcatgaaaatatatcaaattttaaatttaatatgttttttttattttaaaagtgtgagattaatattaggatatttttagtattaattttagattaagtttagtatatttttaattgaattttaatcgtgtttggagcatttttatgctcgttatcttttatttttacagatttacaataaaagaagattagaaaaatgagaaaaaagataaaaatatctaaaaaagagatgatatttaaaatagagaaaattatgcaaaaaaaataaagctgaaacttcaaacctgaatttgactatattctgattagattttgaaaaaggtcaaaacataaaagttctagatnnctcttttatctttctggaacatcttaaattgtccgtttccaagcaacattgagagagttatggataaaatactatcagtcgatgcagcagaaaaatcaccgtcgaaacgtgaaactccaacacgggtcacggcatgataaagctgggccgcggcccgctcccgtaaactgcacaaaaattgtctttctctcacgtgggtgttggtggtttcctaattcgaataggaatttaacatgtgcgtttttctatctttttagtccttgaaa

SEQ ID NO: 69947 - DNA, 4436 bp, Cannabis sativa
  modified_base (190)..(200): a, c, t, g, unknown or other
gcattatctaaaataataccatatgataaaaaatatataccttacaatagaaatatataataacaacaaataaaaatataatatataggatatatgctaataaaattatatatcaggtcaacaaaagtacaatagaaaatagaacttaaatattattttaaaaaaaaatgatataccgtataacaaaaannnnnnnnnnnattcaccaaaatatatatactaaaaataataataataaaaatattttttactaatatatataaatgtatactatactaaccaaattatataccaccattgtatataataaaataaagattaattaaatattatttaaaataaataatcatacaatcaaaatatataaaaatatgtatatgccaataaaattatatacacacattaaaatatttttattatgctaacaaaattatataccactattatacatatcaaaatataaaaagtaaatattatctaagaataataatatatcatacaacaaaacagaaatatactgtacaataaaatctatataccaacaactcacaataatacataaaaaattaaaaaaatcgacataacttataaataaaaaagatttttacaaaactaatatagatataccataatttttattaatttgcttctaattctaaaaaaatgaaaaaaaaattattaattttttttatgtgacaaaagacaatataaataataaatagtttaaaatagtcatttttctacaaattttgaaatgagaataattactaatattgtcttataatttagagccatttgctataatttttttttttttttgttattttttgttttttgacattatatcccttttttatttcctagtcaagaattatattttatcacttcacaaacacgggttatcaaattatcatcataatttatcaaaaataaaatgggatttttaattaaattaagaaaataaaaaaattaaccaaaagtgggtcaccttccgtataacaaattctaacttcgtgttcgtataatatagtggcatatgtatatgtatactatatgcaatatgctcacttaaccgattctattctagttattttgtgttaatttatttttatttattatattataaaatcggttcaatttttatttatatttgaaacatttatttctagtaatttttttagtgttttttctgacaacgataattttttcggtgacagtgattttttcggtaattttttcggcagcaataatttttttagtgacttttctagtatcggtgacttttccaacatcggtgacttttttgacgaaatttattattacaagttttatcaaatttattattttttttttcatattttaaactttaattattctttagtctcatatttttttacattatttatttacgctatataaaagtaaattttacaatatttttcagtatttataaaaaaaaaaaaaccccaaaaatatattgcaaccccacgtacctacaaaactaacaaaaacaaaagcctagaaccaaaagggtagaaaagaaaatgttagttgtcatgacaaactatcttatccaaaacatgtacacttataacttttattcctttgtccaagactccaaaatgtatagttaaagaagtggattgagcacaaagtccaagtctatctaggtagtcactagcagtgtatatatgcatgaataatgttttaagttatccatccactcaccgtttatgaatttcatctacttagcacttgtccctatttgacctcttttgatactctcattatctccaactgcatgcctgatcatcaaactctattatttttttacaactactcgatcgtgtctctattattgttgcaatttttgctccaaattgttatatttatctagtgctgtaaatataggtacgaaattggtacgaattcggaaggtacgagtacaattaggtaaaaaataaatataaatttagtatgatatgatacaaaaaatatataattaaacatgacactataataatttttgtaagtatcaaaaatagaatcactgctatcggtaaaaataaaataatgacaaaaatgagacttctaataaatataatttcatgagatatttaaaattttcaaagcttactcataataaatattaattttgtgtatgattcacactttatatattgctcatattgtcatattgctccctttactactttgtttatttcattttatcttttagtccaacttgtcaatatatcttaattaatttaattaatgtctacaatgaccttgcaccagaacgaacagatgtacccaaaccctagcatgtgcatcctaccaggacacatatatataagttacataaccaagacattcaaactcttctttctaaggaccatgatttcattgaaatcagtgcatatttgacttctacaattaatgatgcagataggcaggttcaacttcaataatcttataaatttgcatcatcaacacaataattacttgtttatatattaattaagtggaaactcccccacataatacatagtttacacataaaaaataataaaaacaaaagataatacttctaaaaaattcattgcccggtcccatgtgtattaagtcaaatcataaaactaaacaatagggaagtagcatttggcaaccacactccatgatttggccacacatggatggaggaccaatatttggtaaggctttatgtgttttcatattttatttctcaatcaacacctcatcattttcttaagcgtgtttttgtaattagctcagttttgcatcatggtatttgatcactatcaccacatctagttttatgagaaagctttgtgtaataaaattccaaaacaaaatgatgtcactcacaactgagatccatactcttggacgatgtagttgtttttggttactgtttttctgttcttttatcctttattttgattaactttactgccgaagagttctaggtgtctagtgtgaggcccactttgatgaggtcaaaattattagattagtatcaaatttatgtcacactgaattggtattgacatctttgtccaaattctaacagagttgagtagccactcatgaagttttatatgcataaataacacttccaaaactttccaactattttagaaagatgatgccaaattcacttcttttttttctatcaaaattcctttttcttggacagttgattaagatgagccaattgtgatgatgaactaccttatagatagtccaaggtgagattaatttacaaaacaaaaagttgtttaaaagatgggaacaagtaataatttatttggtacggtttgtcctgattttgatgccttttagaatttttattttctatttttctagatctttaagttgagtccaatcagtaaaattaggtaaggtaagatacttaaattgggaatgcattaagattagggtcttaataggtttcaataaaaatcattaaaattggactcttatatacagtgagggtaaaatcatcaccatcactaccaccatcatcattctccagaacttcccttagtggggttagtaccaacaaatgaattaattattattattggaaactaagagcaaattctttataatattgctttttgattttattttattttttttaaataaaattacatgagttttttttttttttttgtcaagaataaagttatatgagttgactgtcttagtttggagacaaaatttaataatagtgttttgttggagtcttatttaggagtagtattgaatgattttggtttgttattttgtttgttttaataaagcgagtcttgtgcattgtcttagaactattcggcggctcacatcttagctaattatgctttattggttacgtctattagtaaagtttggtagtccggtcattctatttgtattcaaactttgattttgcatgatacaaaatttgttatgaatacaggtttgtaaatttacatgagtttcttagtcttttccttaaaacagtagagtttcttatggaccttttctctaaaaaaaaataaagttacatgagttaagcaaataaaaatagtaaattttagttaaataattatttttttattgtaatattttgagttgtaactttgttcaaaagaaactatgtgttgtgagtgttggaaatattttactagaatctaaatctactaataagtatgttaaattaacatcctaaatatgaatatctctaaaacaatgaaattaaacacataagagtcttaaaaaccttacattggttgcagcggaatataatgattccttctgctcaagatctctaacccttgttcctttatgtcacataatattatcaagatatgagcctagatctctttctctccttcgggttcggttaccaccgtcttactcactatgat

SEQ ID NO: 69948 - DNA, 3044 bp, Cannabis sativa
ttgttacactctttgcatttattcatttattcgtgctagaaactaatttcaagttggttatattaaaaaaaaaaaaatttgacaaaaatcaagtttaggatcatttctataccattttggaaaacaaaaaatctaaattatcatttaacaaaataaaaaattgaatctgtaacttttttataaaagactgagtatttaacctaaaatctatacacacatggtatctatgtaatatattactaagcaatattactacatacatatatgaataaacagaatgagaactttgctagcaaaaaatgacaaaaaccaaaaacagataagagataatagaaacaaaatcttgagctgaaaatgaataaacagagtttttaccaaaacaaaatcatcaatcaaagagaaacagttcttttgtaaagtacttcattgtcactctcttcttcttcatcatcagacacaatctcactaccaggtagctctaattttccacccatacaaaatgatggccctgatctttctggttcaatataatctccttctaacctctcttcaaatctctgatcactacaattcaagaaccaattcaatgatgtcctaatacccttgttctgtaacctattgtacctaggtttaatcctagactctaaactataagtaaagtattcaggaaactccacaagctcttgcaatggtctccccatctcactcttgaaaaaataataactgttcttcattcgatcaactctcaatgcaaccaactgtgggcatttcacaaccatcttagctacatcaccggatggtaatccccgtccgagcagaaactcaaccggtttcagtatcacattttggttaagactgataatctgtggcatcttctccattactcgagcaaagccttcgggatcaaccttgagcttcaaattgaaaaagtattgttgtgaagacatcttagctttcaatggcaacccaatgatttgtggatactgagctataacagatgcaagtgattcttttctaactccaaaactcaacaaacattccacattaggcttaactgtctcatcaagatcataaccaagtatataagccctcttctccaacatcctagataaaatcttcttaggcaaacccaatgaaactaagtaatcaacaagtggtttaatcattgtcccaactctcattcccaaaaaataagggtactgagttaccattggaccaatatctctaggattaacaccaatactaacaagataagcaactgaggtactcattgttccttcaagcttaaacccaagtatttcaggatacttcatcaaaacataaccaatatcttccttctcaacatcgagtccgcgaagcgatttaataacaggagcaagctcaacaacaacactagcatgtaaaacttgaggataattcttaacaaactcaccaagttttgatctttgaataccaatcttctccaagtaacctaaaacaggtataagattttttctaacactacatccaagcattaaagggtactcatttatgtcatcaacagttaatcctaacctcattatgaactcaactcgttctctcataacctcaactgtagaaggcaattctaagctctctaattcatcagtaattatgcctaagctctttaagtaatcacatattataaccctagacacaagcttctcttttcttccctgaaccacaccccaagtcactgagggcatttcgtactcgggaaactgagttgagaacacacaaacctgtaaaacccttgaagggttttggatttggggaagttggggagatgggttttggttggattgtgaaactgggtaagaatttggtgggaattttggacttgtggagagtattttggtgattattcttcttcctctcagtagtgagctcgccattttatgattaaattagaacaaattaaagcaacgaagaatattactgtaaagattaaaatcaataagaaagggaatctaagggcttgcttacctgtgtgtttatggagttttgagagaagaactttttcgactgagccaaaccagagtttgaagaagaagaagaagaaggaagagcatttgagaagcagggtttagatgggcttgggcttgggcttgaatttttttaatgataaatatggcatttttatcatattcttacaaaattaccataaaatgagaatcttcaagttaatgtcatagaataatgagcatagctattaggtaggggtgtttaccgatttgtttctggattttcaatttttttaaactaaatttttaaaaattcaaaaccaaactagatcaattatcaaactaaactaaaccaatccactcaaaaacgaattggtttatatttctaatttttcttgtacaaaaattgttcatttttttatttttatttttttggttttttacttttaataagtttttaatacataaataataataaaaaaattagtatcaatattaatattatacctaaaattattcccatatatcaacatttcatccaatatatattaagtatatataaaataattatgtgaattggtttgatttgaacagctagcgagatttctaaaactgtgaccaacccagagaattttaaatggttcgaattgatcgagtaattcacaccagatttatttggttgtctcaaatagtttggtccagattagttgaagtttagaactacacactgcggattacaacactcctattattaggtaccttaagatgtctaagattgtactataccaatatgcatcttaagtggtaagtaatttgtcaaattatttattcaatcaaatgtgtgaaactcggtaatagatttgtattgataacgtatgttaacttattatgagattgtactgataacgacatgttaactttttatagtaattgacactttaagttaaaaaattgaaagttaataagagcatgtttggtattattttttgttttttgttttcaaaaaattgtttttagaaatgaaaacaaaaaatagtttttgaagtttttaaaaacaagtca

SEQ ID NO: 69949 - DNA, 1441 bp, Cannabis sativa
aattagactaaaaaattatcttgatattgaaataggtagaaagtctacggaaacactccttaaaagagtgtactctagacttaaccaaacttttacaccaaacatgagttgtttcagttttaattttaccccaaaaagaaaaacacaattttccattcgattcctgttccattgcatagcaactttaatgttagtaatcactgacctgggccagggcataggggagagctgagtacatcccagcagctctttctcggtagaaaactgttctctcaatagccacaacaggttgcacagttgagcaattattgatcccaacaaacaacacggctacatacatggctccaatcatcatggtcaaatctgtcgtgtcctccctgattatgtaatttcaccaaagaaaatgaaaaagcaaaaaaactatgcttgagctgtcatgaaatgaaaccaaaacttttgatgtataaataggttttaattaatctgagttcttaccttttggttccaacttgccagaagattgaaccaagcactagagcagcaacaaaggtgaaaaagtatcgaaccaaattatagttagggctcctccagtaagtccaccattgcttccataagcaagatttgaactgtccccatgtggattgggagtactgagttgggaaatggagatctgtagctccttcacctggacaactcaagtttttgactagactcttcgtttgcctgcaagtttggttgattagtcataacattttgtgccaagattcataatttatttttcaatgtactacttactggtacaaagatgatgacttgaagtgctcagcaaaatcaataccaagcctaacttcagatgcttctgagcttacttcaagcatccaggctgctggattttgtttgtctctaattttaatcagtcttggaatttcctggaatagattaaatatatatgtaacaaatgatattgggtagaagaaatttaagaaagttaatgtgtatactcacttgaaaatattcaacaattttttgagagttctggcattcttgacattgttaagttccacaagttcaatcacttcttccacaaacgcctaaacaaaagatatcccagataagagaaaatgttgtatgaagctctactattaatatatggtcaaaatttctaccattttttccttgtcattgacttcttgagggagtcttaggaaggcagagtaaattaaggactccttgactatcacttgtggggaatgaatatcagtttgttcccaataaccagaaattcttgcaaaagtttcttgtttcttaagaaagcctaagattcttataatccccttcaatatatcctccagtttttcttccagctagaacatccatgagtgttgtcttccctgctccgctaactcccattaaagcagtcaagactccaggcctaaatgtt

SEQ ID NO: 69950 - DNA, 3050 bp, Cannabis sativa
aaatatcatacaaataacaaaaaagtcaacaacaaattaataagagtacaacataataagatcgtattttctgtaaataaaatcataaaaaacttaagaaaaatgtttaaaatttcatacaactgtatttttgtatttttttttttatgtatttataaaataattccaatacattaggtttccttttaatattaaactgataataacaaattgttttggttttgtgttttttcttctttcctttatcccactacattaataaaattgacattgtctcatcccactaatgaaagagggccccaaagaccccaacatcaataaaccaaatgccctataagataccttgaaagtggataagagatgatacaaccaataagttaattccactaaaactcacactattattgaaaaccttcttacctttttcttttaatcttccactttgtatgtgattctacaccagcagccataagtggatgattgtctttgtaagtgaagcaagaatatatataataattttcacatcaaaattttgttacatactgaaacataaggaatctgggtcttctcttaaaatcaaactcaaaccagaaatgggcatcttagaaacttcaaatttatcgaacttttgatgatccaatatgtatatgccatcctatatgggcatctcaattttagaatagtgtaaatatgaagttttatctttattagaaacagttggaatgagtacatattctaactacttaatattttgaataccatattccatattatagacattttcttcatttctttcaagaattcctttatacttttatacattttttttatacaacttacttctcttatgataaagataggacattaattaagactaaattattgtcatatcatatgccttctcttatatccccttccccaccacttatatggaaatattttcattatcttgaattgagtactaatgttaactttattgaaagttctcattacaatttttttttcttgcaacttgtatatataatcttgcatattttaaacatgataccttatgataaataaggtttataattatcaaaataaagtagagaaatttttttacttattaattctagtaaaaagaatatataatttttttttataaatccttaatcactccttaaaatttctaaaaacataaaattattgaaacattcataagatctatcaataaggattacaaaaacattattttacctactttgctttattagcttatagatatcaaatcccaaatttcactaagattttttaactcaaaccaaattagggcagatgtgagaataagttccctcttcaaaaatactagttaaaaaaaaaagaaaaaagaaaaagaaactcatgatttgattcatgaagaaacaaaaaaagaatcttggacactatttggtgtcaacacatctactattcaaccaatctgtcatccacaaccgtaagaatataatcatattcaatagtactttttgggccccaagcccatgtgtcattaagatacttgtgtcgagtccagcccatttttccatctatataaacccaagttcgacctttaccaattctaataccttcttaccttaactcatttttaccaatggagagaattaagcctcaaccatttcttggtgatagttgtctgagccaagagcctaagaaaactttaggagcaaagcttaggcaggcttgtgaggcagctctaatatccatggatagctatggttccaatcagaactgtggaaaaagtctcttaattcccaaagatattgagagacgaaaggtagtctaccaatacaaagctgaagaccccataagaaccatgatgttcttggggtcatggagtcacacttaatagtcttgactatatttaacttttttcttcttcttcttataagaaattataaaatgatcaaaaccttagttggtgaatccacaagttttacaaactttggtggtgatatatatgttaggttgtgatccatgaatataatgaagtatatagtctcatgtatatatgtttaatggaatggtgattattatacacctactaataatatgttattttatgtttgtatgagttgatttcattaacataatgattttagatgaaaatctaatactaaggttaaaaaaagttgtgaaatcatgatagatcctcaagttataatggattatgtgaaattgtgaattgtatttactagctatcctgaaaataacttattttttgtttttttaagtaataaactcatatatatagaatttttaatgattatattaaatatgtaattataataattacaattattttaataattaaattattattaaatgattatgattgatttaatattaattaaaactttcgtataatttaatataattttatttattaaatatatttttgtgttcttataaaatattaattaaaattaattttattttaaaattaaattaaattataattgctaaatagtttttacattaattagttacaaaataaagttcttttatataattaatttaattctaaaatattttttttttaataataatcttgacaacaacctattatataacatatcataaaaaaaataataattatactataaccattaaataatcactaatatttattaaaaaagtagttgtcataagttacttctatgaggttggtttgttatgtttttcttttttttttttgaaagaaagatgtagttcattaaatcaaatcagctgttacaggagcactaataaacttaggacaagcatctgtccacaaatcaacccctacagaactagtaacagactttgctagtgcgtgggccacaccattcgcaacacgcgaaatggcataacaagaaccaccaccaacagcagctaagagagaaataatctcctcaacaataggtttatactgaaaaattagaattcgggaaagtaatccaagaattaacaaccgaagaatccgtctccactctcaccaacctgtaacccagcatagatgcccaccgcagcccaac

SEQ ID NO: 69951 - DNA, 1964 bp, Cannabis sativa
atgatatcagtagtcagagttgatcttttcttgacattaaatgcatgtgaagcagctttcctcaacaaagtggacgcagcaatgcatcctaacattgtgggattccttggactgcagtgtaacataaaacacaaatatgtaatgatgttaagtgatgatttgtcgggaaagattagcataagacaaagattggagcagaacttgaacaaattaaccttatgcttgtgttcctatctgaagatgagactaattgtcgagcccaggatgtgaatacagccacactgaaacgagcgggagaggagaatgaccatcactcgtgttagaggaaatagtaatgtattccttagaaagacgacctaaaaattaaaaacaatcacttgccttccagaaagtatatcaccctgccccccacagcgtcgaggagaaccatagatgctaactgatgtaactgcataaagagtttatatcagaaggtgctcagataggacaagcatgggaaattagtgatgctcaaaaaccaatagtagttattataaaactcttttaaaacaaatgataatacggacatggccaccttaattcttaatccatgaatgaaataaattttatacaaacaagatcttattagggtcatgtaatcaataataggaacaaaaagatacagcgttacaaacctgtttcgccatcagtaataaggtcacattttcccttcctgaggatagttacaccaccaatcctgatcaagaatggcctcaaactttagtaagttctaaacaacaactagcatgcaaccaaaactgttaatttgaagagtagtatacgacatattataagagtgatcctaaagaagtattgcaagaacatttgagtgcatttcaaaagtaacggccgaagtccgaaatactctaatataagtactattgaagtgttcagctgtgcgacaacccagagagaagcttgaagaagaaacttactgttgcgccagagatagtaattgcccaatagcatcatcatcatttacttcagatcttagtactttctgtacaagacgcttatattcatttacatttggggtcaagacagccaagggataaccactaacaagatccaaacaatttgtaacaagaaaaagtccatcctgtgaaagaccttgcatcagtatacgaatccaaaggtatatgccatagtaaaatccactcacagaaactacatatctgaaatcatgtacatttatttggttacataccccatctaccacaattgggacattagattgtcttgcatgcttcatgatttcgctgacacagtcctgaacatgccattcaactgttagaatcatttatgataaaattataaaaaatccaattccaatgaaattttataaacgcggagtgacacttagttttaaaaaaacaatagcgaaacagagaggtatcagcattactcaagtcagtcattagtccaaagcctaagagtaaggttgatatcaggatccaagagtagtggacaattgtccaaatcccaagtattgtccaatgcaccaaactagctctatcatgtcttcatagctagtaatcgtagggaaattgcaatgtttacagcaaaacgagtatcatgattttggacaccaaaaaggcataagagtatgcagttgtacagaacaacacttggtactccacaaacaattcaatctaccaggtaaaatttataatggtgtgtgtactctcttattgatagctttgcctagtacttggtctaaaaagaaagaaaaaaagaaatatcagcatcccacaaaacaatgaacgcagtagaaagcgtttatgtagccataatattctataaagtctcctgcattgtttaaatgagatgattacaaaaacaacaactcgtcaatgaaaaccagaaagaagatgatctacattcatctcatgtagtgattctgtcaagaagaatgcttaccagaa

SEQ ID NO: 69952 - DNA, 1635 bp, Cannabis sativa
gggtattcaggtatgtttacctaaatcttcttctaacctttccaaactttcctcttgactatttgtatagatactcataattttgttcagcagttgagcaacttaagtattagtcagtgtcacttcagtgacaaacttatattgagtaaatataatcaaaccatgactttcaggtggttcagttgcttcaggtcaatatttgaaccatttcacctataaattctacttggttaaaccatgtgaaactgtgtagttgtcacttatgtatgtatcttggtttgtttattacttattttgttttgatcaaatttggcttatctaaaatgtgatttctcatgtaactttccagtggggatactgatgcagtagttccagtaactgcaacaagatactcaatagatgcactgaagctaccaactgtcaccaattggcacccatggtatgatcatggcaaggttagtactcaataagcaatatgcttttgctttcacattcaatgatatatgacagatatgttactgggaaattactctttctttcatcttcttcacccaagttcttcatcttctgtaatatataggttggtgggtggagccaagtatacaaagggttgacatttgttacaataactggagcagggcatgaggttccactacatcgccctcgtcatgcatttattcttttcagatcatttttggagaacaagcctatgccaagttaatccaattcaacttattcaagtattcttgatgaataagctcaaaaatatagagattttaaaattgtttatagattataatagaaagcaaaataagagaagcattcaccttgagtgttcctccattttcaataccccaattgcaatgccattaattagtattcttctacaaattgtttctgaataacttctatgaagaaactgcaggaagtactagttatatagatacgtcaaatttgagtatatttctttttgttttattattatatttagtactgtaaaaaggttgtaggggaatcattctatcttaatagaaattttgtctttgttgtaataagtgaaactgtaattgtttatgttcttaatagaaatttccaattcatatgttctcatttcaagattgaattcttgtgttttcgtggtaaaatttggttataagcaccaacaacatggcattatatatatatatcaaaagtctactccacgttgctacagttttttttttttaattttttttctttgataattggagaacttcattcaaacacaggaaacaagaaagaaagaaaagataagttcatagtagataattttaggggctattggaatgctctaggatgctctatcaaggttttttcctttcttttggtttcttcaagctattctcatccttagtgatgtttttcatgaattttaaattttagttttttttcatctattaactgttttcttgttattattactaacaactccaggtttttaatgcctcctttaagaagttggtggctatttattaatgcttcaaaaaatacttggttcacgtttgccccctttccatcttcttctttagtgcacgtcgtcgatagagaaatttaggggttttttgtgatcattatcacttctctcgagggttcatg

SEQ ID NO: 69953 - DNA, 2907 bp, Cannabis sativa
gccggagtgtggtggttatggaggtttatgggttttcttttgggtttgtgtttgaagagagagaaaatgatagagatggatagagagagagagagagggacgacaggtctcctttattacatataaaaaataatttttttttttaatatacatatatgttatattatatttaatttatttattatatatataaagtctattttgacaagccatccaagttatgaatttgtgtttaggaaacctaaacatgttccaagtgaaagcataccaagctttttgcatgtgaatcgaccacaacttattacaaagacttgagatattgaatttcacatctctaaattcttccatattcatttttttttcttcattacatttttaacttccacaatctttctccaattctaacaacaagtacgtactctgtggagcaatgtcattccaccaatcttggtcttaaagactgtttgtctctagcaatattccaaatatatctcccaaaagctccaaaatttcagttttcaatgtttccaaaacccaatcttccaacatttttaggaagataaatctgattccaagccacaagacctggagcattagcatcatagttgcttttccacaaaaaagctctacaaattttattgatttgctccaaaatgtatttaggcaacaccatcaattgtgcccagtaagagtggacatcaatcaacacagaattaataaggacacatctccctacatgagataaatttctagagctctacatacagatttgttggaatttatatcctaaaagtaagtattcaatggatagtatattacggagtatatgaaatacaagtataagataaatgaatatattaattataaaagtataattaataaatatttgaaaattccttacatatgaagatggtataattttgtaaggtcgtataagagaattaagattatacaatatgaataaaacaagtcggtagtgtattaaagtaagagatttttaatatagaattactaagtacagtttactatacactatactctagtgtgtgtgattttgattcggatcgcatgtgtggatagacatatagtaaaggtattatgtataatttgatcatacatgactgaactgatttgtaatagcatctttcattaacatgtcatttaccatgaaagagttattcatatcacaatgatgatcatcagcagatcagtttgaatcttgagtatacatgaactcctgtttgcgttcattgagttctttgattcactcgttaaaatttttcgagaaaatattcttacaacttcttgtagaaaatttatacctaaaataatcctacaaaactcatacacaaaagtcaatacacaagatcaacaaagacctttcttgtctacaaacagaccacacaaaaattgacacatttactctcactactacaaaagatacttttggtgtcagtttaagtttcatttaattttaaaaactgacactaaaaaatactcttagttttaggtgtcggtttaaaactgagatttaaaaaattcaattgtgtcggtcagtaaaccaacactaaagcctaaactgagatttaaaagaattaaaaaaacacacctatatggtctcgttttataaccgagacttattctcttaaatctcggttacaaaccgagaccaaagggaatgaaaacataaaatccaaaatcaaaacaaacccccctacgcctcatctcatttctcttgtcttcttccccaaaccaaaaccctatttcccattcgcgcctcaccctccacctttcctctctctcgttctctctaccagaccagctctctcaacccagtttctctctctgtttctcgacctatctcaccctctcttcttcgcggttcctagtacgactatgatgagctaccatcgttggttgagggctcgaacagaagccaccaaggacccagttgactctcgaccttgaggaaaaatgaagcttcttcctcccagaccattatttctctctctccatcgtgcgcctcagtctcggcatgacatgatttaccaccttcggatgttgttcaccaaggaataaccatggatgatcttcctgtgctcttgaaacccaatgttgaatgggtcttgtgtcctctctcatctctcttgattttttggcagagccacgatggtcatgatgtcgaatgggtcccgagctcttctcttccattttcctctgacgagacctggtgctcagctacctttcatggaagattagaattacatgctcagatctaaaaatgaatcaaggttctaatatattttatctatcctgttttgtaactagatgtagtttaatgtatttcttgataattctctttaatttgggttttgaaaattgtttaattttgataaaattaaacttttttccagcttttctttgaaatttgggttatgagtatctgattatgggaaacaaatagagcataaaatataaagtttccaatacattatgtctagtaactgttctttagtgttaaatcttgtgtggataagtatgacactacattacattgatgaagctttagtttgtaaactttagcttgaagtgaagataaaatcttcaattaaaaacttggagagttggtaatttgttatatacatgtattctctcctaattgattgttcctaaaatgctataacatttttctccaatcctgcaacctatcttgttcagtgttttatcagccaagtacttgattgatcaaatggcttggtctagaagtataagtgctagattatcagtcaagtgctactgaaagttcataccagggttagatcactttttaatttttcttgcttattttttgttagtgaagcttgcattaatctatgagtagaagtataatttctatgaaaatatttc

SEQ ID NO: 69954 - DNA, 2214 bp, Cannabis sativa
attataatcaaatgaatgaatagatgcttgtactactctagcatttttctctctgtgagaatgttgggatatccaacttgagttgttttctactctttaaagttttaaagtttcagtattaaaggcggttggtaagaagcttgaggagtatttattgttttctctggtcttgtcatggaggaacttaatggcgaacggaatgtaatgaatgagtctatggaagtaaatacggaggaggaggaggtggtcccgaattctataccatgtgatactcaacctttttcaactgcagaaaatgtgtccaccgaaggggcaaacgaaggaagtttaccagagaatgatgggaatcatgacgaattggagaatcttagaaaggactttcttgaatccatgacaatggagttagaatcagattttgatctaactgatgacattactaatacgggagttttggttactttctttgagggtgtaggagtttcaagaaatagattgaaagatattctcaccaagatttggaagttaaaagggaattggagaataaagactatgagtgcaggtctgtgggggatattttttgatcaagaagaagactgtgtggaaattcttgataaacgtccttggctcatcaacggaaaactcttaatcattaaagagtggccagcagatggaatttggagcaaggttaatatgaagaaagcggttttttgggttcaggcgtttggattgccaactccttacttgaatccgattaatactcctaccatagcagccaaagcagggacctatatgggctgtgataccgttgatcgcaaagtcattattcgaagggggtttttcaaaattcaagtggaattgtccacggaacatcaactctcctccggattttacttagacatactaagaggtagaaaggagtggatacaattcaggtattttaaactacctaaagtttgttataactgtggtcatttgggacacgataagaataattgttttaggcccacggcttatgtatatccaccggaagggaaggcggtgatggctttcggaccatggataaaggcagaaacagcggttttcagttgtttcaataccagaaatcagcttgattacttcagggaagaatccaacggtcaaagaccaagttggcaacagagcaaggtgaaaccagtggatggaagagataaagggaaacaaccaatcaatggcaaggaggggcagagtgtgttgaatcacaaagctgttatcagaccgacaaagaaggttatcaggatcaaccaaaacactccaggggctgttttaggaaaaaatttgaaagtagtgcagcaagtccatgcggagacagcacttacgcgcgaaggaaggacaaagcaagtagaagcaggttctgagttgccaaacagaggtaggcgtgcccggtcagcttctcctcgattaaggaataaacatccacaaggtaattctgctgttatttctgaagatgatattataaaaaaattctcctcgagaccggtccccacccaagatgatgctagggtaataacaactatcatggccaatattgggcctcattacagccaaatgatagaaggcccacatcataaattgtgtaaatctcgacaacctcataatcaccctgaagttacacattttccttggcctccttatgctaaagagactgggcttgcagaagagttaatgggccctattcaagttgacaaatttgagcccaatccgaccctctttcatgacccacttgatgtaacggagcaagtgcacccatgccctcaagcccgaaaaagaaaggctagtttgaatctggttccttatgttcctagaacaaatgaaaataccagagagttcatacaagaaattccacatttactacctgttgatacgaataggggtgaggtctcttttaaggttgggtctggagctacttcatcctcaactaagaaagacaaaagaagaagaaagggacctgctaccaggtcatcaacaggtaatgtcaatgaagcgaaaggaaaaaacaagatcgaaggaggagtggtcagaaacttggagaatacgctggatttggtggaagttcgtgttgattgcattcagaattttcattcgggcgaggaggcggcccttatcaagccccctccctcccaatgaaattgctttcgtggaactgtcggggattgtcaagagaaccggcagtccaag

SEQ ID NO: 69955 - DNA, 1472 bp, Cannabis sativa
  modified_base (35)..(37): a, c, t, g, unknown or other
aaattgggacttcattttttttataacaaattagnnnttattcttgaatagagtattcttgaatagaggttctactgtatatatatatattgttttgatcaaaaagaaaacttcattaatcgaaccaaacaaatacactctcaaagcctctccaaaagaaaagacctcactaacaacaattaattacaagtgaagctccattttggaactttttctatttttgagcaaaaacaatctatacttaagatcctttttaatacttataactaatacaagtaacagtttttgaaaaaataaaaaaaaatacaattgtttctattccttccacaaatgatagattattgcagacaatataaccatcaaaatcttcccaacaatgcttgaatgagtagtacaaattcatatatactccagttgatgaagttgttggaccatccattaattgaaccccagccattcgaacagacttgcaagaaccagctgcgacattctgtagctaaaaaacagatgctgatggcattccttagtgaaaccacaaacatcgcgtgatcttataaataatgtctaaaaaaactaatttatgtacattaacatttataattttgataacgtacatttaatctttaaaattataaaccttaattataataacatataataaatacacagtttaagaaaaaagcccttaaaatagtacacttcatgtatttatatatatagtacactttgtttttgtcgagaaactagtacactttctgttagaatgttattttgtatgaagagcaagttattttgtcgagtgattaaaaaagaggatagtttgagaattatgcatgcatgtatatcaaataatgaagagatagtcaagatggctagctaagctagctaggaaggttaatatcaaccagctggacacctggtgagtcaacatttgttgaaattgagtgattattggatttattcaaatcaagtgaaaaacattgccatattttaattattgagtactatttagtgctttccttctcaatgatatatattgagatatatttttcacaacatggccatttgggaagtaaacaaaaatgtaaggtgaaacatgataagaaaacaggattgttaaatcttgggttttcttgtcattcatttttaactattcttatggataagttcggtataatatatatatatatttctttttttctttttttgatttaagcgtttatatattacatcagcataactgggacactaacccaggacttccaatacacacgcaccccctatggctacttgagctagcctcaagtggtttgaatttgaatttttgataagttcggtataatataatcatattcacaagttgctaaggaaatttgaatttttatgctttaggcttgctaatttaaaaataaaaaaaaaatacaaaaatccacttataattaatactaatatttcaattatatgttattatt

SEQ ID NO: 69956 - DNA, 3124 bp, Cannabis sativa
gttttcaaaaattttaaaattttatttctcaattaaaaattaaaaagtgaaaatagttttatagaccatgtttttggaaaatattttcactttttcaattaaaaagcaaaaaattaattcaaaaagtgttaccaaacgcatcctaagtgtttaaaggataaaatatattgagaggtgaaacaataatttattccctactcaatgtagactagaggatcattgattattgtgatcatattagtgaaaaattcacaacatatatattgggagcttgattacataggcccatgatccccacagtactcagggtaatattacgttgatgtctcaattaattgatttatttaattagctaaaatttaaaaattgattttgtcatattttaaatttttttaataagttgagctatattgagaagacaaaagaatatagacttatttgttatttgttcagtatgataaattggttttaaattaataaattattatatttaaagtttctatttataattattaagaattaagaattgaataaagatttatatataatatataaaaaatttaattattatttaactaattagttaataaaggttgttgtcggctgaaagatagccaagtgactcggagtcaaataatcaccgattaatcaccaataaggagttaagaataataaataaataaaaaagacatcaaaatttatagaggttcgacccttttttatgtaggtattgacctactcctcttttagttgtattgcttgtgagataataccaggcatatcactaaggaagacaaagttaaatctagctacgactctcaaagtatttacagagaatatctttcagcaaagtgctcttacacgtgtaagtacgatttcaggtctaggtcccttctccttgtgaattcattcgctatttatagggggaaaattgttacattttaccttataaaaagagtgaacaaaaaataaatatccctatattctagggtatagttacgatctgttgaatctcctttattctcaaatagatttgctggatttgactttgtaggattgagtttgagatatttgtggaagcttgttgaacaagaaatcaaggcttgcgtagccttgtttggtatccctggcagcatttcttttggctagcacatttactacccgaccaggccttctacaagatttgtcttctttatgggatttgcttgtagaatcacccttgcaaggtgttgctcctatcttccctggtcagtaggtagataacccggatagatgctttatggaacatctacaacttatggatgttagctctatatgggaccttctaaacatgcttctacccaaaatatcgttgttatgtttaatagctagcttatattatgccacgtgtaagtgccacattagatgtgcaactttaggataatatttccctccaagtccccatagaaatatatgtccggatggggacttttgatacctgtacgagtgctagcaggcagtgagcttcacatggttagtaccttggcaattgtaccgtgcggaagtgaacagtcaaacttcagtctcttcaattgaccattaaatgtcagttctcattatgactgttttaaagctcattttatgagagatcgtgctgacgattgcactcccccataattgcctttttttttttgctcttttcacttcctcatgaggattttattaggaatcaatttcccatttatttaatttttttaggggaaattaaattaaatgaggtctatataaaagctttttctttcctcaaatccttttactttcattttcatttcctgaaaaattccagagagaaaaatcaagatgagctctaagaaaacttaaagcttccctcctcgtgttcttccttcgtcttcccaccgcgcagaagaaaatcagccatctctttgccttcgtccaagcttcacccaaggattcacccagtgagtaagttctttaacctctcttctctttaaaagttatttgtttttgattttacaccattgttggaggtgaaaaaacctccatgccatgggtttagggaaacccaacctcaacggttgcacgagaatgctaggatagataaatgtagggtttttagctggaaaaggttgaatcttagctctgcttcctacattttggaatatgggtcttaaagaacatgaagaactagggcttaatggtttctttttgtagaataggttattttagatctgttaggaaacctgactggtctattcaaggtgtttttaccctgattatatgctgcccgtatggtctttatgctgtctgaatgttcacctccatttcccttttgcatagatgaacctgtgcgactattggggaggtgaacactagatagacgtagatatactcaagcttctctttgaagattaactcgcattccaagcaagtgattctttgtcttgccattctctggccagctctttgagcaatttttttgacttggaagtcagcagtggttctcctaaaccaaaaatccaacaccaccaccactctaatcggattggaggagaaaactacggtcggttcatttgggaactaaatcggggttggaggaaattttttccagcttcttggacatatattgtcccagacaccttgccagagggacgtaggtcatcctttgtgaagaaaccatatgaggttgaggttgtcgttatagttgtacagtataccagccagaatccaaacctagcccgaacaaagaagacctaccgtgcaactccttcatttgacccccaccttgttgaactaatggcaaggcgatgggctgcacaggtcaaccaagttgagaggcccatagagtctaaagaaagggcatcacctgccctgaggctggtcagagattgggatgttatcgtatttatgacaatggatgaggttgttggtgattctggtgggaagcaaggtagatgcctctccttaaatgaggtatctatttcacttgcccccagtgtggtgactaccaaggttctatctaaaatttgcctctttggcaaaatactctcatccaaaacatttattgctaaggatgtggagaaggcttgctccagtatctggaaaactcaggttaaagtggagccta

SEQ ID NO: 69957 - DNA, 1805 bp, Cannabis sativa
  modified_base (1753)..(1769): a, c, t, g, unknown or other
attagcctatttgcattgatatattggctgctcgtttttggcatgtttatgtatacacatgtttcaaaaaaattaagatgcatcggtattatggcttaaataaaaagaaaaatggtatttataggattaatttttaaatttggtctttcagcgtaattttctctagaaattcatggtatcatattgaatattgattctcatacatttgtttactaaattttggaaatggagaaagtagcgaggcccacacaaattagggagaaaataaaagaaaaagttctcctcccatttttataggggataccgtttcctttcctaacttagtttattttaattttaattttattaattaaaaataaaaaggacaattatgcccttcaaaaatctataaacaaaaaataattacatgctctaataatgacaattttatcgaattaaagcatttcgattacctttcttcattatgtaataaaataatatgattttatttttttttccagacagtttagtaaatagcataataaaatattattttcgattattttttattttaaactgatttatttctcccattaattattttgattccagttacagtaaatttagtaaggtcataagtattacctataataactgtgaggtctaattttccatcaattataagtgcgttaaaaaaaaaagtattacccttaaaaatactagtattagtaacggaaatatatttaactatatttatatcaccttccaagtcttcctcttccatggtcaaagctcaaaataatgacaaatctgcccctagaaagtactttcccacgttggattacattaaataattattattaaaagactatgttccctcataccgagatcggatcgcaagtgaactcagagttttgaaagttgactttcttacagtcaaagaaaaaaatgctataaagttagtgtgacattttatagttagccacttcgattaaaattatctgaaaaaaataattagagagcaatctatggcttctgctgatcagcctaattctcaggaaacaaacaacaacaatgtcattattattacacgcatggattctaagctgttcaaagctgcaatcaatggagaaattcaagtgttcaagaatcaactccaacttgaccaactattgaccccagaaaagaacacagttgtccatgtcaacatcattgcttcaaaaacaagtattcataataatacaacaactttcttggaaggaatacttgagatgtgtccacaactgttattacaaaccaatgcaagaggagagtctcccttacacttggcagcaaggtacggccatgatcttattgttgagtttcttattcatcgtgctaaactactcgaaccgtctgatcttgagaaggccatccttggtggggtggatagtagtgaggttgtccaacacatgatgagactgaggaacaaggaattggacactgctttgcatgaggctgtgaggttcaaccatcttaaggttgtaaggattttgacaagagaagaccctcatttcacatatttggctaatgaagctgatgaaacaccactttacatggctgtgggggcagagtacttggatttggttgatgaaatactcaacaattgctcctcaccatctattactggccctaatggaagaaatgtactccatgctgcaactttaactcaaaatccaggtaataattattattaatgtgccgtttggtaacatttttgttttttaattttttnnnnnnnnnnnnnnnnnaaaatttttgtttttaaaaaatttgtttttaaaaaa

SEQ ID NO: 69958 - DNA, 3640 bp, Cannabis sativa
cttgaaaataaatatgaaaaaaaagtttcaagtttcaacaatacaataattagtggtgggcttaggttgggctttcacatattgaatctaaatatatataaaaattggtatttttatactattaacaattcaaaaccgcaaaccacaccgcaccacgcggtttaaaaaaaattcaaaccgcgaccgaaccgcaaagaatttcaaactgtattttttttgcgatgtggtgcagtgcaggcagtttgagcggtttgataaacacccctagtaccgaagtctcaaaattgaaagaaattctggacaatccttaccatatccattcccacaatagaccagcacttctgataaaaagttagggtcatctggacctcaacttttatctgggtatatttagaaaacggccttcttgacttcctcataagaaactggttgaagtagctcagagttagtcaaatcttagactgatcgagccacttcatttaccacatcagattcatcaatgcttaaagcagcaaacagatgaagtcatccgtaacaacattcgagagcccacactcccaatcacacaacacatgaccttgatcatttttgagactctgaattttgtaatataagtgtatgctatttaatatatattgtgtagtttattgttgtttgtatgtaagataataaaataataaaataataaataaaaacaataaaacatggaaaaggttgaccaaagagaccggacatccaagtcaggacatgattgcaaagaataaaacagatataaaaatttatcatgaattataaattataatcataactactctttaagactttttttttttttatgtgtacataatcttaaataaaaatatataaaaaaaataaatttccctgctggccatcaagtgggcatatatactattattatatataaatgcacactctggatcacttcttattacagctatgccttaatttacaaagcctaaaagaaaacacaaaagatagaaaaacaaaatgggaggtcacatgggcattcccatatgggacccctaaacaaacggctgaaccccactttttttgttcataaaataataataataatgtgctggtgaggtgtctatgaaaagaaaatctcttcctatataaacaaaagggcattgtttcatttcaaaacctggtcattccaaaatcatcaatagtattcataaattccataagcaccacacccatttcaccccaaaactctctcttctctctctcttattcaaggataaattttgtatagacaaaagagagagagagagagatacaatggccttttcaaatgcgtcatttggggtggtggtggtggcacttgttgcgctcatttacgcccttgttttgcctgacgtagctcgcgctgcgcctcctttcgctccggctccggcccccaccagcgatggttagtttttatttttatttattattatatatgtataacacaatcatattgtaattatttcttatagttaactacatatatagtataatgtttctctcaataatgtttttctttcccttaactatttatgtataatcacaatatacaatatatgatttagacaaataattatgtgtatattgtcatttttaattatatatattcaaatagaggaaattcttaagtgtgtgtgagagagacagaatgaaatgggaattgaagcattgaagctggcgagcttatatgtttgtcgttggtgaatattttacaagacagctaagatattacccttaattaagatagaattatttgagaaatgtcaaaagtcatagactactttctagtatcctcctacatgttaatatcgttattggttcaactaactatcaaattctatatagtttaatgaaataacttttaaattggaaaaagacatatataaaagatatatactaggtacctctcatactcaataacaatgtttggagttatttatatcactcaaaaagtgaacctatgtatatttattaatatgcatgtcatatatcatattatagtatgtaaaactgatcattgtataaaataagtgtgcctctatgattcatactctttatacttcatatttgttgttgatctatttgacaaaagaagtagttttttttttttaactttttattagaagaaaatatatatgtatggatgatgaaaaactaatttgtatgtatgatgcaggcacggcgatagaccaagggattgcatacattctaatgttgttggcattggtgctcacttacctcattcattaagcattaattaattattatttgatatctttaataattcctacaatcaaattcaaatgtatatgaaagaaattaaggagattgtgtatgtggaattaatcatggcaaggaatgtttaatttttatttattgtgtagggattttgttttggacagttttgttctcatgtattgaatttatttctccatttgtaataatttattccctcaactttacaaattcatgtcttttccttaagtttattattattagtagcttaaaatccataaatatacctatttcttctaataaatttagatgcaaaaatcttacttattcaaaaataaatagatatttcgccttgtcaactttatctcttaaattattagcaatgttcaaaatttacccctcagcatatcaattggcaataaacaccaatcattctacacattaatgtgtccaactatgtcattgatatgtggtaatttgaaaaaaaaaaaatttgaatttacctcattaattgattagaaattgtattacaaaaaaaaattaaacaaataggaaactaaaaagcaagaaattaaaaagaaaaaaggacaaagaaaaggtttcgtggtgaagaagacgaagggaaaaggtagtatatttttctgccaatttttcgaagtaaaatctctagtgcggtgcagtttattgaagaaggacgaaaatagtaagagaaaagaaaaattaagagcaacaagaaagaagaagatacaatttctaaagaaaccattttttaagatttagaatctggtatatctcaacaaggaaagtgatactgacataactactttatccagatttgagcagtataggattgcttcaaaggattggtttgattttgcagaaaatatttctaaaagtgtcaagtatattattaaagttgagattgttgttgtatatgaaactatgaagattgatgatgaaaagaaatccatcaaggttgatggagagaagcaacatagcaaaaaaagcaaacttgatccctaagggaatcaggaagggaatggtgttaaagattgagatttgagaaaatgaattctgttattattgaaatagaaagactacaagctataaaaagaaagactagtttactttacatagattagttgcacaaaataactaattaccagtgttgttacagatttacttatttatcctaaagttgtaaaccactactcacaggatttgacaaatatacccttacatcaaatacaacaaagatcaagacttaagaatataaaatcagttacaactgaaacagttacaaaaacagttacaaatatctctagggctctgccctagatcagaatcgcagatcatatatataagaggatatttt

SEQ ID NO: 69959 - DNA, 2967 bp, Cannabis sativa
  modified_base (1089)..(1093): a, c, t, g, unknown or other
atagcaaatgggtagggcgaggtcatcattctaagttcggttggcggtacgcgaggtatatgtgaaaatctctgacaattttaataactttgtagtggccttagaaattccaaatagtcttttgtgcttctttgtgtatatctttagtttggttcgctgtttttgttagattttttcttcagtaataatggtcttttgtatcttatgtcctttgtgatattggtttttttccattttgtggggcttgccccttttcattgtatgttttgcacttttgttcttttttaattagtgtggttggttgctgtttagtcatcttctcgtgagatatgtgcagtttcgtttttgcctaaacttcataccgtttaacctgaaaggaatttcttctctataaaaaattatgattttatgcgaatacaaacaaatgaaatcgtaacataatgtgtaatttttttttttgaaataaacgtgcatagatggaattagacctcgcgttacagaggatattgttcagaatggaagaaacacacatacaaccataccaattgtgggtaaaagcccacttaaccacattatgggccataagttacaagttctgttaacaaaagaaaaattacaacaagcaaaaaatcaagagagtctagcatagttctcaatctcccaacagaactctaaatcgttgaaattgataaccaccctaaaatcactctctattataataaaatttcagctttcatctttagcaacttccaaagccaaacagcacgctaccgcttctccacaaagagcatcagagaactctaatctagctgtatgcaccccacacaccacttcaaggtgatttctagccacaactgcaatacacatgcttttccatcccccacttaatgtgtaattaagttaattctaatatttttgtaagcaaaaaaaaaaaggattaattgcaatattgatactaatgtgtgcttggtccggtaacaaatattttgtttgtttttttcaagatcaataaccttaaatcattgctattaggcaccagtggtgcctagcactttctcgacatgtcgcattgcgattggctagcgatannnnntaaaagttattatattaaactatgtggaaactgatacttagttgaaccaatagcgatattgacacattatgctaagcaccattagtgccctttagcatttctcataaccttattataagtaatattttatatatacactaattaaaaaaaacattaattttgtaataaattagtgagatataagagtccccaaccccaactcccaacacagctgcagcctatcaatcctatccttgtttctatgtcatcgtgtcttgcaataacgtttattgagcattttgtatttaaaccactgaacattttcaggaatatgtcccaattaactaaatttaattaattagtaaacatgccattatatcttgcaagtactgatttttttcctacacctagaaagcttcatcgaatttaattaattatataatataaaaacaaaatgaaaccaaatttaatttattaaatttaaagaaaaagcttactccaaattctcccagatctcccttgatgacctaaaataataataataataataacctttacaagttgagttcattagatttatgacagcctaaattcactgaatattaaatatacttttgtagggctcaagaacaaaaacaaatttcttcacattcactttctgcttaaactaatataaatttttcttgaaatcatcttggatacgttccttttcttatttttcttcttcttatcatagttattatttgatagatactttccttgtttttattatattatagtttctgaactccaattgttattaattatctatttttatctaatttacaccaaatacgatatttcattccatacgtaccacgttagtccaggtagctagctataacagtataacgtttctttttagtgtacttgtttctctttcatgtatgttaagccaaaaaaatatctatatgaacaacgattagaatcaacacagctagataaaattttacatgcatattttatcgattagggggggactttgtttttatttttatagcggctaagccttatagctatatgtgtaaatttatacaaaaactatcactaataacattaattaatgtaggcattttggttgtttatttattctatcagggttgttttaagactttccatctcgtaacagattttggaaatgtatctctctcaaaaagtactagaaagaaagaaagaaaataagtagtggaaagaggctaacgattagataatttgatcaaggaaatatgtgaattaatgggggaagccatgtgattgtcatgtactgtattatttaattggcatttcctttggtcaaactttctttttagggaataaagcataaattaatcacttcaaatttgtccgtattagaagcctttctcgcggattatattttatgttgatcgaagcttccatatttagctttgaaaaatgatatataatatatatataaatatatatatatatttataaatattgattaacttaaatattaaactggatcgccagaaacgtacgtctcttataaattttacacacatgcacagtgtcaggatcaggatgatgcaaaaatagaacaaaatgtaagaaattaaaaaaacattaatgttaaagtttagaagtgaggacccagctcatttataattaatattgcaataggtatatgtatagactggtccccaattatggcatctcattcaaaaaaataaaacaaaacaaaaaagatctcaaaatatttcaatgtgtagattgaaatgtgcatattagaattcgaaaatggatagggtgtctttgataatttcatgggaatgctcatgaaattaatatacattttatttttttcttccattataataatatcttgactagtcaat

SEQ ID NO: 69960 - DNA, 3679 bp, Cannabis sativa
aaaactacatgtcgttttatgtaattgaatgacgtcgttttaattttaatatgaatagcatcggtgatggaatggtttttctgggttgtaatttttggttttaatgtaattatttttattttataaattataaatttaaagttcatattgaattaaaataattttttaaaaaaaattgtggaccaataaaagattgacccatgtcatttcaacaataaaatcaaatagatgctaaccgaaggatagtgtaaaaaaatactaatttttcttaattttaagacaaaaccatacatatgcattaatttatttatttttacatttcgaattatataaaaatattccaggttccaacattgaaatattgtacaactcaaaagaaacaatatttcaatccaaatttgctattacatattggctttctttaggggccaaaaaaatgacaagtgttatttgtgtttacatattataccatttcacttgctcaagaaatttacaatcacttcactagttttccgccacataattaaaaacaaacataaacacattattattgatatttatttataccaaaattttcagctattccaaaaatttactttttttctcaaattttcaacactacttagtagtgatgaagatgatgaagaatgtttttaacaattgtcaagattctttaattagtctcttgtcttctgaatcccaatccaacgtgcataatccacccacctaaaccaaaaaaaaaatcataaattaacataataataataataataaaacaaattaaaaagaaaaataaacattgaaaagtaatatagagagacttacattagtgagcctaagaaagtgttgccagttctaacagcaaagcaaattgcactaagtacaagcttgtgttgatgtaacaaaggttctagaaatctttgttcaatgattccagccagtacttggtacctatgttataaattattcacacacattattaacaaaacatatattataggaaataggaaatttttgtagtagattcttcaaaagataattttagtagatctcctatttattttggtattcataaaaaaaatttaattttttttttttatgattgtgtaagttgtagctatttatgatcatttgtaaattttcaaaatattccgaataatttacaatgccgataataaagcttaaacagttacttaacacgcgtataaaaaaacagtcgtgcttctaccaaatatataaattttatttttgatatattattcgatttttttttctaaaatttacgaactgttctaaataattataacattgtaaaagaaaaaatattaagaaaaatttatatataccaaaacaaatagagatctgaacatttttttcatagaaaaattaacagtaaaatctttggtctctccattgaaatattcaataacacgagtcacgtgattgaggcctattcatgtacagtcacgtgactcgggttattagtttcaatcgagaccaatagtattgttggagaagttaattaggtcaaaaatgagataccttaagttacttgaaacagccatgtaaacaccataggcaacactggttgataatatgggaacatcttcagcttcaccagcaaaagatttgtctaatgcttttcttacattgatcaatccatttgtcactcctgttccaatctgaattatataatatagtttcattagtcttgtgaaaacaaaattataatattatatttcaatttcaaaaattgtaaaaattacgaaaaaaaaaaatctctgatcaattttaagttgttcaagaatattagcgttgaattcttcaaccttttgcgttatgatttttctattttaactaaggtaaaattatggaacctttaatacataaaattttatttaaaactttagtatatatgaaagtgtgtatgtaaattgttgaaattttttgtatactctgttacttctgctgactttttttggtgtttttttctttttttttttatctgaaaaactataaaataagtttaaatctatgaaacaaagactaaaacattaaaatttactaactcaattagtgaagaaaattattaatataaaaaaatattaaaacttaccagagaagcactggttccaactgcaaataatttagctccatttctctgtaaaaatagattaaatttaaacaaattaaaattaaaattattaaatttatgaacaattatttaacatgactaactgctaattataacttaaaataaatattaatccaaataaataaatatacataccacaattgctcctactctttgtaagaatgaataagatgacccagccaaagctacctatttaaaatacacaaaaatttagtatgaattacaacattttagtaaaacaaattaaattaaaaaaaatggtattaattatgaaagattattgaaaagaagagttaataaatgaattacttgaaaagcattttcagggcaagcatggaagaagttggcaagagttcctgcactgactgctaatggtgacctaagagatacagttggagctggaagccatactagcatgaaatctgctataattgccatcacctaattataacaacaacactattattattattatttaattaactaactaattactactactaatcatcatttatcatgataaaacaacacaaaattaattaaatattctagcagagtcacacacttacaatttcaaaaaatgtatttataatggttactaaagtaagattatttcactatttctcaaactttcatatactctaagattaccaaaaaacatatatacatataaatatatatatatacataccacatcagcacacacaaaatcgagctctttagtgaaattttctctcctcttttccaactctgcagcagtctacaacacatacaaaaaaatgttatagtaatatcgttattggtgcaatttcatatcagatcgtacttattttactttaataattaccttagtgaatattccaacaccacactcaatcccaactttagtcaagaacaaatcatcagcaagcaacctctccttaaacccaccaaaaccaagcaaccaccggaaaaccgccgacttctccaactcgaaatacctcttcacaatcgatcccggaagcctcccggcctcaatcgcggccgccatatccttaggtaaactctctaaggaccgatttgcctccgccattgccatgattgcctctcccctatttctcttcctattctcatctccatctccatctccaccgccaccaccaccaccgctatcatttcctcctcctcctcctccgctgccacctagggcggcgaatgaggcggttaatttgaatttagggaaggaaggagtggaaaagattgatgaattggtggtgagagtgagacgatgaggaaaggagtgatgagagattggattaatggaggaggaagaagtgttgttgtggagagagagtgttgtgtggatgtagtgagagaaggtggctacaaccaccatagctatggcggttgatctttgcttttctctgttttctcttctgtctaaggttgagaagatgagtttgttttggttatttggtttttggtttattggaagttactttggtgggttaactatattaacggtttattcaaccttattttttt

SEQ ID NO: 69961 - DNA, 2967 bp, Cannabis sativa
atgtttaaaatcacgtaatacgcctatgctagttagggtgttacaacctaaccaataaaacgtctataagatgagtcaatcacagtgcctcataaagcactcttacgactagttattcacgggcttcatatatcactatcattgcccagtaaagtaaacaataagtaagaaacctacctgcagtttcgagcgagtaattactcataacgataatcactgtatctatcccttgatcataatcgagtcacaacaataacaactatcacctcgatcataattgagacactaatgctcttatttgtttcttatctaatatgcttagcagtgtgtaaggcttttcttacctgaatccaatatcaggcgtgcgggctaacctgagtggaactacgctcgacgatcccgggtcctctagtatggacaactctaatccttgatcaaatcttgctagaaatcaactgaagtagcaaagaaatcctttcagtctactggtccttagggttcgaacaaggagaaagaaggagaagaagttgtttgacttttcttaattttttttttaggcttatcttgatttatcaaaaacatatataagcttaatataaacctattactaaataaaatctcatcctagtaaaagcactaaaggacaaaagcttaaacttgtaaaaagattattctaccccctcccttaacacttaaacttgtaaaataacctaggggtattttggtcattttctagccaatcccgtcaaatcgaaaacttaaaattctaaacagtccaatataattctaatacaatacaacttaattgccgtgacatttctgaccactccatcgagtttccaaggtcgccgaacccgaaaatattttatttcaaaaatagtatttactatacccacatagttccatagaatttccgtaatttataattttcgctttatttaaccatttattaaatttttactaataataacacaattagcttaagtaagattataatcttttccctatataagtataatcacatgtttaataaaatatgtccaattaaatattataatattttccagaacattacataatagttgccaccaacaatactttagctcttcaagacttcattacaactcttgacgcttagtttaaacttaaagatcttggtaaccttcatttttttcttggccttgaaatatccccctgcgtcaagggcatctcagtatcacaaagatcgtttaccatacaactactaaaagacacgggttaccttggtgaaaaacttgtttccacccccgtgtaacccaatataaaactcattaatgagactggaaaatagcttcaaaaccccactcaatacttgagccttattgggaagctcatctacttaaccatcacaagactagccatctccttttctgtcaataaattaatccagtatctccacactcctcgagaacctcacctccatgcagcccacagaatcctccagtatctgaaaggtactcttggccaaggtttattgttccatgtctctgcccagcaccacttcatctttagtcctttgtagatgcaaattagggagcctgcttggacactcgacgctccatctcaagatattgtgttttccttggcaactctctgatcaaccagaaatcaaagaagcaatacactgtctctcgatcatcagttgaagttgaatgcagagcaatgactaatgccacatgggaactcacatggctacatccaatcatccatgacttcaacatcaacatcaagcttcctttgaccttcttttgtgacaacagtgcagctctacacatctctgaaaatccaatttatcacgagtgaacaaagcacgtaaaaatcaattgtcacctcatacatgaaaagataaaatagtggcaagatcataaccaaccacgtctcctccaaatcaaacatagctgacctctttaccaaaccgctgtttccaacacattttcatacttaagttttcaagatgagtattaaaaaattttacacttcatcttgagggggcatattaaatctgttaagaagttagttatttttactattagacagttagattggttattactattatacactattatgttgtgtatataaagacctaaagccattgtattaataatatcaatccataatatcgctttatttttgtttatactagttctaataccttatgtacatgtagtcaagtcatatggtgaccaaattattttacttatacttacatttttttaaaattactagataaaacttctaactatagcttgaggaagttaattctaagaagtataataatatagcaatgttagaaaaaaaaagggtgtttgggaaagtcttgatgatgttcaggaaagatatatttatgcatatcaagtttttatttcctaaatatgcttttgttgcccacgacaaggaggcagtcaggtcatggaagatgctacaatgtatctttattaataataaaaacaaaataaaaaatatgttgaataattgttgaagcatatttttagcaaaagatcctgaatttgagactttctacaccaaaaatattctcttaaacgacggtattcgtgtttggatgacggctcaagatcaacctcatgaaaaatttatatcccttgaggaggttctacctcgtggaaatactctttaatggaactttagctttagttggtcgtgaccaagaaactaccgatttttcttggtgggccgagaatgcccaacttattaatttatccggtaaactgctaggggctcatgtagcatgccagattaatcgtattttgggttggaacaatgtgttcggattttatgccctaaataaaacccattccaatctaatctgatttgttacaataaaagcttagaagtcatttatgtttacatgtagttttcatgtttgtggtttagtatatgtacgaaatctgttaagtccagaacata

SEQ ID NO: 69962 - DNA, 1059 bp, Cannabis sativa
ttttttgtattaccataatgcttctctattgttttaccatgatccaacaggcatcatcgatcatcatttattgttaccatttgtaatttggtccatgatgcaattccaaatccaatataatatttattttaaatttctagagtgttggctgtggttttttgagccgatttagttgcttgacgagctctcacaaacttaccataattcacaattctttcctattatttaattcatacaaccaaaaggctcgaaaccaatctccctcattttcatgctttcgaatagtaaggtcaatttttcaactgcccaaaaaatattataagtggttgaaatttggaatctcaaacaaatttttaaaacaaaactcatgaatggagatcagctacaaaatataaattcccaatataaatggtagctatatatatagggaaaagagaggagataattataaataaaaagttaataagcaaagaaaatgcatgattcattacttttgatccattaattatacactaattactactattattattgtaaaaggttaatatatatgtaaatcataataatcattgatcttatcatctgtcacccatttttatctaaggtaacgtataaaaattcttctagactaacaaaaatgattgtgatcgataatatatataattgaccagagatgggtctcataaagatttggaatattaatgcatttattaattgatctctcaaaatgatacacattattttcccaattccaaatataggtaaattaattggatatatatatatatatatatatatataaaggaaattatgaatggtaactctgtgtctgtgagagctggacaatgtcattatcttctttgacaggtgaacaatttctttctcaaacaaaacaaaataaatagataataaagttgtatatcgacaagacatgaatgatgatgatgatgacgacgacgacgactatgggtgggagacagactctaatcaccacattccttacttttctatatattaataccatacgaaagtattcgtattaacaatagtttcatctat

SEQ ID NO: 69963 - DNA, 2404 bp, Cannabis sativa
aatgtggttgaaaggtcctctcacatctgctgaaatcctcaatactgtgcgtggatatggtcctctcactttgtttgagatcaaattcttggcaaacaactggagatcagatatgtcttatatatggataaaactgcagatataaccaaagcagttagtatacagtagcttaatttccttgtattattttcattataagcaaagagttggttgagtcagaagttcagttaattcactttgaacttctgagactatttcgtaaaattcttcttctcattttccaatctactctgcactgctataggcataaaggatttgcctcttaaaaatattaatcaatctattttcctttttaaaaaggaagtcaatccaaaataaaataaaccagtttaggtaaatggatgaaatatcattttttgtgttttctaattcagcttacttagcttgatttaaggctaagtttggactcgacatcatttccttgtcttgatttgactctaagccaaaccaagccaagcttaattcaaccgttgctaacaagtccacctcaactctggtctctgagactgaacaaattaattcttttttaataaacaaatcatgaagaagaagagaacgaaggcaactgccacgcggatatgaacaaagagagaaacaagataatgtgctttcgttgactctctccttgtctcttttctctcaacatatacttcatactaattttattctattctaatttccaagtatattcttaagttaattcattaacaattccttaccaactattcaaacctcatttcatcatcgaaacctacctgttctcctacacatttttcttaattaattaaattatcatttatatgtaaatttctaacaacgttgtgatcattatcaccaaaagagattatccgaatatgagacaagaaacgggaaaactcaccgaccaatacgatatctcggaggtattaggccgaggaggattctcagttgtaagaaaaggaacaagaaaatcatcaccatcaaaaggtactgatgatcaagtcaaaaaacgacacgtggcaatcaaaacactgagaagggttggggttggaattggaagcaataccgtagtttcaagcagagtcggagctaataaactgcagagctcgacgatgacctccggcgccgtgtcggacgcacttcttacgaacgagatcttggtgatgaggaggatcgtggagagcgtatcgccgcatgagaacgtgatcgatctctacgacgtgttcgaggactctcggatcggcgccgttcacctggttctcgagctctgctctggaggagagctcttcgacaggattgtccgccaggagaccgtctattcggaggtggacgccgccgccgtagtcaggcagatcgcggcgggtctagcggcgctccaccgggcgaacattgtgcatcgagatctgaagccggagaactgcctgttcctggatgagagtcctaattcgccattgaagataatggattttgggttgagctcggttgaggaatttacggaccctgttgtggggctgtttggctcgattgattacgtctcaccggaagctctttctcaggggaatattactcctaagactgatatgtggtctcttggtgtcatcttgtatattctgctttctgggtaagtacgttcgttctcatactaatatgaaaattctatgggtaacgagttactagtacgtttcacatgcagatagttataatttcaaattctacttgtagagtggagttatttaattggaattattcacaaatattcaaatatcacaaaaagttttaagaaaataatgatttctaatatttttaattttattacgaaattctctagaaaagaatttttattttcacaatagtacttttggtaacacttttatttttaaattttttaatcacaacaataaaagtaaaatttttatttttaaaattttgattttaaaaaaaaaaaaatgtgcaatcacttttattttttaattttaaaaacaaaaaataaaaatgtgttttgtgaatttcattttcatcttcatttgttgattttatttaagttgggtttgggtccgaagttaggattgggggtgagtctggattcggggttgggatcaggtctgagtctgggttctaaggtctagattggagttagagttcaaaatattgattaagaaaaaaattatttaaaaatatttagaaagtgatttttttttttgttttcaaaatttttaattttgattctcaatttaaaaattgaaaactaaatcagtattatagaacatgattttagaaaatactttcacttttataattttaaaaataaaaaactaattacaaaaatgttaccaaacacacccttaatttatcctatatatatgca

SEQ ID NO: 69964 - DNA, 3930 bp, Cannabis sativa
ctactgccataagactttgcatggggggagggtctcttgtagttgccgggtagcttcctcttgttctaccattttagtctcctagtctcaaaccacttgcctcaattaaatcacctccaaatcatttgtatattcagtgtactctccctcctctttgtaatatttgtccctcagatcatcttcatagtattcctggttgtcttcttctatgagatgctcatcatttggatcctttggttggttaacgttacgaggagattcgtttcccactgttgatgcctctttgttccccatggcatttgccttagcatcttctggtggaagaggaagatggtcattgttgacgacgggatttttcgccaactaaagaaagtgtgtttaaagaataaataagacgaaattttttatgtggtttaggcgttaacgagccttagtccacgagtcaatattattaagcttatagctatggagtatttattcttctttgcatgggtttctaactccaaaaattccaagcctttgtaagaagggcttatgccgtattcataggcaagggattgggtttctaagctgatcccgacccgtttacagttgtttttatgttttaaagtccactaatgaggtaaatacaataaagtattaacttttgggcctagtaagtgaggcccaaccaacatataatcgtcgtttgtatggtgaatagtgtcattgtacggaaccgaaagccttgtgaaatagaatgttagaggaaaatgggcattggacaaaaaggtcccctctgttttaccgcgagcctctttgtggtctaacacatgggacaagtcccctgtggtctcgagattttatcagacatgtgccatgtgtgctgcttttcgcgacttatgttgttgccaaacgctccttcgcatttcgcatccggaggtcacttacaggtattttcccagagttattgtttacctctgagggaggttactaactcatccagtttcaggtctagagttcgtttctctggtgggtgaaccttctgcataaatcgtatggagggccctctaagtgggccatgctttcatgttgggccttaggacgtcccatttcctagctatccgaaaacactgatgatagggaccttgatggaattcttaggagcagtaaagtattattcgagcggacgattttgccggtttctcttttagtttttgagatgttaactacatagctcattgtctagtcaagtataatttggttcgtagagatagtgcttcattgttgcttgtgctgcccttgttccatatttgccgattcttatgtaatcttctcttttatgaaggatttttttttaataaaagaaataaagtaaaaataagcacttagatatgtgagtgctgaaaatgaactcatcttttgcttttaggatgacaaataaataaaaggaacgaaaattgaaataatttggagtgaaattccaacgtggccacatctctctcataatggtggagattggatttgttcttagttcgggtaaagattagagtgtagagtgtagagtagaatccctcaaaatggcttcattttcttcttctccactcctcttaccaactcccatttctcccacaacctctctgcgcagaagaagaaatgcttcagttgcggttcaggccatagcaaaggcctcgcaagagcaagacgatgattccaccaagttggtcactttcttgggtaaaggcggctctggaaagaccacttccgctgtatttgctgctcaggtaataattttctcaacactttatttactattttttttaaaacagaaatgcctaattacgatccataaacgggcaaaaatagttaacaccttatctcccttttttcttttctttataaaatgtgacaattggatgactatcaagaagtgaaaaaaacaattaagatgatgctaattaggttcaaatggtcaaattgtttgaattcttgattctgggctgttttggataagctttctatatattatgtattacttcttatttgaaaatttgtatgaagaagtgaaagcttaccagtttaatagaaaggtgataagaatatgagaagttttgcttgctcgttatattgtttcgttggtcaattcatgttgcggaaatgtgtagaattgagataatgtgtatttctaaatacttagttatttgagatgaatgggatttttgtttacagttacaattatgtgtctttgtttaactctctcattcctcacataactgcattggcagcactatgcaatgactgggcttaacacatgcttggtgatacattcacaagaccctactgctgagattcttttgaactgtaagattggaagttctcctacagcatgccacagcaacctttcagctattaggtttgaaaccaccaaagtgtgtttttcaacttctttttttcttctgtctttcatcatgcgttgctttggattactgttactaatgatttattattcttgatgattccagatgatccttgaaccccttaatcgcctgaagcaagcagatgcccgtttgaacatgacccaaggagtgcttgataaggtgggtgcttgatactttcattactatttattggcctggtgtcattcaaagaatgttgtcccattcgaatgctttttgtggatgattttttgaacatttttcctgctttggtgaggcagatagttggagaagagcttggagtgcttcctggtatggatcctattttttcagcatatgcacttgagaagcttgctgggttttttaggaaggttgctaaaaaaaatcacgacaaagataaatttgacgtagtaatatatgatggtatgagttcagaagaaattctgaggatgataagtgcagccagtaaagcaaggttgggaaaccttcttcccttcccttcctcccctccctttgtctctcatatgttaatatgcactcaatgacaagactatacacagattgtacttaaaatatctgcggaacatggctgaaaagactgaccttgggaggttggccggtccttcgcttctgagactcgttgatgaagccatgagtattaatggtggtcaatcctttatgcgtgggcaattaagtgcagaaatatgggacactctggaacaaatgttggaggtaaatgttattctcattctatacaggggaagttttgctatcaatccaatttacttctgcattggttttttgtgttgcagagaggatcttctgcattctcagacccccaaaaatttggctgcttcctagttatggacctaaacaatcaaatctctgtaaattctgcatttagatattggggttgcgcaattcaagctggtgcatgtgtttctggtgcgttaggcattggttctccaaatttagatgcagactcaatagaaagagtcaaggaaaccttttctccattaccatatgcttttattccacaactctctattggctccactctagattggaagacaattatttcaaacaatgtcaatgagggggcaagaaatcttctctcaataccagcaagtggcagtagcgggttatcacctgtagagtttaatggagccaaaaggacagtaaccctcctgttgccaggttttgataagtcagagattaagctttaccaagtacgtttattatctattttcttcttaactacaagttttcatttttcagttctggtttcttatcaagctatatagatgattaacctaaacaagggtacctaagatcattatttgttgacactttcgcttgatgtacaataaataattacagaattccacactacagtaccaggaaacattcatgtccatgatgtcctctaaaatcactaaaaaaaatgtgcatttgtttattgggccttttccaattttcagttgagcttttatcatcatggttctcaagtcagtgg

SEQ ID NO: 69965 - DNA, 3573 bp, Cannabis sativa
gcacattgagattgattgtcattttgtttgtaagaaaattcaacaaagtctaatctccacaggatatgtaaagaccggataacaattaggagatatttttacaaaaaaattgaatggggtgattgattatctttgtaacaagctatgcatgattaacatttatgttccaacttgagggagagtgttagaatattagttgtaaaaattacattgtatttagtaatttcctatttgtatttagtagttgactatttagtctcctaactttatatataaatatatactattctatagaatacaatatacaattctattcaccattctctacaaggatgttctgtcaaattatacccctaattatagtgttgaaccacccaaactatcactacaatcaaattgcatatccgaatgtttgatagaaaattgatttctaatagtttagataaatttttaaccaaacaaaattggtaggtgaattttaatagtaatagttcggagaaaaaatcttatttattttattctgaataaaaataatagtctcaaatagtctcaaatagacatcttcaatcttgatgcatcataaaattggaatgagtgaacaagaagaatcacaaaaataaacttaaatgaataagactaagaactcttcttctagttcaaaaagaaaatccgaaaaagagtacattggagcctgaaattactcccctgctactttcagcagctcttcccatgtcgccagtttttcccggggcttgttatttatgctcccacgccttctttcttcagaatctatcttttcccaagcagtaaatggtagaactctgacattacgatcatccagcaactgaagaagaccctctctacccggcttgggcaacctagaagtcgattttaataatccttgctcgacatcttcggatatgcttgcgacctgccatgtccatcagttcaattaggtaatcatattttggtttgacggactataatgagaagcttagtatgcaatgcaagagacaacttacagtttcttcagcacagtagaggtttgtaccaatgattccacttggtcctctcttcaaccacccacatacatacaaaccttcctcgaccagttgagaatctgtacttgtatcactcaaaactcgacctttgatgtttggaacaatacctgagaaacaggttagggaatgggataacacttagaactgaaatgaatctaatgatatcaagccttctttaactttagttatgttcaagccataagctaaaataaacacttatcgaatttggatcattttttccatttaaaggtgccatgccagaaatctattaaaagcaattgaaccaccctcaatcacccccaaagaaagacacagatggaaggaggatcagatatataacaaagtggctatgttttgtattctacatgggatttcaatttatcttgtcaaatttcgaagacaaaatatgaaccagcacataccaagttttctccaaagaagaaaggaaaaaccaaatgaaaccttttaaaatccaactaaaattaggattttgtaacataccttgttgattatcaaagggtaagccatcaactggttttgatttgtatccaatgctctttagcgccatcctaccagaacagattgcatattagaaactaggcagaaacttgatccaaaataattgcgacatcaataaaggaagaaggaatattaattcttccaacttcctcatctggtaaatcaaattatcagtttctggaaggaaaaaaattccaatttccaatctactcagtgacatgacatgaccattagaataaaataattatgtggaatagaccaacatctagtatcagtaaatggataaatgcctcgttgattaaaactgtaaatgatcaaatctagagatgcaaaacaaggtacccgcatccaaggtcttcaaattgtttggtacccacagctatctgttttccaggttcaacacctatgaaaggaagataaataaataacatttcaatctaaacaagaaaacccaaacatttggatctaatttctatatttctttcttttaggtaaggccatattgctttccaaagtcagataagcaattatattacaactgctaacatacagtacataccatgaagacttgtcttctcaaggcggacaccagctacatggctgattctttcatgtgattgtagaaacctatcaggcttccgaaaaaagacaaagtgtagctcgcgttgtcctggactggggtgagaaggtcctgtggtgactgccttagaaagcaactcataaatccttctctgaattcgattattcttcagctcttccttgcaaaagatgtcacgtacaaataataacataagttgaaagaaacaatacgaacaataaaatcatccaaccactaaaacatggctttatttaaatgtaaaatattactatgattaagtgtaatatgtaaatctaaataagataagaaatacctcatctactggggttttatgaagatcttctttctgtatatgaacatacagatctctgatacctaggaaaaaaaacctacaggtcaagcatactctataaacatatttctcagcatcacgtgatatgaaaacttaattataaacataatcatatttagatatctatgttaaaaccaaaggtggcatgatgctaaaagtaccaagaagttcacgaagctctttagtggtacaagctgcttggactggtccacgtctaccaaccaagtacaccttcctaaaatagcataattttcaataagatttagcatagcataacattcctaatagcatagagatcagtgtagcaagccaacaaaccttatattgctctccttgagagcagccaatgcatggcttgcaatgtcagttgtcgccaattctgcagttggtcttaaaagaatacgtgcaacatcaagagcgacattaccctgtaagttaaaaaacaagtttaatgacaagaaaacttaattattaaggaaatctgaatgtgtatgtatcttagaagaaatagttagtccccacaaccctccctcacccaaccacttgagatatagcctgttcaatcatcattgttagctcataaaacagtttagaatttttgacctgggcctcaatgagaaaggaagaccaactgattaaagttactgttagaagattgaaaaaattagcaacctttctgatcaacaatccatcaacaatttaaatacctggccaagaattacagcagtatcagtgctttttaagtcaggattaaggcctacacaatctggatgaccattataccaccaaacaaattctcttgctgagtatatcccggccaaatcctagagaagaaaaagagcataaaacattaatcatttgcaaaagcaaactcaataaatgatcaaaacgcactaaatttaatttgtcaaaaaccattatcaagaaaagcaaaaccactgcccccagggcattggtgtagcggcaaggaaggacttaagaaaacatcacaagtttaaatcttagtagctgcacacatctttgttgtcttccaggacttggca

SEQ ID NO: 69966 - DNA, 3927 bp, Cannabis sativa
  modified_base (3672)..(3679): a, c, t, g, unknown or other
aaagggcttaaaaaccgcctttaaagggtgtttttgtagtagtgatatctggaacaatcatcaactatagtgatggagtacttatacccttcaatggtacaagtgttgtaaggaccccaaatgtcaacatgaatgagattaaaatatttttctgcaatattgtgatttgaaatgaaaggaagttttctttgtttggcataatgataaatagaacaatgaaacaaagaattagaatcagcatgaaatttcaaagctttattcaaaggatgaatttttacacaagatggatggtccaatctatagtgccaaacggtttcattagaaatcttagaatctgaaaaagatgcagaaatagaaacaaggtttttattacagctttgatcacaattcaggtagtacaagttgtcaaactttctacccatcccaatcaccttggtcttggaagtgtcctgaatgacacaattatcatcagaaaacaagaaagtgcaattagttgtggctgttaatgaattgacagacaacaaattacacttgaaagtaggcacatatagaacattttcaaggataagctcaggaattaaatgaactgttcctatgcaagaaactttagcatgcaatccattaggcatcaaaacattttttaaattggtattgacactggtatttttgaatgaaagaaaatcatgacacacatggtgtgttgctccggtgtcaattatccattgagaattatgagtaagggatttcttaccagaaaaatgagagactacaggctgatcttcagaaacattttgagtgctgttctcagtggctttttgagcaagaatggccataagtttctggcattggacactggacaaactagagataagatctctttccattgaaggctcctctatttttccttcatctgctcctaagaaattaacacctgctagttttccagcatttcctttagcatcacgattaagaaattcattccacagtggtacaatgtacttagatctgaaaggttgaatagctccagcaaactgtccattgcttcctgatgtacctttatcagaatcagtagaattgttgaatccactagtcaagtttctttgtctttcttcctgtataacagcagcgtaagctttgttaacgcttggaagaggatcacgcattaaaatctgagacctaactagactgtaggaatcatttaatccaaccaaaaactcgagcaatctgtcctattcttgatactcttgcatcaccttcattgtgccacaagaacaaacaggtggtggtcgatactctcttatctgatcccaaagagctttcaatcgagtataatatgtagtaacagagttggatccttgagtgagactttgcatcgtcttcttcgcttcaaaaattcgaggcgcattcttctcattgaaccgttcgtgtagctcagcccaaatttcagctgcattatcatgatacatgatactgtcagcaatctcatcagaaatcgcgtgcaagatccatgaaatcacggtactattgcatctacaccagctatcgtaatcatcgtgatcctcattaggctgtggcaattttccattcacaaacttaactttgtttctagcaactaatgcaatcagcatcgaccttctccaggtgttgtaattctcaccgcccttgagaattttaggaacaagaacaacacctggattatcactattcgaaaggaaataaggattcgaaagatcattagcagttgtcgatctcgaattttctccaagcactaagaacatattcgagttgagagaagtattttcagcttcacgattcgcacgagtgtgaactctattaccacggccttgagctccaccacctcgtgccatttccacaaaccagataaccacatatcaaagagaaataagatgaagaagaacaagagcacatgaagctggctctgataccataacagctccaaagagctagaacatgaagaacgaaagaacagaggaaatagatgaaaacagatcttattcaatgaatgatcaaagaagatacaagcaccaatagatgctacttatactaagtagcaatgaagcaaaatggttacagaaaaaacaaaaaaatgacagctaaggaccaactaacataactaacaacctaaccgaaacactaactaactcacaacttacataaccaatcttgatagtataaaacaaaagagtcatacatgcaatagactatttgaactctatttttggcgtgttaaattttcctaaatgtctcatattttgtaaaatataaagtacacgactataaaaaatggacaaaaaaattctctcaaatttcaaaatatatataagtgcatcagtacattctttttaaaaaattatgtattgtagaattttcttaatttatatataaaaataataattaattagggaacgatcgagacacttaccagcatattaaagtactaattacaataattcatatatgaatattatgtgatgcttgttgtgtatatcattgacttttggataagtatattcctcgaatttatgctatttgaggtaaattttattttatatatataataattattattattcaattggattaggtaccaactagatttatgctatttggggtaaattttattttatatctgtaataatattattattcaaaattggattaggtaccaacttacgtactaatcaaaaacaataagttatctggaatattattaatatatgctaccagatattatcaattatcattatcactattacaattgtgacaaaaagttaaacatttagacaataaacttaaattattatttatatgttactactaaaaacatgtgtttacttagctccatttttttttttttaacaaaaagataatattattcaaaaaccagctctctacaatttttataacataccgatcacttttttttttttttttgagctattagcactccatacttaaccactctcttgatttcactactgaaaaaaccagtagctaaacaaaaggaattaaacacacaattgttcctgtttttccaaatgaaatacaaggttccagctattataattactagattggacacctatttcagatcacatgaatggttcacattacaatcctacaactcccggactgtcttcggccggcaaacctccccaaacaagtagcttatatcagcaacaagcttcttagaaaataaacagtccatgaatatatggctataagattccctttccaactcacaaactgggcaaagctcagagattgtacgcaaaaatgtaatcaagttgtctcgagtaagaaggtgattattacaaatctagcaggtaaataaatctgtgtttggggacaacgagtttatgccaaactgatttagcatacacaacctttggggcatcaattagagaagagtagaagtatttggtcagtgactttcctctcctaacagcaagtaaaatgtcagtcttcactacaaaaaactgctacttttagtgataactttttggtcacaacataatttttttgtaactaaatatgacttttagtcacaacagaattttacttgtgactaaaacatagtattttggttacaatttgtcactaatttagttttagtcacaacaattattgttactaaaaatacatttagtnnnnnnnnattataatttttgtgactaatactattatccacggactttttattcacaacacgtgaatcatgatttataattagtaacaagttttgttgtgactaaaagtaaaaaaatttgtagtgcttatcagtatgtttccttagcctcaaaatcttcttgaagtactagctcatatatcttgcttgattggaatatcccacagatatcgatccttgatataaattgaatcgacccatctcacccatagactatc

SEQ ID NO: 69967 - DNA, 2234 bp, Cannabis sativa
cataccatatgctaattgtgtaggttgtttgatgtatgccatggtatgcacaaggcctgacctggcctatgccatgagcataatcagcagattcattgctgatccagggccaaagcattgggatgctatcaagtaggttatgaggtatgttaaagagtctcttaacctaggtctaacctacaaaacaatcgggaaaggtggatgtgaagttgtagaatttgttgactctaactatgctggctgcatagacaccagaagatcattaacaggttacaccttcactgttttaggtggatgcatcagctggaagttaaatctccaaaaggtagtatccctgtcatccatagaggccgagtacatggctgcaactgaagccaaaaaagaagcaatttcgctgaatggactctcaaaataagaaccttgattcagatcagaagacatgactgtccactgtgacaatcaaagtgcattgcacttaatgaaaaatcgtatgttccgtgacaggtcatagcatgttgacatcaaactacattttatcaaagagatcattgcaaatggagatgtgcaagtaaagaagatcagcacatatcacaacccaactgacattttcacaaaatgtgttactcaaaccaaatttagacactgtttaaacttgatcaacatcaaagaaattggatgagttcctcatctcctatcgaagttcagcatactatattcttattcttgaagtctaagtgtctatgccaaagtggaatttaatatggcctagaaactaagacttcgattagctcttgtataggctcatttccatcctacccccacacctaagtcggtttgttagttattgttagttaagttggttattcctataaatagccatatcagttagaaggttaggtgtggttcaattttttcattcacttgtaatagagtcttggtgctgtgagtgtttgaaaagggaagatactttgagttctggcatgaaaaaccagcaactcttggtattaattcaaatgtactctactgcactcgagttcttgataggaccaccgattcaaatgtttcttttgaaaatgctcacgacttttgttttaggagtactttagtaacctaaattattgttgagaacatgatttacatataatgaaattctgacttaacagatcttgcgcgcaaatttgtgatatgtaaactaacactatcattactgagttagataataagtgtatatccacataataataagtgtatatacagattaacaattcaagaaacaaaaatttgatgaagtggaaatatatattcgtatatgactcaatatatatatacatcaataaattaagtacagaatattgaagctcaatatagaaagcggcgaagataattttcagaaaaattaaaaataaatacaatagcagaaatagaataaacattgggaacaatatattatataaaagagagaatttttattcattaattaaaataaacattacaaattagacaccaaacatagagtagttctatgggtatagcatatatatgttattacaaattaagacaggttaaataataagattaattattggaaattgaaggagcatgcatgcatgggattgtagacggacgtacgtaggtaggtacacctcaggcgccagatagatccattcttcgatcaaccttaattcttctatatatattaaacaaggatgaaattaaattaataattttgttttatattattagaaaatctaaatataataataaagtagaagttaattaatttacgtaccagtttgagatataaatgccaattgaatcaatgaagtggcctgattttccatggaagccaacaatggcgccagtaccttgtattgtgtgggagaaagtggtgccagtttcgctcccaaagggtccatgtatctttttaagatttgttataaatgataatgatgtgatcaccatcattccataataaatatcatatgtcccacttatggatgtcaaaaactctgaagcctcgtcaatatcaatctatatatacatatatatatatatattcatgaattaattaacaaagtagctagctaggtcataattacgtactttcactattacatatatatatatatatatatacacttactgttgttggtttaccacgattgtgtggatcctggccaccaaaaggtccatactcgcggtcattcccatccttgaagaagagagacttgata

SEQ ID NO: 69968 - DNA, 1576 bp, Cannabis sativa
ttaaatataaataaaaagtcacacccatgaatttctcataaaccaagaatttagttatataggcacactttatatagaatagatattcttgaaaaaccttcttaaacatatttcttttctaaagatcttagatcattttttttcattaacaacaaaatcagcattattattctttgaaaaataatacacctaagacaaatttagactacaaaaactaaatttatgtttgcaaatacatctcagtgactatttagagtttagaacaaaaattaagcaaaaaataaaaaaaaaaatctaagcaagattcaaacccataatattttttcctcactaacatgtaaaagtttttgaactactgaatcaaccaaattcaaaaatttaaacattaccaaaaaaaaaagagaaaagaagaaaaaaaagactcctcttctagacctttctgccattaatacatagaagaaaactttaaaaatgtgagagagcagaccagaccaggcacgcgggggctcgatacaactcgtagagactcaaagaattgggattgagattgctgcctttattaaagcaattatgaattagctctaaattgtttagcagtattcttgtatttttattttcactaaagcatccttcaactccttcccattttttttttctttttcaaacaattttttatcgttttaatagtatttatatttatttgtattttaattaataaaatatatataatttttaaaaaatatttatttatttaaaaaatttatgtattttaattaaaaatttaggccaaaatctacctatgaagtaaagaaaattttaaattccataggattaaaatatgaaaaggtccatgcatgttcgaataattgtattttatattgtaaataatatacagacatgaataatttccagcttgttgtttatcgcgccataaaagaaacaagagtaaggagaataagaaacttctcccccaaaaagtgatgtggtacatgtctttgattctgcgacttaaacaattatatcgtagtgcaggatattttgaaaatttaatttggcatgagaccaagagagtgaaagatgtaaaactaaaacatcctacagattcccaagcatggaaaaaagtaaactacataaatcctgaattcaaatctgaaccaagacatattcgtctcagtctatctgtggatggagtaaatctacatagatctctaaatagtcatcatagttcatagcctttcttccttgttatgtacaatcttcctccatggttagtgataaaaaagaaatttaatatgatttctttaatgatatcaagcccacaacaacctagaagaataaaaatgtatatttagaactattgattgataatttaatagaatttatatgagaatagtgttaagatctatggtggttttaaaaaagagttctttaatctaaaagaaatgttattatggactgttagcgattttctagattacagttgttgaagtaaacctccacttacactgataatggactaattacaaggacaaaacagtaaatacatacaaatccctattttggccttcggcctcta

SEQ ID NO: 69969 - DNA, 2272 bp, Cannabis sativa
cctcttccattatatgtttgtagactcacttaaccctgtccattttgtcttttcttgttaggaaacaacaattcttaaccgggtttggttaaaggttgaatttctctttgcgtttgattcttataagaaaaaacatgcttaactctctcctaagttactgctacttactaaagattccatctattcatttcgtttctaattgagttgcttgatcatgaaatcactaaagttgtttaaagtgtatttttctggaaccatttgtatgttatttgtcaataacactgttcttggcttatagaaaatgtgtcaccctttttgttttctctctttgacttttacaggtacattacgcaattcaataaatcatctcaatgccatctgaaccaacaacaacaaggacttacaagcaggccattgatctttccagtgggcagtggctagtactcatcataccatggatattggtaacttgttactctgattaagtaactgtttcaacaaaaatgataagggaaaattgtatgtatgtgtgaagctgagtattctgagatcttctaaagaagatgcaaaaccatgtgatatatatttcaggtgcttatgtctcattcattataacttcacttttctcaacctcatagagctttttctagtcaacaaccattgacagttagattatatgtagacatgatatttggtttattagaaggtcttcttcgagtgcaaaccaagcagttgatgtcctgagggccgagaggctatttagcagtttctatcggagatggaacaaaattgaagagatttgtgattcccatttcgtacttaaaccagcactcatttcaagagctgccttcccaagctgaagaagaattcaggtttgatcatgcgatgggaacgaagtctcacaattccatgcagagaagatgtcttcattaatttagtttcttgcttggatgatgtattgtttacaatattgggtttaggattaaatgacaacgacaatgaaacaagtttaagttcttactagttcttgtgataaacttgatcttattatatgttccttagatttgtttgtttgacttttagtttgagcaaagagggctcactctgatttatgtgtttcggttggcacttggtatagtatatatatgcaattgtccatcaaaattctttctttatcaacaccctgattttgaattttgaattttgattttgatttcgatttcatatatgtatattttttatgtcccgtgatcttcttgttttaagatagagaaagttaggatcaccattgttagattgtttctattctcaactttgttcatcaataaattcatttcactttctgaatattggtttagctactgtcattgtatttaatacttgattgaatctttattatgttgtttcttgatgagattcaatccacaacagatatgttctgatttcaagttgttctattagatcagccacttgtgctgtcaaatgctgatgtgaactgagatcagtcatttgtttcccagctagttttagttttggagggttgtaaagagtttgagtgtgtcttgatgtcgatctctcattggtgagctttctttgtaatttcagaagcaagtcttcttcttggtgtgattgtcttgtactgatctcgattcatcaataaagtttctcatccatttcaaggctgttgtacccctcggattcgatagcaaagacacagtattggatatactgtagtgagtcaagatacaaacttgacactaagcaacttattagaagagaaggtctcttcttcaaatgcaaacccagcagctaatctatgttccgttctttaccttattataattctaaccattctttttaatgtatggtggcttcttttctatcttcaatatgtaaaataaagatattggagctatacaataatctaattctcatctcaaactttataatgaaatgtggaatttttgttttgccaattgggaattagatgcccaatctaatccatttgccttatcactaaaaaaagtatgtatcctacttgaaattactcttatgtccttttgtttacatcctataatgcccttggatccgtacatggccccaactcataccttgcccgactccagcttagaccttggacccagcttggatttcaaacctgacccgaatcatcgacatgtacccaaacccaaaccccagacccaaccccgaactcagtctcgacattgctagcgtatttcagccccgaccaccaacttagacccagactccg

SEQ ID NO: 69970 - DNA, 3646 bp, Cannabis sativa
atttccatatataaagaaactcatcatcaaaagattatatgatcataaagctaataagtggagtgatatatatagaaaatagatatagtcatattatatattatatattatatataggtatagatatataggtaggcagagtcaaataactgagtatggaatagatagatagatagatgtgactaaatgtcaagttggtatagtatattaatagactatatatagagaaatatatttgaatcagtctaaattgatttgttttgtattgtagttaccatcatatatttataattatataatatatctaatcagtctaaataatatatatatattaattttatatatgtccagtcttgttggaaaagaccttaaatctttgaaacgacagagatgcaataaccacagccagctaccctaatactactcaatttttttttttaatgatatattgaatggagaaagaacttacctatatataattttataatatactttatatgaaagagctgtttttgtttttgtatattttagtatatattagtattacaccttaatcaacaattttaaagataataatacaccttaaccatgctaattagggttggaaattgggtgtgggtaataaacccaaccctatttctgttttctattattatccttgtttaattcctatttatacccctattctcgcccatgccctacttaattctcgatgggctcgagagaagagaattctcgaacccattagatgccattaagattaaaataatataataataaaaaaaataatgttatgtaattcaaaataaaaataaaataaataagatattaactttaaaataaataaacattaatctacctattaaaaattcccatttgtttaatgtaatgtaatgtaatgtcttggtataccccctatttgtttaaatatttagaaaaaaaaaagtctcatttttttctcataatcacgtacgttgtagctatttaggatcacctgtaaatttttagaatattctaaataatttactgtacatgtcggatataaagttcaataggtacgtacttaccagttactacgggtataaaaaaacacagtggcgcgtataacaaaatatttaaacattatttttagcattgtaaattattcaaaaaaaaaatttacaaatttacatataattataaataactataacctactatatcataaaaaaaaactcgactaaaaattcttctaaatatattcaaaacaaatataaatctaccgaaatacattttaaggttgtaccatacacatttccaaactcatatatatattttttttaatagaaattcatatgtattttttctttatttggaaatgaaattcatatgtatttgaaataatgatagaatacgtatctgatttaatttgcatgtatctttgactagaaagacttatagtaaattgattctttttttattactattattttattatttgtatgtaagtcattgcaaaaggagcaattggaggctgacgacagccctcacttttccgacgtcatctctcatagtaactctttttcttttttaccatctgccatacaaatttaccactcttaatttaagtatatatttatggtgaaaaaaaacatatatgctgattgtttttattttcttttatcaaaacaaaataccctcatctccattttccattttattacgaaattctatatctatgaaactatatatgaataatactttttcttcttttaaatttctaatttataaattgatggaattatttccaagttgtgggatatgattcttgcaacaaatgcttaattaccaaaactttttattatcattgcccaatttaatttaatcgtgttttcggatttaaatatataatagctaatgtagaaattaggttttgttttgaaatataagatatatgtttagatattaagtgatatttatatataaattttttaaaaaatattttatgggagcgaaaaactccttttggatggtgctcgatggcttataaggagaggattgttaaaactagcatcgatgtttgtattctaaaaaagtcgactttaattagtttactcttttcagagtctgttattttgattattgatttgttgacatatttgggtgaatagaattgccttttcgttgatgagttttaatctattgatgatgcctaacaaattgtttcaatctcgagatctctttagttatgtgatagtcttatttggcattgcactagctcgggtggttacacgattaagagtaagtatcagaatgctatatggttactagtagaactattggagaaaattagtaactttcaatagctataaatttagaaacgagaaacctatttattctttcaacttatatatattataaaacaaaaattcatgtaattaaatttaaggacactaaaagcaatttgagaaaaaatcatgcatataataaaatattttaggtataaatgcaactaaagagtactaattttttttaaaagtaataataatttaataaagggataaataattaattgagaaatcaaaagaggaaagataaggatcatgtataatttgtcataattagtcaaaattacccaatttgtggataattaagcatatataaatattgccctagctaggtcctttaaaaaattactttctttcaccaaacaatgatgagataattgatcattgatttcataaatataataatgtaacttattagctagctatagaaggggtcaaataaataaatcataacaaaagcctgtatatacatataatatgatatatatgtatacatatatatggataaagtgtggttaataaactgtcattttcatgtaaatacaatcatagtaatattttctctttcataattattttctctcgaatgatccagaataatcataaattatattttaatggattaattatcatagtaatttcattaaaagaacagtggtaatttactatagttaatttttataatgcacattaaaaattaaaatctatgtaattacttaattaacagagaatacggttgttaattatatattataatattaattaatgatgtataatattcatcttcatcaattctcacctttcattaaaatattttaatcaattataatattcttaaagttaaaagcatagacaatttgaaagatttgttaaaggtgtattggttattcaataaatatattttatttatttattttattaaagatgaattaaatgtaaagcttttctaaattggaaaagttacaaaattgataagttttaataaagaaatcaattctttattgtgttatatttttccagtgttgcttattgtattttgatctaatattcattttctaattaatttgattaaatattgtgcgaagaaaattgaaataacacttgcattttctagggtgtttgtctcttcctttgttttatgtattttgtattgtcttgagtttataatcaagaatctacaaagaagaagaacaacaatgctatcttcgagaaaagttctacaagctttttggaggtgaattttcaagtcttacctaggaaagaagtaatcactcttcaaggagatcgaaaggagttcgaacacttgaagtttcagcaag

SEQ ID NO: 69971 - DNA, 2217 bp, Cannabis sativa
atataaattaatgacatcccattattatagagttaaggaaatgatttttattaaggcatattgattagaaaattggctgctttattaattgcaaagcttaattatgtgcacatttaagtgcttatataaggaaaaccttaaaaccatgttgtttctgcaattaattattaactgcatgctttaaaagcaaattatttctattaatttattgcactatttagtttgtaatcaatttgaaaacttacacccttacaaaaaaaaaaaaatgaaaacttacacttttacccaaaaaaagaaagaaagaaaatttacactaaaaattataatattaataatgaaaaaaacccttaaactaattttcctaatataatttggttggattgttttgtgcatttatatttatatatatattacccttcatgaatagactatataatactaagatatgtatgcatagtgataatgattctctgaaatttatactattatcaaaatcaaacaatgaactatgatattatccgatatgaaaatatataagtgatattgacatttctcaaaagaaaaaagagaaaaactatataagagaattattatataaatgataatgatatgtaatatgtaatattttaaagcacacaccccataccatttggaagctaaaattcaatgattgtgggaaactctatatgtgtgtggagcaatttctgccataaaaatctttatgaagtgaaagaacaacaacaactttgatttattaattcaaaaaaaatgatatttttttaatatatatgaaccacattatactatctatggacattcataagattacaaaaggccccaacttattgactatatatttattataaataacaataatttatattattcccaatttattattaactcatatgaatgaaactttaccacacacacatgagtacaatacaataaataaaaaacaaattaatgtagtgtaagaatgagtgaaggaaaatttgaagtaatgtgaaatttatggaagatactaaaaaaatgaaacatctagtatggtcccatgttaggttgggaatccctactttccttttgatttaaatgagatggacactatgtgatgaatatctctaatagggtcatcccacatagtacaaccaagtattgggtggacctaatgacattaaaataaaaattaaaatttgaatagttaataatgctcttctctagctatgaccaccacacctattctttataatgaaatatctcatccataaatatacatgtaatatataatattatatgatgatcacccttttgatgtaattaataatgttatatcttctcatatctttgtcaattatatagtaatgatacatatcaagaataggaaaggttatagctcaaaataccatagattgggtaataccctaacttggtaatagcttcccaattcttgctatatgcaacttacttattcttacatctttcttatatgcattgacttatatacaactctatatgtactctctttttttcttcccactcctatttgtttttagcttagttaaattattatttcatattatatatatggttatcttatctcccaatatatatttcatattcaacatatgtatatatgtgtattactaagatatcatttttacacaataagtaagatacaattctaatcatctacattacaatcctgaccatttattttaatcatatacttcaatgaatgatcatgatcatttttgcactttataaataagatataattggtgatgtaattttttctcatgggagcctgctcttaatggaacgggaattttctgtctaaattgggaacaaacaaagattatttttgtttcgaaatgttaaacagagtaggaatgaggatgacactcattgctctaacaaaaacccatatattatttcattcatttttttagtagtgctttatattttttgttttagtattattagttaatttttttttataaattttttaagttgtattttgaataataattatagggtaagtctgcaaatgcatgcagcaaaatatataaatcatattcttggtattgtaaattactcaaaaaattttaaaaatttacaaatgatcctaaatagctacaacatatgtgatcataaaaaaactcttttaaatgctgaaacaaatatgaaatctaccggaacgactctttaaagaattta

SEQ ID NO: 69972 - DNA, 1568 bp, Cannabis sativa
ttagtttagtagctaattagtacttcccaatagtaaatgtttgaaactttgacatatcaatattgcaagctaattttaatgcactaatactgacatttttttctgcttttatgtagggatgatttcttgtcgaagggattcaaattagtgttgtgaacgacgttagcgctacaggtattgtttatattgtttattattattattaatttgttagagatagaatttttctaatagttataatataatcacatgctccttttagagctatttattaatgatttttggagcttttatttcatgctttcattttgcttttctaatcttatcttcagcatttcttttcagtttcagggaactattcagggtttagttgatgtgaatcatgttcatattttaaataactttgataaatttcctctatatattatagctctcatttttgctctggaaactaactacacttttgtgtttatcatacaaacctccatatatattatattgaaagaaggttattgtacatctgttcatttctcaatactatcaaatttaacttaaaatactaaatgcgtgaagctagatatatgtgaattttgcctgctaatcttattgcaattacatacattattccatgctttgaaattgagtagggatgatttcctgtcaaagggattcaaactggtgctgtaaatggatggaagcacaggtatatatatgtttgtttatattattttgttactttgttagacatggttctttttctttattttcttttttaatttcaggggactgatcaggattagttcgatgtttgagtctcaaggaggaatcgtgttcaactttgcatgtcatattttggtaaactcttttttgacaaggtggccatgttagtagctttaaagtaggattcagtctccatttcaaaaaaaaaaaaaaaaaacaaatgtagggttcgttgatacagttgtgtgtactctgggatggaacattgaccagcttttcatgtcatgttttggaagctcagtgttaaaatactttgaaactaaagtgcatttcatatgtttcgaattttattctccatataattatatcacatagaattacctttgctttaaattcacaaagcgcacataacatgtgaaagtaaacacgtatcatagtaaatgaaaaatcaacgaacacataaattttgcctgatctatgtaacagtaaatatataaacaaaggactacaaagggtagaaaagcattctaataactgctaataattattgtgtaggttttccatatgatttgataatgtccatgaaaacatggcttaaatttttttgtaaatatcattttgagtctttctcagcagctataaacaaagctaagaacaaaatggtggaattaaatctagactaaagcgtacaatgaagctacataatcctttttgaggtgaatatactttagtccatccattcttcagtcaaattatctttgttagattaaaccatagtactcatccttgctttttctactcttttttattttagaaatgattaatcaccttattattattattattat

SEQ ID NO: 69973 - DNA, 2077 bp, Cannabis sativa
attaatgcataaaataaaactaatcaaatatgcaagacaccacacactttccattgtaacaaatattgaaaagtccactttctctattttgaaatttattatatatgtatggttaattagctgtaaaaaaaatttatgttttaatttttatacacttaaccttttaattattttttggtaatattaccttaattttaattttctttacacacttgatgcgtaagttaaattccactgttaaaggccaactgagattgtcattgtttacatctttgtacaagtgatagtaaaatttcgaagccaattatttaccgaatttttcaaaaatcaatttaaaaaaagattaagtagaaaaaaataagattaaactcgacaagaagagattttttacgttttggagtgttaataaaccttactccacaagttaatattattagttctaaagctatggagtatattttcatacaagcttttcttgctaattttctaaccctttccacggaaaaatgccatatttataggctccttaactgatggaacgggctgacccggacctattagtgtttgtaaattgaaaaaagtccactaatgggataaattacatcaaaatattgacttttgaccgatttgaagaggcctacaattggggacaaccgtcgtctaaacacatatgtacgaatgatggtgacagctgggtgtgagccgttggtctcttgtgagaatgttagagtagtgggcatttgcttagaaaaggtgatcctctttttgttgtgcgcttttccaagacttgacataggggacatgctgcctgatttctctagattcttgttggggacgtaccacgtaataattcctgaatatttgttcattcccagattccttttcaaatatccttcccggatgactcctgagggtatccgtcttcgtctcttcgtatacttgttaatagaataagtgtcaaccttgtctgacttaatcattctgaagcaccaattaaatctgaacattatgttcgaatctacccatggaccgagtgatcaatgcatcatgtctcagtgaatatgcttgttaagatgaatgggttgatcggaatgtacacgtgtcacttatttggaaatgcggataacaccaatcaaaacatgtcacgtatatgtgtacacaatagcaatccaattgatatttaaaagtaagatttgactgacacttcaaattcataaaaaattataaagtgaaagggatattttgccaaaaaaaatcaaattataatgtatataaaactgaaaatataaatacatatatacacacatataaatatatataaaatattgatgattaaaaaaattaataaataaaataaatatattttatatatgtggtattggtgagaataaggcttgatggaataattcaaaggacaagaagaacataacaaaacaaagatatatttgtggacattgtaccctaaccttcattaatttatatattaagaatgcaaagcattttctttaataatagtaatcatagttaattcctcataatatttaatttagtaattatcttattcatcttcaatctaatcaaatattagtacttacaaatttttcaatcacaattccatgatttgactactaatattactcacacggctcattcttgctaaactcgttcttggtggataaagattatgtaattattattattattattttaaaaaaattgtggatgaagattatgatttggcaaggaattcaatatataattttggggtttttcaaggtacacctcactttttattaaaaacaaaaagttaaaataataacaatacataaaattaattggcggcaaaatattcttaagtttaacattttttacaaatttaaataattatttaaatatcaccgttaaataccaattagataaccactgtgtatagtgtatacctatgtatacgtgaaagtaaaactttgaaatcaataccgtaataattcagttgatatttaatggtattatccaactgacacttcaaatttacaaaaaaaaaaaaataaataaacataaaaaaattttgccacaaaaa

SEQ ID NO: 69974 - DNA, 1103 bp, Cannabis sativa
tttttcttttattaattggagttcccttattattttgtatcgagtttcggaatgcattttttttgacagtttacgtttatctttaggtagaaattgagaaatttcatctgggtctgatccgaattgggaggtaatggctagcctgggattgttttctgggaccaagtgtgtgaatgtgagattcaggttaccatattatacacaatggggtcaaagcctggtggtttgtggttctgaaccagtgcttggtgcgtggaatgtgaagaagggtctgttactgagtcctgttcatgaaggcgatgagcttctttggtgtgggactattgcgattcctaaagactttgaaagtgaatacaattattatgtggtggatgataatagaaatgtgctgaggtccgagatgggaaagaagcgtaaattattactgcctgagggaattcaagatggtatcttagtggagttgcatgatctttggctggtactatgctatttcctctcttcctttggattatttttcattgaatattcctttttcttttatttgcttgagatcatagcatatgagagccgatactgggtttctctccttcgcctcttgacttagtggtattagtagttaaactgtggcaatcttttgaattattttagatttctgaatcttgaaatgctgctccacttcttagatgtttaattactttaatagccaatgaagtggctcaaaatgaaaccaaaaataaataaaataagaagaaatcagaaaaagttagcttatgaatctttcagaaatccacttttggagttaacaagtattctttttcttattctacctttctttatttctttacttttttttactttttgtttcgtttgtatttttccagcaccatagcattctccttttgttttattgttcagtgtgtggatgctattcaattctgcacttttcatgtggttgtaaaattatatagatgtaatcgtatttggtcatttaataaatttagaactacttttcatatgtaatatttttcatttaagagtaattatgtcacatatatatgtgtatatataaaaattattaatagacaagaaaggaacaaggaatt

SEQ ID NO: 69975 - DNA, 1476 bp, Cannabis sativa
gatcacctattggaataaaacactcagaaaattctcatctcttttctattttctttctctaaattataatattacataatactaatatttcataataataattgctttgctgttatagtcaccatttaattccctaatataattagtttaatgtgtggtttatgttattagttatgatgacattgtagtatgacgtcataaaatgaatgtatagacaatgcgttcgggcttttcccatatgataatcttatgataccttaactctttctaagtctactcttttaatacaaaattttattgaagtttctcacttagattaactcaatgagttgttttaatcttcaatttgtaattgatcgatgacaatcattttagtaataattgatcacaccattttcgtttatcctaaacttataaacaaataccaatttccactgttatttgtgtttttagggagggagacatgtggcagtccaattcaatgttaattaactaaggcatgctcaaaagtcctaacaagataatgggccaagaccactcaaaaagatgggcctcaagaccatccgaaagggcacctcgccaaaataagaagcaacaaggatcctccggatgagcgtctatcataaatttagaagggatttcccagacacatccctcaagctaagctgaagctgaagtggcgatcctctgacaccaaatctcactgtatcagggagttgtcccctgtgttagaccttgagagtacacgtaccacaaaatggaacatctcttttgtcctacgaccactactctgacattgcagtatgcactggtggtgcacgcacaacacatgtcaacttcaagtggtcacttgtcatacagaaaataacaacctcacaggttgggccttagttcgtgggcccagtcagtgtggacccaaagtcagtgtattttatgtatttactatattagtaggtcatgttacatgcaaactctagcgagtcacaggtatgtccatacctaaatccaagcttataaatactacattataccctcatgaaagggttggaaattcattatgcactatagcaaagatttaggattcttaaacttgtcaagaatatcagtgtaatactctaagcactacaagaaaaaagacttttttcggagaaaatttgtgatgttgcccaattagttacactgcggtcgcggtagtaaacgggctatgtcgtatccacagggaggtaaatcgcaattaaagattagtttagtaaatataaaataaatgcaataggagaaattaagaagcgaaattaaaatggaaatgagaaagttgatcagataaagagctcggtaaggtagaaatgtagttatgcaaatcctattctaataatatattaattcaaaacgcagttccaattctacaccattaattacaactggaagatatatatatattaaaatcacaaattaattaatcttgaataaattgaatct

SEQ ID NO: 69976 - DNA, 1088 bp, Cannabis sativa
  modified_base (64)..(69): a, c, t, g, unknown or other
tatatgggacccgatacttaattgtactaatagcaatattgacacataggaaggtgctaggcannnnnngtgccctttagcatttctcgtaaatatactatttagtataattacgtacactcattattaatgatgaaatacgtcattaatattaatacagttaattgtagtataataaatgacatgcactaattaaaatgattattatgatctttaattcatcattgactactaaccagaccagaccaaaccagaccaaatggaaaagtttgttcatttaattagtcatgatctcttcttctaagggaagtttatgtatataatatatgtataattatttgaaaaagacttaaattaaataaacacttattaactatatcaagttgtcggataaagcacacttaaaccaaacccatctaaccagtttatgcaattacaaaattccaagtgttttaggtggaaattatatatatataataaactcatttaattatgtatgttatatagtgcctgctaacattggcattgaaaaagggaaaagataattataaaaagaagtaatttgtgagttcccacacataaaaagaatataaatatgtaatatgttgccctaacaaagagaatgaatggggtgtcatgggacctcctgccctataccgattacgatcaggtttttaatcgattagatattcttctatatctatctatatatgtatatataataatattcatcaaaagctatcaaattattgtggcctggccattgtccattgatcatgatcataaatcaatcttattctcacttttggttcaagcaatatcaaatattgtaacaataataatgaccaaaacccactaaaaaaaactatgaaaaagcttccaagttagcttaggtagcacctatatattactgtataaaatattagttgtacgttctttcaactgtgtagggtgatgaagtatcagcttttgaggtatatatgattctttttgtgtcaacactttgcaagcgtgcgtacctacaataatatatatatatatagtactactatggtatcatttaatttaattagaatcttatagcaata

SEQ ID NO: 69977 - DNA, 1174 bp, Cannabis sativa
tacgtggcttggcacgtaacaatcacctagtacatatgaaatacatctaatagatagaaccgatccaatctaacacccaataaatgttggattgattggatgactgaaattaattggatcgaatccggatggtaaagcttgacatccaatatataattagatcggatttggatagacctaaaaatattagatgtggtccaatgaacactccgagattaaaaaaactggctagtaaaacatataagagtgcatacgtgcaccctttttaggggtgctagaatttttatatatatttggttaggagtgtgtgttcatcaaaccgtgttcacactgcataaactacccgcaccgcactatattgcatagaaaaatgtgatttaaaattttgtatggtgcaattgaggtttgtattttcaccaaactgcgtggtgcagtgagatttgcagttttgaatttcatactcgtagtttaaactgcaccacatatattacaaaaatactaaattttacaatatcacttttttaatttttttcatgtataaaaactcacatgttttataaagatcaagctatactattaaaattaatggaatatacatataaattcttttcatttcttgtttattcttactttttatggtatataatatgtaatatattgtatattatataattttttagagataaattaatataataaattaattagtgtatctattattgtagtgtgaattttgtgattttaagaacttgcggtcgattataatttaaaaaattgtaaaaaccatacatgatttaaaaaataattaaaacccacacggccctcattacaaacacccctaaaattatttggtgaaattacaacagcatacagtttcccatctttgtttcctctttctttctaattcacataaaggaaaattaatttacaactttttagaaaatgaaaataagtatgtgagtattcaaataaccaatatctagaaagattcctttcaaaaaaaaaaaaaaatctagaaagattgtatttctaaaagattaaatttgaaatgaaaaaataataataactcggcctttggaaatttgtttctacaataatgtgattggttgaatacttttttttcgtgggaagtgttaaaatttatgattatgtttgttaaaaaatactttgatta

SEQ ID NO: 69978 - DNA, 3638 bp, Cannabis sativa
ttgcagatgattatcgcttgttctgtggtgatcttggaaacgaggtgaatgatgatgttctttcgaaagcattttctcgatttccttcctttaacatggctaaagtaagtatatattttaatatattttatccgtgctgttcttttattgacaatttttttcttggtatgaaccttgtgcatttcctcttcagatttttatttgaagcccatagagcaatcaatgctttgtattttttaggtaggtattgtctacaattcacaaaattatatatgaatatcttgaactatggaaactttggaacacaaatgttttgtggtatgcatttttaatgtactgaattttgtgattttggtcagtagatttgaagtttaaattttaatttagtagcattatctgtttatatttgaattctgttagttaattataaaagaaaaaagaaaaagataagaataaaaagtaatagaaaaagaagaagcaaaaagtattaagaaagttttggttcaatgttctaaaaacttaagatattgattgaatgacaaatattttgggtatgcagttgatggattgtgtaaattcattaggtagcacatatgctaataattgaatggtgagtttcagatcaaactaagcaatagattacttatgagtaaaactttgttgggaatactttaaactatgaccaaaaggatgtgggatttttgtgaccaaattttacgttaaacttcttttgaagttattgttattatcattaccatgatcgtgacattcaatactgtacactctagtctaatggttgtatctcacatgcatttggtttcctacttttgttatgagcaaggtgctacaattctgtgttaattttggcatgcagcactaaatttcgtattagattcatcattcaactttagaagtaatattatgttgtacactgtttttaggttgttagagacaaaagaactggaaaaaccaagggctatggatttgttagctttgctaaccctactgaccttgccgctgcgctgaaggaaatgaatggtgagaaattcttttttttttttctagcctatcttttttcgtgtagaaaaagaaaagaaaataaataatgaaaggttaataactaacatgtatttattaatatatcaaagaaaggataagaagataagaaggatttacacaatgtaatcccatatatgaaatttcttgttgttttagccatctgttcttgttttttcattctcagcactcaaatgaggttttttattttaaagaaaggataaaaaggatttacacaatgtaaccccatatatatgaaaattcttgttcttttagccatctgttcttgttttatcattctgagcactcaaatgaggttttttattgttactttttcagtaacattctgttaaaatatagttatgcgttgcctgcctctaaccacatgaaattggatcgatcacgcaaacttacatgtataatatgaaaactatagtgatcatgattttgttttgagctttgtacatcagataggcgtagtttacaaaatgagtgtttctttccaggtaaatatgtgggtaatagaccaatcaaactccgcaagagcaactggaaggagagaacagactacgatgccttagagagacataaggtaatacatttttatatgtatacatacatttgaggtctcttttgttgtgttcaaattgttcttctttgacccccagttggtttgttaaataatccattcactgatctcattattttttatttcttgatttatggcagcaccatacccaaaagaggccaaagctttccaagaagagcatattacacaagtgatgaatttaccaattaccaagttgtaaacttcaacaaccttattcaaactataatttttattttcattttcattgtattgaagtggttgtagtaatgttctgtgaaactggttatattgacaatttcaatgagcagaaataatgcaatacagtaagaaattccttgtcaattttgaattaaaaaaagccatgcataactactgcacaaaacagaggaatttacttaagagtgaaacaatgaacattttcttcgttgaataattgcaatctaatacaaatgcaatcaaatgaagtattcacaatcataaatttgagcaaagcaaatggcctacgacagctctatccttttccccacaaaatttttttgtacattcccttacaaaaactaacgaacaaaaacaattagggtaaaaaatccctctaatttttctcaagattttgcacgacgactgaacatgttgctaagtacattattttgtttgtaaaaatcctcgaacttctatcaggaaactgttaagatttttcctgaaaatgtgaaagttcttacgatcaagggttgacgatagctgatttgcacttgttaaagaatgcagtgcattagccagtcttgatttaaatgttggatttggctgcctctctattaactcgtggccgagtctctgaaagccaagtaccaactcagaaaaccatacatttcaataaggaaaatatgaggataactcaaaaataggaataagtaaatcaagtacctggtaaagggtttgttcgcatagtaacagcggaagaagagcatcagctgcgctgctgatcaggtctgggctgaagtcacaaacaaagcttttgttgttaatagcgaaacaagtagaattggtgcatctgaattttgtacaggaagtttacctgtaatcctcgaaaaggagtaactgcagtaacgaacggaggaattgacctaaaatgccttcggcagcattagagccaagaccaagtctaccaccatttgtatccgcatagtgataagaagcaatagctcttaaagatctcagacacatatcaatcacttctgtatcctaacaaataataaagaaaccgtttctattattttcttgaccaaagcaagaaccttagacacataagaattctcataaaaatggttaagtcaataacaatggatgcaatatgatgtacctgatggtgaagaccaaattcaattgttccaattacatgagaaaaggcctccttgtttagctttgcaactgtctctggataaacctccagcatatgtgatagaagtgaaaagtactgcacaagaacacaatcagaaaaatattagcagattgtcaccatggaattaaaatcgtcgtcattgttgtaacaaaatactatccaatcttacatcataacacagcttgggatatttcagcaggtccaaagttatcaaaggcgtaacaatgtgaagaccatagtatacaacctgccaaacaccaatgcatcagtgacaaaccccagctattctatatattaatatcgtcttaggaatgacatccgaattacctgagatatatttgtgcctggtgaatcagcagaatcagatgaaaagtcaacctacaatggaatgtttagcatgaacggtagagtttggaaagtagggtgaacaacaatcttttatgtgcaaacaacaaataagccataccagatctttcgagcaaagattagaaaggagttgaagaagagcacgtaaatccttgtacttgtcagtttttgcttcacttagcaaactgcttgaaagacttatcgatatct

SEQ ID NO: 69979 - DNA, 1121 bp, Cannabis sativa
ttttttttttgtttttttaagtttcttttccccacatttatttaattttattatttattcaaaattgattttatgttagatcaattaggggggcttgctaatgcagtctacttagctttgtatggattactgaggatggaagtgtgtacagcagagtgtaaaagccagtctcactctttattttatttttaacaataaaaaaatgtgtgattttgtcattgttcctgtcaatttcttatttgtacccagtcacagaacgaacagtccttgaatttgagagtacttgatattgagctccaaaccaggtggtattctttgtagaaagatgatgcatcatttgaattggaaattctaatgagcattcgaaggtgtccaatatcattatattattatatatgtggaatacactactaaaatataccaataagatgtcatcatttctatcaacaacaaatctcacagcatctccataatgggtaaaaatagtgatttagagctatattttgttgaataattagtatttttttctttttggacttgtgacccttgaacttttatatttgctacaaaatttctttatgttataatttttatacactaaatctttttatttttatttttttgcagcaaaatctccttctttgcaaatttgatacgccagttaaatattaccgttaaatatcaactaataactactacatacacatgtgtatatgtaacaataaaactttgaagtcaatatagtagtaatttacttggtatttaatggtaagtagaaattacacaatatatgataaaattacaagagtttatttttttatggcataaataaataatatcatgaggttatgggtttttttttattttttttttacatttatatgggattttttatactacatttttgtaaaaaaagatggaaatctcatatttttaaaacaataataagtttcgtgtggaaaagtcactggcgccggaaaagtcaatagtgtcaaaaaagtcaccgaaaaagttagtgtcgtcgaaaaaatcatcagaaaagttgccaaaaaagtcatcgtcgtcggaaaattcaccgtcgccgaaaaaaagtcactagaaaagtcaccagaaatagatgt

SEQ ID NO: 69980 - DNA, 1454 bp, Cannabis sativa
  modified_base (1380)..(1388): a, c, t, g, unknown or other
aaaccattactttgactatctatgattaatacataacaaactagtatgtatattacctggaaggaagtagctgtgtttagtgaaagcattttttgagcaagtatcacaataaacagctcctacaactgtgattcgagtggcataatgtgtagttgatgatcgagcttgtctagctagtgattgtgaaaacaatgatgctgtaacaagaagagcaaagaaaataattgaatccatgagttgtttgtgtgtgtgagtatgtgtgttttgaatataagaagacattttctgtgtacacaccacctaatagagcccgtgagtttttgccgggtaggaccaaccaaccaaccaagccaactgtgtgtaatcagagaggtgaaattatttttttttttttttcactacaaaacaaagacatgtgaagaacccttttggctgattgttagtgtaaagggatatagaaggatttgattctgaagtacattcaatttttttttttcaattattattttgtgattatctagagatggaaagaaaaactttcaaggctttcccatttcattttcctttctttctttcattgactaatacagtcccaaaatctagtgactactagacgattgacaagtgcaagtgcaatcaaggccatatttgtaactcaactctctcctgtggaagatgagagaggtatatcatgactgaagtttttgatgagagagcatcattggtaatgggtttgctcaatcggttactttgatttgaactgcaactaatcttgtggtctgtttttggcttgttttgatattaaaagttattatatgctatcatttaatcttttcccaggtagtgaacacgaggagttctttagctacatcatcttcgtccaggtggtggtgaaatcttttttttttttttttttcacaagaataataatacaaaagcaaagtttgggaaataaatgaaattaacgtatgtccattaacattcattcaaaaaaaagtacattgaaaaatatttataacttaattgaatttacctttaatttatatttaattgaaagatgctatatgtattgtactcaaaatatgttgacacataaaatagttaaatgaagagtatattgaagtgacagaggtaaaattggtaaaggatttaaaaaaaatataaaaatgatactttataaaaaaagacaatataaaagatatatagagtgtaatttcaaaaaaaaaaaaaaaaagtatgtccattaataggtcagccttgagattggttgggccttaaaagaaaaaaaattattgggctttttattttaaaaaaatatgttgtatttttaaaacctactaaaaaattatgcatacttttaagggttaatttcacaaatgnnnnnnnnnaacaaaaaaataacaaaaatacgatttcacggaattttaaacgttttacgatttttttgattttat

SEQ ID NO: 69981 - DNA, 2043 bp, Cannabis sativa
  modified_base (1567)..(1569): a, c, t, g, unknown or other
ttactagatttcgttttggctgttcgagatcatttctttttaaaacagccttttgttttccaatcattttcttattcttttaattctttatttctggtgtactctaaaatttgactctaagatggtttccaagatggaatttttgtaagtttttctgagtacatgtttgccatgtacattttgaatcctcttcactatcatacgagtcatcccaaatttctagattggatctatcatgagctcatacaacataggaatatttgggtttcttggctttgacatgttagagtgggcgtggactactgtaacttccttgtcaacttcaaatgccatagaaattatgtccctttgtgtgggatcatttggtatttggtcattctcaattaaggatgtagaaatctgatagtggatggctcacaatttagtcataccggcaataatttgggtcatctgtcctaccaacctcattgggtcgtttaggctcgggaagtcgtattgctttaacctttaacaactcatcgaaaatttggtcgacatcatcatcgtcaaatgaatacttaacttctgttctttctttgagagttaatttcttttatggctctcgtgcctttcctttatctttactgttatcggtattgataaaagtggtcattgattctcccttctgtaatggttttttgtttttgaatctcaatgagggtttgctaccctttgtcgagcaatttgtattttgacattacaggccttcgagacaagctcattaaaagttttgggctctgttgtgcccacaaaaattgccacctcagggttgaggattttggcacacattgaaactgctgcttgttttgataacctttccagaaattagaggttgagatttctccatctcattatgaactcattagtattttcactggtttgtttctttgtttccaccgagtcatggattcttgtggtcttcttcgagctcacaaattatgtcagaaaggctttttgcatgtcatcccaggtatttatggatcttgggggtaattgagtgtaccaggtgaatgctgtctcttttagcgattgcacgaattgtttaatcaataatgcatctgattgggtagattcaccacatacagaagtgaaatacgccaaatgttcatggggagaaccgttaattctatcaaacttttgtttgacatagtttggtggaaatgggattcggtcatagtaagtcgggtatagcttatgatatctcaggataggcatgcttgttgtagcctgatattcccgaatactctccatgataagagccttcaggtcttgctaaggttggccaccagctaatggtggttgcacaccaagcgatgacagttgtgtattgcctacaggcggtgctgaggataaggaatgttgcctaatctcactctctttttgtctcatgttagattgatgagataattatgttgagagtcgggctacttcttcatccctctcaaccaataatctttgaagttcctggatcttctcttcattactgattgccccagctaccaacactggcatatttttatcattgccnnnggttagtgcttcgaactgagtaatgagatcagcaaacaccccttgctttgttcgacaaagggagtgtcttctaaagagtgttcagatgtgcaacacccttcttcctgaactttatgaacaaaagggtttactgatttctgaacggggattgtatgcatggcacgagctcttgattgagttacacgtcccgtataggacgtaggcttaacagttgaagtgacccttgttggtcggtatccctactcctttaggaacgagttagggtttgctttggaaacccttacattgtcacttctagccttctttgggaaggcaaaaggcgtcctacacccctcatctagtcctagacataataaaaggtgttcattgttctcagaagatgcctcctattgaccttggcggttgatagggattacaatcggaggcctgatcggcacgtctcttactaattccctcgtttcaagagggtttggt

SEQ ID NO: 69982 - DNA, 1151 bp, Cannabis sativa
catattctaaaagcacttcctcaaatgataaaaagattaatttagtatactatagtaaaaaataatgaatttggatatatcttccaagtcaccgaaaaattgatcataaattaatctaaataataattaacaaaaataatttagataaaaattgataaatacgtgtcatatgagtgaatgcatgcggtgagaggggtaagtaaaaatatagggcacgtggttaacatattgaccaaatattgtcaatatgaaattttatagttagggttaggttaagaaattattcccttttaaagtaacaatacttaaatacttataaaaaatacatttaaataatgaattattttataaatatagaaaaataataaaaaaaattataaaaatacagttgtacagaattttaaatattttaaatatttttacgatttttatgattttatttataaatacacaatcttttaatataattttatgttgtactcttgttaatttattgttatttatatgttatttttttattattattttgatgttttttagattttattttcttgtaatttttatgtaattttttttataatttttttttttataaaataccgtaaaaatatatatataaaaaattgaacgtaaaaatataaaattcttaaaaaaaaaaatagtaatttatgtaattatctctttaaataaattagtcataaatgtagactaaactgatcctatgctaacttgggctttagacaaaaataaaattggaatccagtaaaaatttgaaattattggaatttgaactctaaacttatataccctaaacaaattaccatcgagctccaacatatattcagtgcgatcatctcactcgtctcacattaggaccgatcctgactatagagaattaatatatatttaaaaaaaaaaaactttgtatcatatcacaaatatttttatatattgtttggttatttaatggattaacaatttaacaattttttccagcaatttgaacatgtataatatcatttatttattttaaatttatatgattattaaaaaatataataatattttccgcatattacttttatattggtcgttaaaatttacattaattaaacatatcaaaagagaaaacaacaaagtttatgccgagt

SEQ ID NO: 69983 - DNA, 1163 bp, Cannabis sativa
gaattgaagcattgaattaattttcattttttttttccacaccaaaagaagcaaagattgctctctaattttagaacaaaatgtatgacacgtctaagaaaaaagacaaaagtggctttccttttcaatggcacgcaagcttgcatacatatattattggaggtgattaggatttaggatgaaataaaagtatcttatattgtaatagaaatgaattgattccatctaagcatctgccgggcaagactgaaatgatgattagaatcaaagtaagtaataaaaacaaagaatttgatatgaaaattataaatatgaggctatgaatgcaccacgtgttatgtaaaattaccaatcaagattattatagagtaattttttgtttttattttatgttttagattagaattattagagcacaactcaagggatctacgcaaagtaagttattggtttaattctcttagctagtcagcttgttttgtttgttgaatatttatatacaaataatattattttaattaataatttattcatacataacataaaggctaagtgacaaatgaaatatattgtaaacaattaagtgacatcatatatgaagaatctaaaccacatgttatttgtccaataaaaatgcataatgtgaaaggatgatgtgatttgtgaagtgataatagagagttagcaaagggtaattttgtcataaatattttgaatgaagggctaaatggcaatgcaatcaaaattcatgtccctatttgtatcaatacattaactaggatgcggagattagatgttttgttttgattcgaggattgtttctctttcttatttcttgaacaaactttttttttttttttttttggttaagattttggaaaaattaaaatgataaaaaagagatagcttattcaggttctgttttgggtataaagggacaatttagagtctacttagtttagggatttaaaaaaatttgttcatttttaaaattacacatttttttattaattttaaaaaataccactttttttttttttttttcaaataagaactcaaaaatatattttttttttctatgactcgctaaatttcaggaccggcctgagtttattaaaaaaatagaaaacttacaaaaatattagaatttgggttaactttta

SEQ ID NO: 69984 - DNA, 2098 bp, Cannabis sativa
gtcgagcccacaatttgcaaaagtgaaattgtttaataaaatgtgagcatctactatcttttcttttgctcaaggagtatctactatatctagaaccaccgtacaagatacatatgattttagttaatataagtatatgatataataatttaatggcacatttaaattatatatatagaaacatgcaaaaaccttagaaaaccataacttggaattgggaaccacgtgataccattaagacaaaacaccccgaccaagtgattaattaacttaaacttccaatgaaagagagagagagaaagagagctaaagcatttgaatcattcagtcaaatttatcattagaattcaaaaataataattgtactaatagtaacaagaagagagatggtttaacttaacacataggagatctatgaggaattccttttcttctactgatcatgctagtggccatgtcttcattatctgatacaacgaccttattattagtattattattagtagctgatcttgcacaaagattatatttactaaggccacttctcttctttctcacaataatctcatgatgatgatgatgatgattatgaagagtagtacaagtcatattgctcatgttctctgagcctgacgacccagatgaccaactcattggctcgtcactgtcgactatggtcgagtgaggggtctcatttgtagtctcatcatctcccatgtagtcttgtggaaccaaaaagtctggacttagttgtagagaattacatttccttaggtatggagacaagtctttcttgtacttgagcacataatccacctgtaataatcgatcacaatatatacacatagtatatatatagctataaacatcagttacatatgtacaaatatttttaatatatagatcatatgatcaaattttggactaaaatgtacatattagtattattattattaccttgcagccaagggagcaatgaatataaggttcttggagacttctatcacaagaagtgcaatagttaccggaccccttgaattgcctattttgaggtctcttcttgataaacactacttttgcactatttatagtgtaagcctaaattatgcaaaatcaataatatatgtaataaattagtaacaagataattattaataataggagaataattataagattaagaattaattaagaaacgtaacctgaacgttagagcagtcaataagtttctgaagatcttccaagcgaacgacatcatgatagacataacgacgaacttggagaagtctatggaatcggtgggaaggcaaacagtgagggcaaatactcaaacaacaatccaaacaacatatgttcttttcattcttctttgaattttcatgataagaacacccagcgaagaatttttggctgtatagagcttccaaccatgcaggcttttcatatccctgatgtatacaaaaaattcaacttcgattaattattacaataaattaattgtatatacatttggaattaataagagaaattgagagtagtatatacgtaccatgatcatatatatttgtaattatgtatataacgaaaaatgatgatgagatgaaataaggatagggagactatagtggtgttctttagattagtggctgtgttgatatcaagaagagagaggatggggtaataataaagaagagagagagagagagaaaaggagtagggcatatggtgagtatatataaagagtatttatggaggttcacaagagaagtgagggttgtatgtatgtacacatttatatatttatttcttggggtaatacacaacattttgtcaacagggtacttgttctatatatatatttatatatattttaagagagagagagagagagagagagatgaataaagaaaagaagtaagatatgtggggaacgtgggcgctgtttccgtgtcgaccatttatctaaaaaaaatatgttttaaactaatttcttctttgcaacatcttcttggcttaagagctcttaatatatattagctaaacaaaaacaaactccttcttcttgaaggagctgcatgccctctctctctctctctct

SEQ ID NO: 69985 - DNA, 1291 bp, Cannabis sativa
  modified_base (1254)..(1265): a, c, t, g, unknown or other
gccacaatttattattcttgtaaatattttatggcgagacgtattttgagcattgctattgggcactagtggtgcctagcacccttaaaatgtgtcgccttgcgattggctagcgatattccctaaaagttattatatttaactatatgagacccgatactaaattagaccaataacaacattgacatgtaggaggatgcttggcatcactaatgtcttttagcatgtctcttttttttaatattaaacttttattgtaacttacatatccttctaatgcaagttacaattttaatgttacaactcataacatgattataacatcatttagcatatgctgttagatatataataaaccctttcaaatggaataaacttctccatctaacatttgttactttaattagtattggaatccaaataatttaatttaataactattatagaagatcgctaattatttacaagacgtcagatttacaaaacacacttatagttgtgttaagcaccaataatgactaataagaatacttatttgtgcctttagcattactctagataattatcgttatcaaaatcgtgtcctaaacacgaacttgattaagaccctcaatggcttcacaaaattcaacagagaaatactaaaaaaatactagtggtgtctagcaccctttaatttatcatatcgttattagtcaattaagtatcaagtccattataatttagtgtaataatttgtatgaaatatcaataaataatcgtaagacgctacatctaagtggtgctaccagtaacaaatgcacttgttatggtgtggggttgtaaccccactaaaaaaatcactttaaaaaaagtaaatatttttcttttaattaaataattatacaataaaatagtaaaaaaatcccacaaaatggttatatttttttaaaaaaaatgaataatagaattttattaatgacaaacaattaaaataatagcctgcattcttatcgggacatctccctattagagacacgatcaggattaaaattagaaaattgaatcaaataattagctgtctaattctcagatcatttaataaaaaactaaaataaaattaaatgaaaaaattacaacatcacaattaacctttaagaacacatatattatattccatccagcgttcataagacacaacagtagaaactgttgcaatagagtcattcaacctcgtagcttgagcactcaatgctggaaattattttaccaggnnnnnnnnnnnntaccatgtatgtttcattaacatcct

SEQ ID NO: 69986 - DNA, 3463 bp, Cannabis sativa
  modified_base (227)..(229): a, c, t, g, unknown or other
  modified_base (3410)..(3437): a, c, t, g, unknown or other
ttatatagtcacttcagcattgattattaaatcaatggtagcattaaaaattattgaagaatccaagatcgtaattcaacattgattccacaatttttcaaccactgcaatatataaatcaaaactttgaataaaaaattcataattaatacaaatatctcaattgatctaataaatcatattaaaaaaatagagttttttcatttttatattttaaaatagttttnnntttttttttttgtatttttattaaattttacagaaaaatcattatagcaactaacagagcaatttaaatttcaactaaaattcgtataacaatccacataaaaactaccgaagcaactcaaaccgtaaattaaaaaaaaaaaagttaaaaattaaatcccctaaaaaaacttacaaaataatagaatgtctcactttcttatttatatgtagggataaagataattgcaatgaaaatctcaacataaataaataaataaatcatttgttgtacttatatcaccatttttttggtagcttttaattcacttaaaacatgtccccgtccaattatttcgtacatttatacaaaattatttttcaaataaataaattattatcaaaaggaaaaaaaaatgttcttttcttccattttcctttcacagcgcacacctgttcttttttcctacttcctcaacatttcacggtgacgattaacataacggtagttgccttttcttgagtggatatgttctttggttatttttagtaaggctaaacatttatattagaaaactgtttaatccaactgatccgatcgacccaaactcaaaaaactcgaaaaaaaaattaggttttaaatatattggtagttgggtcgggtcatctctgggtgcaggtataactcaaacccattcgatacctagtaaaaacataaaattattaatttattttattttaattattccactcacccaataaatctaaaatagaaaaagccctaacctaattctcccaacccccgaacccgaggccccattcccttctttaggcaaccacatctgcaccatcaagagcattgtagccactgaagaccacaaacccagcacgatctttacgttgggttgaataaaatgtaacgtaaatcgaccaaactaactgacgtacacccctactataaattatttcatattcccactttgccaaatctagggtatctatttacaaatattttaggtaactaagtgcttctatggtcactctttggaagtgggtaaacttcccttacttaatttcaatgctcgaataactataattttataattcttttatatgagtgtatattgtatttatttaagaaattttataaaattttaagaaattcagaataatttacaatacaaaaattaagattcaatcaggcgtataaaataatcgaaacacacatacaactatagttgtgaatacgtgcatgtcgtgccagcccgacccatattttgaaaagccttcagtaatatggtttgtacagtgtcgactcataaaaggatatggcttgtgatgttcatgccaatattttaaaaggtaagcccagcacaacttgtaagctcacattttcatgtcgtgcttagacttgtgctgtactttactcgagccgacccgtttttcgtaaataggtcagttcattatcttatacgagtggaactcaagcttcactttttcactattgttttatataattaatgagttaattactaaattgtatgtatttttttttatataattttaattatttttatataacttttcaacaatattttaaacataatcatataaaaaattgattagaatgattaaatttaaatagttaataataaatatatatgtattattattatcgttatcattattaaattattagaatttttaacatgttgtgctttcgggttagtatatttgtgcttacgtgttgtgtcatgcttaagcttattcgttttgtgtcgcgctaggccgtgccaatttgctgtattgtgtcgtttcgtgaccaaatctatttgtgttgggtcgtgctcgtgcctcctagggtcctgacagtttcgtgccgtgtcaaaaagttcaactcatatttacaactctaatactacaaactatttaaattttatttttgggatgttaaattattatgaattttaaaatttttatagaatatcttaaataattataatgtacactatgtcactatcatattaaaaaaattaaaattaaaactatctgaattttgaaaacataaaaaaaaaaagcacatatacatctattttgagagtgcaccataaaatttcctataatactcaatatttttttggtcatgtttttaatatatggatggtgtaatatttttatataataatacatgttgttgttgtagttatttaagatatcgtgtaaaattttaaaaatattagaataatttactatataaaaaatatggttcataaaatctattttacacaaattaaataaaaaaagtaaatactattttggatcatgtgttttgtaaaagttactgtttggatttgttaaatgacaaaatagattttgtattttccaaaatgataaaaataggaccttgagcttaattttggacaactttttaaatataatctacttgaagacaattcctaacacgaacagagacaaaaaaatgtaaacagttttgtcataacacctttaagttcagggtcctatttgtactattttagaaaatgtaatattcattttatcatttaacaaaacaaatggtctaattaatagcttttataaaatacgggctctagaatagtatttaccaaaaaaaataataataaaaaaacaataaccatgtaaacacaacagacaatttaaaacttgttctgggtggttttaattttttttttttaaaaaaacatttggaaaatttgcatgatagtgcagcataaaatttctctttttttaattaaaaaaatccagaataataataataatatttttttaaaaaaaagagtaataatgataggcgtggcagtatagtaaatataaatgaagaagaagggtaataataagagggagttgacctgacccacttttatcaaatcagaggtcgctttggctcatcgcacactccgccactaaacgacaaaaaatgaccggttcaataacggaacctctacttaacggttacggttgcttttgccacgtggctttttcctggattgccgtgtggataaagctcttaacttaagtcgtctacactcactcctcctctagtaacggtcaaacaacttttgttttttttaaggctaattaggatttttactaaatatgtacaaaatcatgcccctaaatttttaaagctattgaaaatgtcgcctgaactattgagattgttnnnnnnnnnnnnnnnnnnnnnnnnnnnntcaattttactatttcaatgattgtt

SEQ ID NO: 69987 - DNA, 3307 bp, Cannabis sativa
tttaatgtattaagactatctgacaatactaaacatagccagacacaagtttataaaaacaactcaattatatccctctatcctaatgatcatattttaatgaacaagttggcccgatcgtaattaattcttgtatcgcaggaaggggaacatgggaaagaagatactagccaaaatgctctggattaaactcacttctactctggcagaacatgaccagtttcaacactaataatatgagacaagtttattacaaaacgaaacaaaacaaaacatccagctactaatttatattataatcacagcattgaaacagttggataaactttctgcagctaactattctttcacttttgattcctattgaaaagtgttttctaatatgtcttcaaacaacaaataatcttggattgacagttaagtcgaatattcttccaatgatttctttttacacagtaattgatctattttctatatcaatatcgaaaatgaaaatatattacttgatctgaagctgagaaaataacctttgagaggtcggcttataataaactttcaatacacaaataacttttgctctcaataacatcatttggatcaaagaaatcctatgccaattttgcaatctatagatgtttcttccttatcaaaggcccatataaacatctacaaacatcatttcacttagacttagattacacatccattggttaaggttatgtctctctttctgaatctaaagattgctccactagtactcctaattggaccccacctatcttctaagctagttttgtatgcttatcttcaggttataaactcataaatgattcttcttttcctctacaagattcaaaataccatgtaaggactataacttcctttccataattggttagttttacttttttacatgaagcatgatatcagaccaaatcttgcatctgcagatgcaaccatgagaagcttttccagtgtctccgctataccgaattattgactaaaacaatatactaattactaaccccagttcttataataatcattataataatgacataatctcccaatggaagaattcaagcaaaattcaaagttgtaaagtcaattacttctaacaactttgctagtcctatgatgttgatctagaaaaagttaaaagcttgaaaatgtgaccaattcagataaaatggtagttatttacagaaagacatttcaagagataaaggaagaaaataagaacaactaagaaagctttagggagataaagagaaagataatggatatggagatcaagaagaagcttttctaaaatgggaaaaagtcaaccctaagaatcaacaaacccagataagatgaagttagaatatcaaacattatagtgaatcagaatcactacaacattatatttgaattttgaccactaaaattcaatggtattccctcattagaaaaagctcaaagatctatgaactcaaaatcaaagcattaatctttaccttaatagaaaaattcaaaactaaatatgcttctatatatatacaaacacatatccaaatctatattagtatatataatgcacagtcttcccaattcaatgtttccaaaatcaaattacctgcatagaaagaggccttagcagaagaactcctctctaaacccaaaggaacaattttctcagacttcatttcaacttccctattcttcttcttcgccgtcgccgttgccgtcgttaccaaactagcatcactaattacggcatctctcaaaattttcgcgggtttctcaaccggttcactaaatttcgctggtttcttcatctgggtatcaccagaaaccaacccagaagctctctgaatcagatcatcaaagatctgaaacttactatcaacctccacaacatgaacagcttcccttctctgctcataactatgaaacaaaaccaccgtcttcctcacctcttgtagaaccacaaaaaggtcttgaggaacatttttaggtggctcttgtttagaaatctcttcaagctttaactgttcctcagtgttgactgttttgattacagacatggcggcttcaacctcttcaatggtgggtcttggaggaagtgacttgtaagtcatcataatttcctccaccgtctccacaacttgttcaggtattacagccatggctatggtgatgatggtgatgaatgtttttggttcagacaaaatagaaagaaaataaaaattgtatttttacagaaaaaagaaagggttttgaatttctctatgggcaaatactactcttactataaagccttatttctagattagactatatattatataataaccattttttaaaaaatatatatataaataataataataattctgtttttttatttattttttatttctaattatatatatatattttttcttggctgcccccatcttaattatacactttgtttaatttgtcattaatttactttttttaggaatatctttttactttaaatataaatcaattttagccaaccaatcatttctattcagatctattttagttggaggtaatataagtcttttaaaccacatgtactttttagtatttttcttcataaattcatgatacataataataataataataataataataatttttagtttatttttccattgagttgtatccatgtgatcatcgatacatacaaatgtgtatatatatttcatcacatcttaataatgagtaatactattgtccaaaaaaaatcttccaaatggcattatgtaaagattgacaactcatctagtattcattttcttattttctatgacaaatacatataatttttatttttgaaatggacaaatgtacatataattgatttgggttttttttttatatatatatatttatattttataaatatgggatgataaattagtaccaaagctaaaagggagttataaaggtagctctttttggtgatttataatatatgtacatattatcacatatgggatatgggatactcatttttagtatatagaatacaaaggtgaaaagttcactcacataatcatacataagaaagtagccaaacataggagataatgggatatgcaatcaaaaatattttccaccaaagcatatatcacaaagtttcattgttatattatattttagtatatacttgagatataagacatggccccatatgcaaataattatactcctcatcaacaatccaatcaatttttcttttcttttattatttttgagcattcttatttagtctaactataccaat

SEQ ID NO: 69988 - DNA, 2237 bp, Cannabis sativa
  modified_base (1685)..(1685): a, c, t, g, unknown or other
ttgttgtttttatgtttttgtgaaataatcccatttttttgcccctttcaaaattatatatattttactgatgttgaaaaatactacatttttttctaacataaaggcccaaaaattatttttttcctgtgaccccctttgtattagggccagcccttattgaagcatatagacttcttcttgaaggttaccatttaacaatgcattatttatatctaaattgtctcacacaccaccctttgcttagagcaagagttagtacaactcttactgtgactggtttgactactggactaaaggtctcagtaaaattaaaacaaggttgttgatgaaagctcttagcaactagtcttcctttgaatttgttgacagaaccatcaatattttccttgactctatacacccacttacaccctatggcttgtctcccagcaggtagtctaaaaagggtccaggttttgtttttcttcaaggcaaacatctcttcagacattgcattgttccaatgaccatacaacaaagcctcttgaattgattctgaaacttggacacaacgaatgttttaggcttgtacatacctgacttgggatcgagtttgcattctgtgtctggtttgttgattattaagagcagcatctgtagtgagtgtaggttgtacttgccgaagtttagtttgaacagcaggtgcattgttggcagtattggctgcattagaataagaggcttgtacccctatttggtcacgtgctggaataggtacgacactgacagtagttggagtttcaacttgaccaacagtggaagcagctgtgggatcagtgacttgcacattaccagtaacctgttcaaagaaaatatgttgcacattagtggttttgtttactgtctaaacttgttgagcatcgaggacatttaatttaataaccctgcagatattttcactaaaagtgtaactagagataagtttaggcactatataaacatgttgagcatccatgacatttaatgtcctcattcatttcttttggattagagattaataagtgagtcaaatcaggtggacttgttgggactaaactcacttaatctgtcaaagtcagtaggtccatcttttcactcgtcagatgaatcaggagaaatgcctctactctctaaagaacaatcaccagtgctcatactttaaattaagagtcaagtttagagaaagagtgtccaagattaaagtgagtgtttgtggagggatgtaatgagagtatcactcttgaagtcaattttctcatcgtgagacattcttttgtaattgttcattgtgttgagttgtaatcttggacatattcgattgtgtactgctaactattcaatcaataatgattcatcattatttcgttctcaaactaagtttattcttctcttatttcatgtaagttctagtttttgattttataattgattctagttttgtctatgcattcttaaacaccactattgttgtaactgcagtgttttgagggtgatgattcaccacccaagggaaatgattgagaaacaactagagatagttacaactgttaaatgaagtatacatataactaacattgtaataacctaattaactatcctttaactaactaatatcagctaaaacactaacaccctaaggatatatttttgttttttttttaaanaaaaaaaaaaagaaaaaacaaagatatatgtatgggtcgaaaagagacattatatatgcatgtaagcacataaacacctaacacactttacatttccatataaaggaagcaaactcttatacctatcatcactttgttttaaaactatcgaaagagacattattatcttatcattttagttttatcaaacacatacatatcaccatgttttcactactacacaaaattctctcatcttcttgttttttttttatgtccagcactattttgtataattttgaaaaaatttcatgtttagtattatacgataatgaaaaatttcataatgtccaacgatatatatactaaacatgaaaagtagaagacatgaaattttataggggtgtttataaaatagtcaattttatccaatttgcacgattttgcatttgtgcggattgaaatggattagaaaatttaaaatccgcacttatgcggattgaatattaattgatataataaaagtaaccgattcaaacaaatccacatatatttacataaattttttaaaaa

SEQ ID NO: 69989 - DNA, 2530 bp, Cannabis sativa
ttgaatatagttattacaggagctatcacaggaaagatttgcttaaccgggtttatgcctcggatgaagtacggaaatatgccatttatagagcagaggtacttcaatcagagttagactccaacttcccaagttttgtgaaaccaatgcttcagtcacatgttactggaggcttttggctggtaaaccaacaaattatccaagtttttatttgcttcactttgcaatgaaattattgaatttggctattgaaattctatatatatatattttttatttttctatagtagatgtgtcacataattatgttggttgacagggtcttccagtccaattttgcaagaatcaccttccacatacagatgagatgattactttgattgatgaagagggaggagaattcccaacaaaatatcttgttcttaaaactggccttagtggaggatggaggggtttcgccatcgatcatcaactagttgatggggatgctttagtttttcatctggttaagtcaactcaattcaaggtattctttacatttgatagtgaagcatattggcttgtaatgttcatctatctgaattgatattcaatgaagcttgtaatctagttcatatattctaaacatatcaataaattgcttggttgttttctacataaaacagcctactttacttaatacgagcgattcattttatcatcttgatcttgtaaataaagttttttacattaaactttgagctcactccttatactaaatgggttagaaacttgaatatcatgcaccatagagaatgatatgcttattttctttttgccataataaatttatattctttgcctagtcgttttcatttcttgcaaccttgattcttacaggtatatataattagagcaaatcaaactgaagaccaggacttggttaatgaagatgaagctaaagaagagaacaacaaagatttggatgatgttcttccagcctcaggctcaggctcaagcagaaagtccaaaaaaatcagaacaagtaatttttttttctactccatataactttttagaaatcctgttaagttattatgctagtgaattctgtttaaacattctagcaaatcaaacagaaggccaggatgtggttaatgaagacaaaactaaagagaacaacgaagatttaaaagatattccctcagccttaggctcaagcagaaagtccaaaagaatcaaaacaagtaatttctttctaccccatataactgttgtagaaatcctgttaagttagttattatgctagcgaagtctgttttgtttagccatttaatcattctagcaaatcaaacagaagaccaagatgtagttaatgcagacaaaactaaagaagagaacgaaaaagatttgggtgacattccctcaggctcaggctcaagcagaaagtccaaaagaatcagaacaagtaatttctttctataactttttagaaattctgttaagttagttattatcctagcaaagtctgttttgtttagccatttaattattctagcaaatcaaacagaagaccaggatgtagttaatgcagacaaaactaaagaagagtacgacaaagatttggctgacattccctcaggctcaggctcagggtcaagaagaaaatccaaaagaataagaacaagtaatttctttctataactttttagaaattctgttaagttagttattatgctagcaaagtctgttttgtttagccatttaaacattctagcaaatcaaacagaagacgaagacatggttaatgaagacgaaactaaagaagagaacaacaaagatttggatgacattccttcaggctcaggctcaagcagaaagtctaaaagaatcagaacaagtaatttctttctactccatataacttaatagaaatcctattaagttagttattgtgctgtttaaacattctaaccaatcctaaaatttagccatattattaaaaagctgttataataatcttcactttggccttttttgttgtgtattttgcaggcaaaaagtagaagcatgacataatggaatatgtgatagataccaaaagactagtttctgtagtaattattttttttttttgttaatctgaagttttctgttgtatgaaatgttaaagctgttatcatgaaagatttaactaactccctcttcatattttgcctctaaattaaatattatgaataaatatgcctcacaacttagtgataggatgttatttatccttaattaatatcaaaaagaaaaaatctcaagtagaaaacatatactaaaatatactaattaaagtagaaaacatgattagagttttaaaaaaattgaaagaaaaagtgcccacatgcaggatcgaactacagaccttcagtttacaagactgacgctctaccactgagctatacgggcgttgttggttttacaaatgcacacttattaatttgacttgtttaaagatatatttttaatagggaaatttgattttctatacttagaaaatcaa

SEQ ID NO: 69990 - DNA, 1601 bp, Cannabis sativa
aattgaaactagttgggcccattatatggtcggccacttaagggataatttagccattatttttttttttaatttcatataatttaaattctaaccctagaaggaatcctataaatagaatatgagaggctcataacttgacaaccctagaagtcatccttaactttgactaactcatcttagctagccttcagtgtcgttcgagcctcctccgcagccttctgctcccgctccttgagtgccttctccaccaaaatgtcgttatggagggtctccttctgctcccccgcttccttaactttcttgagcattccccatatgccaccgtgtttagcaacaacatatccttgatcaattagattcttggataggcaaccggcttcagcagtaatctattctaaattttaacacaacagttagcaaagaacagtggaaaaaagagaaataaattacaaggtatagacttaccgaggttagagccaagcccatgtcctggacttggtatattgggttggaagaagcacaggatgcgaacctccttgtggggagttgtaccaagtctgcagcgaagtgactcaccatttttgaggcaagaggaaccaatgaagaccccaataagctagaaaaccagtcggtcatcgggtcgagatttaaattccaaacctggccagagtattcccctcgaaatgggccatcttgagtctcttaaagccattttttcaaaacttctgccttaacatcctctttagattgctcatcgatagcgtaattgtgcttggcaatccagagctggacgcgttcatcgtctgggttggtaggagtcagaggaatagtaggattggctaggaagacatcaaccttaggagggatcccagagtcaacgctttgtgaaggggtcctgaatgatttggttttttgaagggttggagtcgacaatcctactcttccatttctggtctagcagggcaacctcctcttcctcctcttcaatcaaaattacctttggctctgcaactgtttctttagtggggccttcaggactcaccaaaaccgttaagaagtctgtggctggaacccaagggctgttcaatgaatccaacatggcaaatgtgtcatccataagctcgattgcaagaaagaaaaaatctagcatgaggaacacattaaatgcaaacttaaaagtacaccagacaggaaaggctaatcctaccttgatgtcctaacagtgtcctagaaaactcatcaattaaaagtgttggtgtcgtctcctaagaaactatccgaaggaagggatcgactcaaatttataaagtaggagtggtccaaaaatatgagaaacgggaggctcgaactcatttgagatcgaccaaggaagccccccatgttcgagaaataaaaagccttttccctatcaccctaccgagcatggggcatccataacctataaaatctcttgttaaagttgactagccttgaacgagagtaatccttgttggggattattttaccaagatctaaatttactatcatgtatgttgattaacatcctaaatatgaattatctaaaataatggaatttaaacacacataaagttaagaaa

SEQ ID NO: 69991 - DNA, 1481 bp, Cannabis sativa
ctaactgtttaatttattagcactgtcaaattacttcactacacacactttgaatacggtcatataatttaatagtcaaacagtcaaagctagctaggttaatatacataattatacttaattaattaatcaattaattttgcaaaaatattagtacattaggaagacccaggattttatttgaccaatgtaaaattattatatatctgttaagagttactggacaaattgatgttataactatacaaattaaatattcttatcaaaataattatgtgtaatttttctttatattaaaattttgaatgggtattctctagtctccatcgaggtgatatgtgctttattatattttaacccctcgtccaagtgtttttttttttttttggctaataacaactaaagcgtaaatgaatgtcataattaagatattattaattatgattgtgtctcctatatatatttcaaataataataataattatacaacaagtaatatttaaataataataataagttacgtctaaaatttagcttgaatgttcttggcttttaatttgatcaacgtatatatgcagccctagctagtctatataatatatatcgatatcaaaaatgaaaaacatgcatttgccttattttttcttctaataattattagctagtttgctgaactaagaaaattctcgtcgtgctaagcactggaattaataataaaacgaatcttgtaatacttagtacacatttttcctctctaatctatttcacatatatatagagagtatataatatttatgtatatatatgattcttacatataataatattatacataaattatatataagtataatatacgtgcatgcatctggggaaagtaatccaagatggaaccgcactaatgaatcatcatatcccaagtaatagacagattaattaggagcaattatttgttttctctcatacatttatatatattttatgcctagttatgttttaattaataatttataacgtactctatatatatactatatattgtatacatgtcaatgtaggatttgcattaattattattatattatatatatcatgaaattaaacaaaccataatccatatagttacatctcaatatatacagagatatgtttggcattattgattaatgtccctctctctccatatatatatatatatatatatatatgacaataataatttaaattgaaataacttgaagtaaggaaacatctttggaattttgtttttatttttttatgatggtgttcgttatagttataattatttttaatttcgaataatttacagtgtcgaaaatatatttaaagtcttttaaagacgcgtagtataaattaaaatatttggaactctactttttggtactgtaaattatttgattttttataaaaaaaattacaagaatgatgttgcaactattacgagagagagagagagagag

SEQ ID NO: 69992 - DNA, 2128 bp, Cannabis sativa
tcaattttactaattcggtaattacttatatactaaatcatgctcttcgaactttgacatgtaccaaatcatactccctaaactttcatacatgttaagacttttcgtgcaaaaattaaacaaaggtccttaaatccaacaatctcaatattttagggagatttttaacgactttaaaagttcaaagaacataatttagtacctattaaagttcgagaagaaaaatcctaattatttaatatacataaatatattaataagcattactactcactcacaccttaacattgtgagatagaacacacacaagtcttcttaattaaatttatcaaaattgaagactatattgaaaagactaatctaacaacaaagattctattctaccttcttcattcgagttctgatttcagatttacgagctttgttataaactctccttttctccgattgacgaactctcttagcagcagaatcagcttttttggttggagcagcctcacaaacaatcgaacgacgaataatcattgggtattgaattgagctcatggacaagcaccctgacaagtttaacaacaaccccatttttcaaagcttaaatttttccaaccccaaaacacaaaataccaaaaagaaactaactttatgtattttctgggcaaccaaacaacacaaagaaaaataaagatcttacctttggagaagtaatggtgggaaattgaagaggagaaactgagagaggttgaattggaaggattgagggaaagggaagtgaacttggaaggaagggccatggctaagcatgaagatgaagagtgaagagaggttgccatttgctttctttctctttctttcctatctttttctttctatcatcttttattgtgtattgttttgttatccacactggtttggtacaaaggtctcttttgtatttgaaattactcttttacccctggttaaatgttgcaatcgaaatcaacaaaaggccaccccaaaacccttatggtaaaattgtagggtaaatatcattcactctatattttgtaaaagttagggattgaattttttattttattagatgacaaattagaatacctatttttaaaataattttaaataatactttgaactgatttttttgtaataataacatgacataaatgtattatgacaaaactgcttacgttttttacatctattcgtactagaaattgtcttcaagttgattatataaaaaaattgttcaaaattaagtttaatgtcctatttatactattttaaaaaaaaaataaaggaattatttgtcatttaacaaaatagaaagttcaatcggtaacttttacaaaacacaggatccaaaatgatagtaacccaataaaataaaacattaacagaaaattaaacaaaaaaattgtataatacacaatagcattgctaacctaatacaaattgtaggatttcatgttgtgaaaagtgattgtttaaatgttgttaatgtatcaatcgtaggtgtaataattcggtagatgcaattatattttagggatgtctcattttgttttctaaaactcaagaggggaataaagtagttcattcattgggaaactcagtttacaagatgagagttctcatttttttttagatgttattgatcgttctaatgctcaattaataagaaagaatttgctcttaaattaataaaaatttcttcttttcaaaaaaaaaaaaaaaaaacaaaaaaacaaaacaaaacaaaaaaaaagtattgctaataagtggttggtagttatttttataggggtaaatactattttgattttgtaaatttaatttagatcctctattttttaaaattgtataaaataataatctaacctctaaatcagattattaatatattatatgttgacgaaaattaagccttaaatattattttttactattttaaaaaatataaaaatcaaattatcatttaacaaaactaaaattctgtaaatttatcactgtacatctattaaatgtgaattcataatcttttttggcataataataaataattatttaaaaaaaattaggggaattaccccatatactattttttttattttttcttttcaaatttacagtt

SEQ ID NO: 69993 - DNA, 2301 bp, Cannabis sativa
  modified_base (1928)..(1933): a, c, t, g, unknown or other
tctgttttactactataaactattgagaatttttttataaaaataaaaggaataatattgtatctataacgaatattattttgaaaaaaaaaaattgaaaaaattatattggcatgtgattccgagcgtggagattgactattagtccccattagattattatcagtgaggttggaatatacactgtatacagttaattgacacaaagcaaccaaagtggtttttggtctattcctgtcctgcttaatgaaatatggctatcatttaaagattcttcatcactaaattacctatcaattagggaatagggatatgtttaaggcaaattgctttttgtcaaatccatcaataatatgtatatcttgatttgtgtgggtgtgcctctttcggttctttacttctcttttttcagttgcagattcctaattatgattattccattgttctttcaaactttacacaatcttcaattttggtgttaattccaatagctaagctacctatagtttatttattttttccctcaatgttagagagctatagaattaattttagaacaattagtcatttatctattttgatgaaatagaaaatattagagcatctctaaataagtggggtaaagttaaaatatagtttatttaataaaaaaatgtactccaatggtgtgctaaaaaaattatgtaaatttgacacataataaattttgtgctaaatttggcacaacatttattgtgatataaaatttatatcacaataaatgcactatatcttttatttacattaatatcgatcatttgtattattttattagtataattaactataacattaaattatggagcatttatattattattttattttcttacatattaaaataataataaaattgataatgaagttaggggctatttcattttacacctcaaaacagtttttttttttgcattttcacagaattatacatagaaactcttattgcaacagttttattttttgcatttttacagaattttacagttttttattattattgttttcctactttttataatagtcacttctaatttactaaatagtaaatagtgttgataaaaaactaattaattatctttacataaaaaaattttatttttatcatataatttgagatatatcttaattatgtatatttctttttcaggaataatttgggctctcaaatcactagtcatgaactgcaaatttctccaaaatacattgtaatttaatttgacaattaattaatcacgggttaatagtgtggtactgtacattgagaccaacttcatgtttttatgcataaaattagcacaaaagtcttccgcattaatttctaatatatttttcaatcaattctactcaacactctatttcttttacccctaaaaacggcaaagttaactaactttttcggttgattataatatttgacgccataataatatcaatttttttttttatctataattctatttgtctatcatttaatatttttattatcaaattatacaatataattgtaaaaatgcttatttttattcttaattttagtttttcttataattttactctcttattattgctttttttttttttattattattattattatttaagggaacttatcacttttggcctccttgttttagttttagttttaagctcagcaccaagttcaatatgagtttctgaagaacagaaaaaactaaaaaataaccacatgttatttttaaacgaccaaaatacctcacttaaaatgcattgattatctttattatttttcttttcagaaaacttatatttatattggattttatttcatttaaattttatgctttgttgatcggattaatataaaatataatattaatgtattttaagtgatttttttcttttttttttnnnnnnaaaaaaaaataataataactaaacaatacgatgccatttttaattatataacctaattaatctaatgagaccaaaatgattatgttattcatgtttttgattcaacggcctaaattattattagaaattaagtagtgaaattgagcataaagaaatacttgcacatgacaatttctgaacttcataatattaatgtaggactaaagaaaatataaatttgcattaaaaactatgttttgttattcggtgatatttttatttatgatagttgaaaatgaagttataataggtccaattttactttcaattaccatttctattttcatgtttttttttattttggttgttttttttttttttaacaaatt

SEQ ID NO: 69994 - DNA, 2085 bp, Cannabis sativa
gagccttagtccacgagtcttttgtatttatgagagtatttattacagagaatgttcttggtgactttctattttgttcttacgaaacccagaattctcgacccttgctttaatgtgtttggggagtatttatagtgtttttttttgggataatccctagaattgtcccttatatatttctgtgtaacttcagtaggggcatgcattcctagcccatgcaaaataggaaatatgcatgatctgttccccaggtatttcaggggttaaatagatatactcctttattcctttttgactgatgtgatccctcataaagtagccgtcagtaggcttattaatcatagcgtaatagctgcagaaggggggttatgccgtcagactttaatatttatggcaatatcaatacgccttctcccatgcgacattaaatgcgagatgactgttcagagagggtctgatatctcccataagtgctttgctatagctctgccctccgggagtgcgtggttccctcatgccttctccgggaggtgcctctttagccgaccctctaggtttacaaagacttagccaaattgtctcaaagccatactctttagatctacgtgtcgcgatcacattggtccacatattttgggcaagatcaggggcaacattctatttttttatttggttttattttaatgttattctaattctagatatgtttacattatttccaaccaaacgtcatttaatacagtgtttgtttagtatatttgttatgatgtaaagtttgcatcattttttgacacacacatgttaatattttttttactaaaaacactctcatcaagtgatggaaatttgacttgcggaaacaagtacttacaagtactcaccttgaatggggtggggatcacccgccttaatgggtaatgtgacgggagtggaatgcaattttatatacccaaagcgagtttggggcggggtaggagtgatactattcaccccatattcgactcatatatataatttccaaactttttatataattttttaattattacacattaaaattagtgactatacttacttacaaagttaactattaattatcttctctaatttattgtgtaataaaattatttcataggtagaatatttatttattttaaagtcaatgtcttatttttcattttagttttaaattacattacattattattatttttaataggtcccaacgagtcctcatacccaatagagattcccctattccgaactcatcaaggatgaaataggatgggggtaggggcataatggggaacgagaatgagattgggaagtgcattacccgcttattacccacctaatttctatccttatctcatcaacttctttactctattctttaaaatatattaccaaaatctcattttctttatttcatctcacacacttaaattacaccatacatcctattttaaaaaaaatttcaacatagcatttaaataatatatcatcaaacatttctattaattaaaaatataaacaaaaaatcaaagaaataaaaaaatatttaataaagaagagaaaaagataaaataattaaaaaaagaatatctcacatgtattccatggccacatatagcgaaggatatagctcaaaaagttggtgctcgattttacatattctttacctcatctaatggatgagcaattttacatcatttagcttttattttagctatttaggtagcatagctcatctgatgggcatgttcgtaatctatattgggaaatttgaatttggatgcttaataaactcataaattggtcccctaaattaatactatacataatttataaaatgtgataactttttcctaaattccaaaatacccctctcatttttttcaaccgtccctctctcttcctatttttaccaaaaaattgactgaccatcgggctggccatcaggctggccatcggactggccattggacggggcatcgggccccccatcggacccgatttttaaaacccagaaataagccaaactagtgtacaatcggacacaccatcgggctagccatcgggccc

SEQ ID NO: 69995 - DNA, 1308 bp, Cannabis sativa
acagagtttagtttttggggaattgttgttgtacctaccaagataacgtgctttccacacacatcgagtttcaaatcggatgagattctcggtttaccactggactcggttccacagccgtaggattcgacgcggatgaaatcaacggtgattgggagattgatttgcctgactaagtcggctaggaagagaaatgcaccagtggctacgcctacgaaggcagctggtggagaatcgaggaggtcggcggagatttgggccgcgagttcggtgactcggctggcgatctggttttggttccacagaatagtttcgatgtgggactccatctacggcgccggcgccgacgatgaatcagtcgaagtatggactctctctctctctaactaactcagtctctctaagctgagttgagagtgaaagaagaggtattataggtatttttggtttttgttagggtttttgtaattaatttttaggagcgtttatttatgggattatttcacaaatatataaaaataataaaaaaaattataaaaatataattttatagaatttgaaatatttttaggatttttttaattttatttacagaaaatacggtttgtacggttaatttgttgttgatttttcgttactgtatttttgtaatttttttattatttttgtatatttatgaaattattccaataaaattgaataattgaaattttcaatttttttacttttatattgtggagtgaaatttttttaaaaatactgtatttttatcaaaaatattgtgtaagttttatattgtgtactatgttaaatttttactattattttttaaatgtttcactgttatttttagttcaattgtgtgttctacttttgttttataaaaacatgaaaagattttggtgtgacagtacttttgtaaaagttaaccaaaattctaatatttttgtaggtttgcaacaaaattctcaactcatctaagcccaagggcccaaatatccaaagcccaaatttcaaaaattatatttgaacaaaaaccttggcgccaaaaagaagtaaatcaaaatccctactctgaaatcctcagcgaaagggagagaaatacaggggcggagatgtcaacaaccatcttcttcatcgccgtacagtgctgccaatgctccaccatgcaggtaccttacttgtatttatctatatgagttgtatgaaatgtatgtgtatatgttaaatatatatatgttgtattggtaggtgaagcaaaggaggaagaacagcaagagcaacaaatggacatgcgtggtctgcaac

SEQ ID NO: 69996 - DNA, 1747 bp, Cannabis sativa
cgattcatggagttttcaaaagcgggaaggaagttagcctaccgaaagttttattgaggcatgggaaggccttggaagaaatgacattgtgcattaataccaaacatcctttctataacacaaatatccacagaagacaaaatagttttaggtcacaagttatgggatggcctcgggcttcttctagtgctaacattacaattcgttgcttaaataattaatttaaacctcttgtcatgaggaccttctcaagctattatttcatttttcgtgaactactgcttgctatgaagctttattgcggtatgttcaactttattgtcgatttaatcttaattattactttttttttttttgtcaaagtgataatatatgctagcttttttcctcatccccatagagaatccaatatatataacaaatagaagaaatgtggttttttagcaaacttgacgaacttgtggactggcttggatggagagaagtatttgataattttggacgaaatatttaatatactttttaaatatgcaatattcataatttgagtagttgatgatcacatattgactttttttggaaaataatacttagaagtgatgttttaatttatattaaaaaattaaataaataaatattaaaaataatggataggaccaatcatagaacactaatattgtcacaattaattatgtagtcacaaaatagttaaatttaaatatagtatccatcgtattctttatctataactgttcatataggactgagctatcacatcattctccatcaacaattctctctcatccacaagtaccaacggaattcataaaagagtgaatatagagagtgagaaaagactagtagtttaataaaaatccttgtatggttagcttttaaaataaaacatctcatcatcatcatcatttataaacaaaatagagagaccacaagtaatcaaaagagacaagctacctgtgcatatcacactgtccacccctagctctcaataccaataatagaaaacgacctccaaacccaagtagttgcggttgataaccataatactagatttagatttaattcacttcatgtacagatactataggtctttactttcaggtgagtacatacctaatttacctatgatgacatagagactaagttgtgaaacaacaatatgcacaaatcatgattatatggctctcattaattatgagtataaccaaaggcaaacgaacaaatataacacaagaacatattttcttgttgtttcaaaaaaattcagcaagatgacgactgtaatttgaatatacccaaaaatcataacatgcataaataattgtgcaaaaatatatttggcacttggcacttggcactcagtgcccagaacaatccagaaaaatatacagagtaagtttccaaattttcaaacattttaaaatcataaaataattagagtatgtctaatgttattcaacccatacaaaatcaagtccaataatcaaattgagtccataccctctcccaagtagttcaactttgtctaaaatgatgattatatgctctcaactctcgagctccaactatttagtccaatattagatatcatttttacctatgacgctcaaatgactaaataattatcatcactgcattctacattcaaaacgagtccaacgacacataacatgattatatttaaagttttaatttttaaaattttatctaagcagtgcacattaactat

SEQ ID NO: 69997 - DNA, 3077 bp, Cannabis sativa
atgttgaaactagcaaacaaatagtagatatttttactaaagctcttgacttagtttgttttatctctctaatgaaatccttagggttttgcaatgtctaattttttgtgtgcttcatggtccttgaatttttatttttacttgatgttcataatgctttgtcttttcttttgttccaaaaaaaaaaaaaaaatctcaaactttagagaattacaatcattatttttattgctaatgcttttagtatcatgatttcatacatgtttagtttaggaaatttttttcactcctcctaggaatatttgaattcttcaaacagtgttgtgtaagctacaatttttgaaaggtaaaaaatgtgtaaaaactatgtgttcaagctccattggaagaatagagcaatctatctcaatgtgtgaaagtcatatttgagtaggttggtactatataattaggagttatatagagaatacactaccattaaagtagtgtgacaacgtctccattggttacatattcttataaaaagtcttcttgacaatttgggcaatgttccatgcttttactttcacacgcatatgcttgatacaatttaaaagaaattgtttaaattagaaaatggtcttataaaattgtgacataagtttgaattgcttcaaataatcttggtgactatgttaaatcatttttctgtgtaacttgtatgaccttattacactagttcattagtttggtagaataatttctgtacattcttatgagtatgattttttttatcaggaacaaagacaaagcaagcatggtgttcattttgttggtaataatattaaagtttatttttatttttatttttacttattatatacatataaatcatgaccgattataatgagctttcttaaaatacttgaaatttttttgtttgttttgttctattattttcttggtcaatttttttttctctaaagtgttgtttggtgttttatgtgcttacgagttatttttcttcttttctctttcatttatttttttaaaaggggaagcataatttgaaaaaataaataaataaataaaaatgggggcaaattttctgtgtgtatttatttgagcaattttttttctttcatttttttatttgtggaaacatgtatttattgcattttttattttgtttcctttttaatttcgattggtcctaggttggtagtttttttttaaaaaaaaaaattgtggggatttgcctttattttacatgtgtagtttttagaaacaattgtttttaattataaaaattggtttgttggtttcctttttgatgaatttttcgtataaagtaaaaattttgggtaagtgcattatgttttaatcttgtttcacattttgtggggttgagtttttattcttttttcatttttggtaacttttgaccaaaattgagaaaaattttgtgtttccttttaaggtatacgtgaagctcaaggtaagaagtaattagtttcctttttttattttgattttatggatttttattttgatgctataaatatctaactacccattctattctccccaccttacccacgatcaccattatcttctctctttctttttcatcctaaagctttgatcttttatagttgagagagaaattttctaggatttcaaggatcattgcccaaaaacaagaatgttcaaccatccaagaagcttgttcatgcttcttcctctgcctcgccatcatccccacctgtggcgcatgcaccggttactggagctcctgggtcgtcatgtactccttcaaaaactgccaagaaatcaaaacccaagcttaaaagtcgacatacaaactcagttcccctttgatcactgcctcgcctattgcatctttaacccctgggcttggtgatcatgatgaatcctattcatctgatcacacctcgtcgaagtcttcctcttccaaatgtgttcccaatgttgagagattcattgtccctttgcctatggtaagctctcgaactaggtctaaggtctctactccaaagaaacctgaggtggttcagtcccaagaagtctccaaaggaaagaaagtggtgtcctcatcctctagggcaaagagtctcgaagatcatccaccttccatcttttatctaattctgaaccaaacgaagaacctaaggatgaagaataagaatcaaaggctgagtctgattctagtgaggaattaattcaaaaagaactcccctcttttgatgattttgtgcttgaagaagatcctgtcagtgcagcaccagttaccgttcctgctgcacttcaacagaaatacaaaggaaaaatacccatgatttctccaagccctattcttccttggaaaaggaaaaggacctctagtattactcttgaaaacttcaagtctcattctcattattattgttacaatggtcatgctaggaatatgaaattttatgagaataggagctttactgtggagaaaaatttcaatgttattgctcataagctatttggggtgtataatttgttgaaagaaaagaaataggtggatacatcgatcaggtttgatgattatgtggatcaaattttcaaggagttttatgctaatataactgatgagagtctcgatgaggactcctttatgttgggcaaagtttttgtcacgggacactagtattcctttactgtaaaggatgtggctgaagctcttcatttgcctattggagtccagcctacagaagtggagtttgatcgtcaaaaggtgtttgagtttctcactggtgacaatgatgtggaactctcggacataatgcacatgtctcaacttacctatcatgctgctcttatgaggtttgccctctctaattggtttccttgctccaattcagtaaacgtttcaaatgaacttgttctttttgtataaagtttctattggtgtaaaaattaatttggctgatgtggtttgggagcaaattatctctctttgaaatggcaagaaacctaggcttaatcttatttttcctcatttgatttataagattttgtctaaccaaaaggagttgattcttgag

SEQ ID NO: 69998 - DNA, 949 bp, Cannabis sativa
gaatcaacctgacaatagcctacatcagagtcacgaaaagaatatccaacaagaacacgtcgaagtgcagcatggccctctggagtatccaaccatgggtgacctggaaaggttcgtggaaggtcctgcatacatgattcggaactaaatgaaaatttgaagaaatttaaaagtgaaatgagaatctgcgtgaacaacaaatatgcattttcaaagtactgagacatttatgaaacaataataaatagacaaagcaatcgaaagcttcaacatttaaatcctcaataatgaaccatataacaaacaaacaagttttcattcatagcattgacatgaatcagacactaatccagcaaaatagtaatggtttataatacacttagcagaagagaacaaactgattttagcatcactcatcaaatccacattgtggtaataacaaagacgcatttgtgttaactgctgctaccagatcttgagaacaagcaaagctaccagaatgtttcagtttacatcatcttaagaatctttctgaacgacttcaaagtcaaacaagtaataatcataattaagaatattatcatcttacttttggttttcaactaaaaaatatttccatgatcggcaatatgcctgaacgtgtcacatgattccatctctttgtctaaaagtttgtagttttaattttatggtcagatgactcgtacagcattaacatattcaatccaagaaaagtttgtgttttgatttgttctaagaataaacatacactaaaatagctcggaaaacagaagttattaacagatagataaaaaaaagaagagaaaaatccaaaagccaccatttcaggaaacaaaacaaaacaaaaaagaaacttttgcaaatggaggcaatagacaagcaacatggtgcatagtataaagctgcccaggattttaagatcaaaaag

SEQ ID NO: 69999 - DNA, 2415 bp, Cannabis sativa
ttttttttttttttgccttttctccttttttttgaacaattttccatttctcttttaatcaaacgaagtacaagaatttaaaaaactgacccgaaatttttgaactcaaatcgttaaatttggtatcttcaacatgggccttttttccatcttcagcagaatcaacagacaagcttttacgaacatcggccctccgtataggccaccccaaatgaggaggcgaggaagaccctttcacttttacatcttccgttgaaatctccgagctcgatctacttgaactagtctctccaaactcaacactcgaatcagtgagcgactcggttgctgcagcagcacccctacttttaccgctcaaaatttcaaacccatctttccgtttcagcgaattctcctttttcttagctaaaacttccatttcaaatttcaaactggtttgaaacccagatggccaacaaaggtaatgagccagtgctacgactaagctttttttttttatatatatagtcctagctacctctacaactactacaaaagttcattcatgggcatggccctcttaagctgagaatttcagataatgtatatgcaatgtctaagactctgtcaagacagtgaagcaggccaaggttcgaattggatttggggtatagaaaactctccgagaagtggggatctcttcgttgtgatactcttccatagaaatttattagctctgcattttaattttcaaaaaaaaaaaaaaaaaagaatatttttcaaaggtgagaagaggggaactgccaattgccacatgccatgctataacggctctcttctcccatacacagtttattttacgttcaaaattataataaaataagatagtagatgaggtggtacgatactccattcaaatttacaattttatccttctctaatattatttgtagatttataaaggagtttttctttttttggccttttattgtgttttgttgataatttttggttgctataaaagctaatacaaaactgtcaaaaaacataaaaaagataagaaaaaaaaggttaacaatgaaaaaaataaattgaatagtagagttacgttagtgtgctcttttaaatattgattcaatgcctagattgcatttggtatttccactactcaaataaatgagtggcactttgtgtagatttcttatactttttaaaataagttagttttcttttctacaacaatgaagtgtatgtatatgtaatttctaattaagtgtatttattgcttggtttgttaaatgatacttcttcgataacaactcattgcaacaaatttatctttaacaacggaatttacaattatgttttccaaaagtgtgatgtgattatggaatatcccttgtattttaaagataagaacaatgctaagcaaaaagccaattgtttcttccctttggagaaaattaatgagcaaattaaactttgacacaacacaattaagaaactttttttttttacagaaagcaattctatggtttaaaaaagtgaaaaataaacaattttttaaaatttttgcaaaagacaaactattctcgtcgaaacatctattcagagaggttttaaaaaataaaattacattattattaggtgaaatatataattagcaataaactaccagtaccacaaaaataaaattgagaaggcactttttcaaacagaaaaataaaaaggggaaattaattagggcataggcgtgagggacgtgagaggacaaaagcaatgattatttaactggtaaaattaaataattaagaaaaggaatgcggtggtatatatggtaaaagttggaaagagggaagggtgtttgggtaaattcatagattcagtttatagctgttttagggcaataggacgaaagttgacggccatttgctttgcgaaaaggacctcatctaatcacttttttgtattctcttcttaacttcctctattgcttgaaaggtgagcttttattatttataactattttttgagaatatttacaccccttctctctcaatctttccaacggaataccaatttagtaaaaactttttaaatatttactatttttctcctctaacttacactagtgatcccccacctaaaaactcaaatgtgtcaaaaatacaagtaaaatctatatatttatataaagaaaagtacaataaatgactttttataatttttttatttttttttattttgtaagaattttatattaatgtgctaaaaaatatgattagtgatattttttttatcaagaaagaagaaactttattttccaaatctaataaccaaatcaattttctactcgataatactggtgtgaaagtgcgatccaatgcagaaatttctttggttattcaagattactttgctgatattttccaagct

SEQ ID NO: 70000 - DNA, 1933 bp, Cannabis sativa
ccaaaggatcttatgcctctccaagattatacaattccagagcttatgccacatagaaggggcaacctcacacgcttcagctctatgtaagacttgaataagataggccaatttgaaagagaatttcccattacgttcttttgtcaagacccatttattttttcctccttgatgaccaccagagggtcgtctaccccctttcagaatagtagaaatagtttcactgttaaacatgaaattaagattctgaatgtctcagtttcttgtgacaatcaagaggtctgccacctttctcaggccacactcagggtaaccattggacttgcggtaaaaagttttaccatgggtcacacacggatcctcctaaatattggtatccttgctatcagtcatgactttacaagctccttctcaaaaggtcaccatctttgaccatattttttgaaaactaggaatctgagttcttgtgcttacaattcaaaaatcctttcctttgagatacttggctctcaggatttcacagcagagagactgactcccgcataataagttccacccccatttggctagaaaggccgtatacaactcataaagtttacgaaatttaaggccacctctagatttggggaggcaaatcttatcatcccaagctttcaaatggatccctctgttataacacatttatttacaacacattttgttatgcattttatttttctcaatgattgtactatgccacctatcaatttctttccgttgtaatcatcttataatcattgcctataaatgaataagttctctctcagctatgatttgagctgagctttctcaagtataattctttttcgtatttttttgtgtcgatctaattgtctaatggtaacgatatataacatcttgtgtacttgaacgtagtgattaatttagttagaatgaaaatttgaataatgtgagaatgaacattataagtctcattgatttataatgatacatataagatataaaaataaaaatttcacaagtgctattaaatatgttcaagattcatatataaagcttatatagatataatataataatagcacatataattggagagaggacttaattaatgtttaaggttgggaagtgggataagccatttgttgccttgaatgtaagtcatactcatgaaaggtttgatttgttcatcggttaatagctttgcatacttgacacggccagaggtgctcgctccaggtcccatgcacttgtactccccataatacacatccctatatacatatataaaaatgtttaaattctatatattcttagattatttattaaaaagatcattaataaatacatatataataatgatatatataatacgtacttattttttccctgtgattggataggccacatgccattagaccatccattaacatcaatatgattgcccatataggtatatgcaaagataactcttggcatatctttccaagcccgacccaagtaagtatcaccatcagctatgattttgcaatgaacaaaagtgaacccactatcttcagatacctttgatcttgcttgggctgtgataacccctgtcagctttgcaaccgatcttatggttgtgttctagttaaacacatcatcaatatataattaattaactaggttagttataaattagtaacactagcttgagcttgttactaattagtatcataattttaatattgatatttattagtaccaagtaaagtgattgtccattgccgaagatgaaatctacggtgccttcaacatagcaatccctgaagaaatgtctgcccttgtcatcgcataaggtgtcttggaagcctacaaatttgcagttgtggaaagctgctttgtctcctgatatccttagtgccactgcttgttctccattcagttttccctt

SEQ ID NO: 70001 - DNA, 1748 bp, Cannabis sativa
tgtagtttttaagaattaatttaagttattagattaaatcaaaagttataaattattatctctattgatagatattttacccaatacttactgtaatagtccccatatataaaagagcaaattaaagatatataaatcaaagagacaaattttgtttgaggttatatgtgtttatatcatccccacttttaatcctcgtgattgttttcttcaaattgttgggcctgagccatgtttgtgcaattgtacttttcattgtgtctaataatcaatatcaccgaagtgttctatcaaagaaccaaattccaatcctaaactcgaaatcgatctcgttgtcaaatttagagatatgggagccagagcctgaccccgactacaaacccaaactttaacacccgatgccttgctaaagacccggatcctgactcaacccaggatccaaacttgggactggccttgaccttgaccttagacattgagctcgaccctgaatccaacctcaaacctttaacccgactagaatttcaagcttggaccaagaccacaaaaccccaacttaaaaatcaattttgaccttaaccttgcctttaccataataaaacataacgtgacgtttgattataagtaattgttggctttggcttaaagtcaaattatcttaaaattacaaatatataattcaactttcaagagatttagaacttgttatttgtcacatttgtcaatgaagctatgcaatagcttttgacttatgctcccccatttattacatattgtttgaattacctctcattaattacatatagttaggagatgatatatttctcattattaaatatggttaggaggttttgtcaaaaaaaaaatatatggttaggaggtgagattttccttctataaatatggaactctttgaatagcatttataattcggagtagataattcgaggtgtacaatccgagtgcaacttagtgcaatcaaattcactgagaaaatcttgagatagagcacttgtaaattacaactttgggaaacacttgagagatgatataattagtatgaaatttgtatttatattctgtatatttcctactcatgttaataatattagctgcctcccgcagagtaggcaaattgtcgaaccacgtaatgttttattatttaccgctttgatatatatttattgctatctttagctatttatagctactgagcacaacaataatgaaatagaatcaaatagaaatgaaataatttttattttattcttttatttggctacattttaaaatgcaaccaaaatggtagacaaaaatgcataagaatagaataaaatttaaaatacataaaaaaaattgatgaaaaatcattaaaaaatttctcatgttatattgaaattgtttttttgcttcttttttaaataaaatattcattctaccaaaatagtagagaagacattccattagaataagattctaatactttaaactgcaatcaaataaaaaaataaaatgaaaattgttttcttttcaactatttcatttcatttcttccaaccaaacaccacataaataattggacaaagtaaggagtgattaatagcaatataagaaaaccaaatatcatctatatatgtacggagcctcttagaaccacaactaagaaaaagcttacaagtgttacagacgaatgattgagattttcttttacttaagttgtgattacctcctcaactccaatagaagat

SEQ ID NO: 70002 - DNA, 1759 bp, Cannabis sativa
agccaccggagggttggcaaagttgagctgttcagggcacaacaaagcattagtggtaactttaactttacccatgatggttttgatacaataccttagctccggagggaacggggcttcatcgcaagctttcatgtaatccatgaaccctttgttgcaactgtgtcccattcggccacagaagaaacagatatctgggagattctcatatttcaactcgagccagacaactttatttataccagagaagtggacgggaatgccgcgagggagaggctgagcaacatcaaacatgaccctaagccgaaaatagggtccccaagtctcacggaaggaaggcaggtaaatttccaagagatgaccgagggaggatgagacaaggaccgccaattcttccgagcgtttaagaaaaggagtattaaacacttgaacccaaagagggattttgagtaagctgtccccattaagaacatccaaagagtttgggatgtccattaggatagcttgattgagataagtccagggttgttgcagcaaaacccgacgcctatctccatcacaaccaaactcaacaagaaagaggccattggaacgatcagtaataatcacaggactccgagatatgtggttccaatttttagtcattttctccatgaagttcttgcggttaaaagatttaacagtgtgaactttaacaactaagtaaagtgggacatgctaaatctcggtttcagaagtatttgtgggagtaggatcatggagggtttggatagtgcattcagtttctgtgaggttaagagcaacagaaagggaatttgttaagtcatccatggagtgggccgtgtgtatgcaacgataagctaagagaaatactagaccgaagtgggtttgaaagagaaaaacagtataagtattggtaatacagcaccatagagaggttatcgaaagagaaccgctatgaaccaaaagcaatattagacaaagatgtttttgaactataagaacagaatgtatgtgaactaagcgacactgatccaagagtaatgctaaccagggatgtgtttgaccgagtgagtacaacaatggaccaagagtgcaacaatgaaccaaaagtaatatactagtaattgaaaggactatgcaacaccataacaggaagcaaaaaagagtgtacctctgtagataataaaaactaattatattatgcagcagcgtgatcaggtgtgtgcactgagagactaaccaggacgaacaatcgacagttatagggtgtatatgatatatagtgtgtaagaggtgataaggtaagggattactaagaagagtgtaagacctaaaagtggctaagatgcagatgagggggcaacgattaaccttcccttaaatagaaaattccccagatggctggggcaaaccgatttggtaacaatcacatctatggcatttaattcagaacatagatgctgcacaaaggatttgcatatggtactaggcatatcacaaatacagataggaattaatgagatatttaaacccattttgacaaaaagaattaagcctcttctgtacatagatttgaaatggttcccattacccaaaatccccttcaaagtacgaaattcatgcagtaatttaatggggatgccaaacttgtatctaaactgctcaattaaagactcgtttctctgaatcgatttgacagtgaatagggaaaaatggaagagaaattcaatacttgtaaaaaaatagttttaaatat

SEQ ID NO: 70003 - DNA, 918 bp, Cannabis sativa
attctttgctcttctcttttctggttcatctttctctctttcaatatgttccaacgaccatgcttcttcctcctatgcgtttagatcggagcaattatttttttttggcggtcactagttcttcccaccattagagctcacaatttggaagatatcttacttcgtcgtattccaagactagctccacaaattcctaaaattgaaggatcgaccaatatagtacgtaatcctaactttatttgttggatgcaattatatcaatttctcatttcttggttgttatcttccaattttgaatcaataattggtaatgtggtcaattgtaagtcctctgctgaaatctagacaattctcgagcaactattcaacaccagatccaaagcacacataatccatctaatgtacatggtgtagaacaccaagaaaggctctaccattgacgaatacatgctcaagatgaaaagctttgttgatagcttacgtgctactgaaaatccagtttcagatggtctactgattctgtacattcttgctggtgttggaagtgaatacaaatcaatagttgtcaatctcacatcaagggatcaattgagtcttcaagaagtctagtacatgcttcaaaaccatgagatgccccttgagctaaatcaatccacaccattgattgatctcaacaatcctatggccaatcttgctcaatttaagaaacctgaaaaaagtttgtcacttccaacaatggtcgacctctccaacctccaaattccaatcgtggccgtggtaggggaaactactcaaattggggtcgtggctccagcaacagctctagagtcatttgtcaactctgtggtcgacctggccatactatagtaaagtgttacatgcactttgatattagctactctagaccagatgacaatt

SEQ ID NO: 70004 - DNA, 1038 bp, Cannabis sativa
tgatagaccgccccttgatgaatgttgtttgagttggcgatactattaagggaagagcgtgtcataaccgagcagccagtactttcgagatgcacttataaacgacattgcatagagcaatgggtcgataatcattgactgattgggtagagtctttcttcggcacaaggacgatgttggtgtcattgatgaagtcgggaagcctcgaagtctcgaagaagtggaagatcattttcagtacatcaggactcacagtgtcccaatgagaatggaaaaaagccacaggtaatccatcgggtcccggggctttatcaattcccattgcagataaggcttggataacctcctcttctcctggaatggcatttaagttgtcatcaaggcgttcatttgacttcagacttgaccaaatctcaggcttgaaagggatacggttcaggctcttagtgaaaatgctggagaatttatcaataaatagtttggcgatatcttttatttcctccaccgcatttccatcagcatcattgagtctctgaatataattacgccttcttctcgtgaccgtacttgccataaagaatttcgatgctctgtctccttccttcaaccaaataactctcgacttctgacgccagaagatttcttctttcgatagggcctcctctagatgtgctcttgcttccttgtgggcttcgccatcaaagactagactatcttccaaccttttcaacttggtcttggcctcatcgatttgggtagagagccacttgaattgcgatttattccacttggagaggtgctcttttgtggattttagtttgcgatataggttgaccataggatcatggtggtggatgagattccatgcctttttaaccacccaaaatacctgcgggtctcgttcccacatgagttcatatttaaacatagctttcgtgcaaaaccgtcctccttcagtgtctaggagaatcggattatggtctgatgacgacgccgtgagatggttgagaattgcattaggccatgcgattctccaat

SEQ ID NO: 70005 - DNA, 3977 bp, Cannabis sativa
  modified_base (3651)..(3652): a, c, t, g, unknown or other
gtatggagtgaacacgggagggggggggggtggagatccctctctctcaaatggataagctcctatgttggaacgtccgaggagccaacaatcaagataaatagaaattaataaagcaatttattaattctcaaaagattgattttattgggcttctcgagactagagttaaggctccaaaacttggagccttatactcaaatgtatttgatggttggtgtttctcatccaatattgcatggcatgctgggggtaagattgctattgcttggaatccatttcgttttactgttgatatcatcaaatgtactagtcaactaatgcatttgaggatctcaacagttgaggggttcaatagcttgctcacaattgtttatgcttctaataatctaggagaaaggaggattctatggaaggacatttgtgacttgtactcagatgaaaagtggtgtttaatgggggattttaatgacatattggccaaagaagaaagaattgggcatcgggtaagatcttatccggactcggattttctgaattgtgtgcactcttgtaaactagaagatgtaaagggtagtgggaacttcttcacttggaaaaataagcaacctgggacagatagaatattctccaagtttgatagaataatggccaattaagcttggatcaacagatatgagtttgttgaagcagtattcttgaatgagggattatttgatcattccccagctattccatctttgcatcctgcaatggtagggggaaagaagcctttcaaatattttcggatgtggaaatcccaccccaagtatgatgacgaactcaaagaagtatggaactcgaaatgtatgggcagtaagatgtttcaggttgtctccaaaatgaagcaattcaaggctagactgcggctactgaacaaagatgggtactgcaatttactgcagcaggttgaagagacaaaatctggtttggaagctgtccagaaccagataaaaattcaacctttggatcgtatactacatgttcaggaaaaagaacttcgaaaaagacttgtgaaggttcaaaaggattacaattccttcctttcgcaaaaggccaagattgattggatacatcatggggatgcgaatagtgccttatttcatgcttgcattaagcagagattgaggcataatcatattctctccattgaaaatcaggaaggtaccagagttaccgattcaaagttaatatccgtggctttcctggatttttataaaagcttactgggctctacactagagcacaagaagcatgttgagcagagctttcttaccacaggttccaaggtgacaccggaccaagctgattacttgcttcagcaattcaacaaagaagatatcaaaaaggttgccttcagtatacctgcaaacaaatctccgggccctgatggattctctagtagtttttttcaagacaattgggagattattggagatgatacatgtgaagctgtattgaccttcttggactcaggtaacatattaaaagaaataaactctaccatcattaccctagtgcctaagattaaatgccctagctctgttaaatattttagaccaatagcttgttgtaataaaatttacaagatgcaactaagctattgagttctagaatcaataatattcttcctgaaataatatcacattcccaaggtggttttgttaagggaagattcataggacataatatcttaatatgtcaagatttggtgagacactatggtagaaaggcaaataagccttgttgcatgataaaattggatctccaaaaagcctatgatacaattgagtgggggtctattgaagagatgttaacaggtctgaattttcccaaaaagttcattcagttagtaatgaattgtattactactcttagattctctctgatgttcaatggcactcttcatggcttctttgaatctaagtgggggataagacaaggggaccctatgtctcctctgttatttgttttgggcatggaatacttgtttacactgatgttgaaaattggggaaaaagaggactttaagttccatgatagatgctctgatctgaaactcaatcacctagcatttgctgatgatgtccttttattttgtcatggtgattttaggagcattctctacatgttccaggcactaaagactttctcactcacatctggtttgcatcctaatgcaagtaaaactgccatatattgtagtaacatgcaatatgaggttgtgaaccatattattcagctttcaggtttcacaaagcaggacatgccttttacctacttggggattcctatgtgtgggaaaaagatatctaggaaggaatgtgatttgttagctgagcgaatgactgctagaattaaaagctggagttccaggaatctctcttttgctgcgagaatcacgctgatcaattctattttaactgttatacagatttattggagtcaaatgatgattttgcctaaaaaaagtactgagatcaattgaagccatttgcagggtttttttgtggaaagcacaagctcttttccaaggtggaggctcagtaacttggaataatgtgtgtcaatcaaaggccttgggtggattaggaatcaagaatagtgaactttggaaccaagctgtcatttgtaagtacatatgggcaatttcaaacaacaaagaaagcttatggcttcggtgggttcatagtgtgtatatcaagaatcaaaattggtgggactactcttcttcagtacatgcaagctggtattggatgaagatggttgccctcaaagatcgaatcaaaaccctcactgatcctactatgttccagacacaaaaatacacgattgctgcaggttacaaactgtttctgcctcctttggaccgactgaactggagtagagaagtctggtcaaggctcaacactccaaagcatagtgtaatcacttggatggctatgcttaatagactgaaaactcaggatagactcattcggtttggtattcaggtcccaggttgctgctgtctatgtaatgcagatcctgaaagtagccagcacttgttttttgattgtaaaattgcaggtgactacttgagttaaagaattggttggaatggcatgctcaaaccagcagcctccctcagctgattcgttggattggtagagctaaaatgtcaaaatttaaaaagggagtgctagctgctcctacaactggattggtatacaatatttggaaagctaggaatacttctgtttggcaaaagattgtggttaacccaactacaattgttgaagaaacaaaatggtctaccaagactcggattgagtatttcatgcctcagaaaatcagtggcaatgataaggaatggttctttgcattataatacaatacaaaatgtaattatttgtatagattgatcatgatgtacatagttcttggccctcttagggtgcgaataggatgtaaaaattttgtttgtgcaatacaactcattgatttatcaaaaaaaaaaaaaattacatataagaatggaaatctattcacttttaaaatataattgtattatatttattagatttttaaataactattttcttaagattaaaatgttatttgtatatatanntttttaattttttttataaatatgtgtggactgaattggatcagttatttttacatgtcaaatccgcactttgcaaattggattgaatcgtggaaattgaattaaatcggctattttatgaaccacattcaaaagtgcaagttccaagttacttttaaaagaataataaaagcctaatatattcaaagaccgtgtgattttataaaaataggagggtttattattcaaaaatgctcgaacatcttaatacactcaaccttattcaaggatacatctaccaggttcttttcataaacaaaatcaaagcctaaaactgaagtacctt

SEQ ID NO: 70006 - DNA, 1108 bp, Cannabis sativa
ataaaaattaataatttttttatcattttttcttccattttaaatttgattcattcctattcctatttcaattcccattcatattcttatatttttatttctcctaactaaacaccacctaattatgtttctttataattgaccatataaatttaatttgactaggttttactaaaattgtttaattttcttttttttttttagtggagaagagggaatttaaatttgggacttaaagaagaagtgtgaaactactaaaacacatgcctataaacacaaaattacttaattttaagaatggtttgtgaagttcttttagttgaatgtttttgctattacctattaatttatgtttctagcaagaaaaaaaaaaaaaaaacctattaatttatgtatatagtggatcaaattaagcacttataaaagtattcacctgaattataattcaatataatacgttgacttacattacacatataaatactctacaactactcaaaaagtgtgtttttatgtgatatttgtgtaccaatatcatatcaaatttcatgatcatgcaatttaaaattcccacgattagttgttcagattatgaaaaggtatagcatcgatcttatacatgatttgttttctctttttctttttcatttccataggtatatgtttaaatatatatatttatatatatatatttatatattcactattcctttttggttgtcacaattcccatgtaagcatctatgcaatgttttagcatcaatactccttgcttaactgtatattggttccatcaaagcatcaaatatatctacacttactttttagggataagtagacagtattcccagaatttacattatttaaattaatatttattatatttcctcaataatagttattaagtagtaagtgtagtcaaaataaccaaattatagctctactttggactaatgtttggtgattcttagccattcaatgaagtattaatatcttataaaaaaatgtttacagaaaatagccaaaacatacaattttttttttttctttttacacaaatttgatcaattcggaatccacttaaaaatgtattaaatcatctattttt

SEQ ID NO: 70007 - DNA, 2305 bp, Cannabis sativa
aaaattatccacaatggctcatcttgaatggcaccatatctaagtgtacctggctttggtttaacagggtggtcacttgggtcagtcaccacataaatcttcccatctctgccaccaatggcgtgtttgccaaatccaatggcacaatcagctaatctcttcctgtttttctcccaattggggtcacatctccaacaatcatcaatggggttacctgttccacatgataaaaagcctaaattccttcttgactcattaaggctcctgcaacaaattaaaaaatatcacatattaatttcatttctttttttgggtacaacaaacaacaatgtgacataatataaattaaaaccattatatctctatactatacatacttgtgtacttcttgtactatgagttcagggtcttcaactggggaagaagaaatgagtgttggagaaaatgagagtagtgaaaataagagcattgccattgttattgttgccatgacaacttatgaggatttttctgacagagagaaatagatagagataaagataggggagcagagattctttagtgatgaaaattgagaaaagggtgtttgtttatatagggaataatcaagaaaataagttgattattatatgtatatatatatatatacatatatattattgttggggtccactagttccatgatttctccactaaatcggttccctttgatagtttgggccttaagcaatctatctatgttaacaataagctatgttagtgttataataagaacttgtggtttataaaggtcatattaattaaccatagtaactaataaataaccaacaattaaatcataaatacatagtgatgagattcatttgggaaaaaattggcactcattttttcaaatctaatatacattgagacaaagtataactatacacaccgacacttttcaatttaattttttttactttgttttttgtccttgtcggtgtgtatatatagttcactatataatgctgaaaattaatatttttatttatttaaattatataacattgtatttttcactaataataataggagagatcactcaataatctcaattatagtactacctagctagctttcattaatggaatgtgtcacttctcaatatggggctattatccttaaaatcattaattcttaattaatcgatatatgctttattacatctttattttttcgagcgttataccatattaatggtttgtatttttttcttttctttttgtcatctttaaaattaaaatcattgcattctatttatagaatctttcataaatgaggtttggtagacctcaaatataaattgaatgaaatgccgaaataattaataaaattttctttttgagtttttggatatatatcaatcaatcaaatattcaatataggtacactacacactagtccttccttagaaaaactactcattaattaattatgtagcttctcatttttttatggctaacttttcaaatgaaatctccacaaccccacaactgtatttttagactaataaataataataataataatataatataatataatagtttgtatttattattcactcaagtatatttatgttctaacatgtagaatagtacttggaagttggaaaataatggagctatagctaggttaaacaaaatatatatagttataatataatatatgtatgtatgtatatagacagtagtactagtctgaagaaaacacatggtgtatccgtaaagctcgtaaagagaagaagtacttgaattgaatatatataactgatcaaccatatatataaagatatatatagtcacggtggtgcaaaaacgaatgtgatgacgtgggaccaatattatgatgacttggtcatcttctacgtatcaatattttcaaataaataaagccacttaagaggaagactattatagttagtttatactatatcatcatatacatacactatatatatatatatatctctctttcataaagatgaggttttagggttattcactagtaaatgttaaatttggtatcaaataattattaatacacaaatgataaaattctaatactataaatttttttctattgaatcttaatattaaaagttacactaaaattatattctttattattatattattttattaaattattaataatcacaaataatgtgtataaaaagtttaattaatattataaatgtattatttaaatattaaaaattaataaaaaaaatttagtgtaatttatagtgtaaccttaatattag

SEQ ID NO: 70008 - DNA, 2064 bp, Cannabis sativa
atatatatttttaaaattccctatgtatttttcttaagtgtattttgaaatatttgaatattttcaacttttcaccaatactttttagttttaaaatgtaaaaaaaaaaatgtttaaagggaaaaactaatcaaggtttttaaactagctagggctggatgtccatctaaggatagagatattagaataatatgataaacttttgtgatctatgccaaataaagtatttattagacttaataaacttttcagaaatttaaaataaaataatttataaccacaatataatatatatataaatcagtgtgtgtacacttaaatatcaagaacaaagaagacaaggattccagagtctccagtataagcccacaacttgcacatactctattatatattaattaatataataatctatctactttattatttattatttgtttaagtataattaattatataacttgtatcaatttacattattttatactcctcacgagggagtagaatcagaatatcagatgatatattgaggaagttgatattggtatataaatatttatatatatatatataaatatttatatgcaaacgtgagctcaatcttagcatcaataaactaatgtttattatttccttaatcttataatattgtttaatattaggagaataagtaatataatatcaagtgagaaatgcttataattgaataataaacattggttatgtatttaattaattgtagcttattcgaacacaattattattataatattttttttggtcaaattacacgagaataatttgaacaattttcgaatgaaaccgattaattgcattacttgaagagagttattattacaataagtaacctaatacagctaactaaaactaattaataaatacccatgacaacatatattctaattaactacctaactatgttaactatatacattgatgtgtccatcttgctcatttgagtattgagaatgagtaggaaaatgccttagtaaaaatatatgtataagcaatttacaataatgaatcttcttgtttctaagaacatgataatcaatcaatctttacttgctttaatattctcttgtaaaaaaataaaggtaatgtctaagagcaccttatgagtgactaataattttcatagtaattataagaaaattattagagatgttatctcattttattgacatcaacaataaaaatgtggtgtgtattacaaaaaaaaaataccctacataatggggttgaaaatacataaagctagaggcctaataagaaaaaaaaaaccttaatttacaaattttaatacctccctccctcttaaggtagaatgtatagatttttaaaattcatctaggataaaatagattgaaaataatagggaaacaaaggttttgtaaatatatcagctatgttattcttcgttgtaacatgaatgagctttaatttgccctcctgaactttttcttagacaatatggcaattgatgtcaatatgcgctttgttcgttcgtgaaatatggggttctcaaatgaattgtggttatattatcacagtaaaggacgattggatcttcatgtttgatgccaaagtcctgaagtagtgcttgtagccaagtaatttcacaagtggcgttgatcatagcccgatattctgctattgtcgatgaaagagagattgtagattgctttttggacttccagaaatcaaagattagtgtcactacacgaagcccaatcaacatctaaaaaaattatagggtgaaaatctatattggacatgttagtttcaacatatccacataaattagtgagagatgctgaatgaaaaaacaatctctggccagaagtgcctttaaagtattttagtattctatgagttgtagtaatatgagaaggtctagaattagataagatttgacttcttataacaaaagaaatctcagacgtttcatagttaagtaaattagtataggaataatactatagtaaaccttcgaatctttcaatggttccccaactgtaacgtccccgcttcaagcctcca

SEQ ID NO: 70009 - DNA, 3520 bp, Cannabis sativa
ttcttatattgacagacatttgcaaaaacacggtttttcagaacgaaataaatatcacatgtaactttatctgagccaagtcatttaatgttctagaaattaagtacaataataggagtgttacggttaattttttattacaactttttagtcaattttgtgtttgaagatacatgtcaaaatatttttgttttaacttttttttatggtggtattcattatagttacaacaacattcttgtaaatttttaaaaatttagaatagtttacagtgtcgaaaaataaatttaaagttttttgaacgcgcgtggtaaactgaaatatcaaaaattttattttcgatactgtaaactatttagaatttttttaaaatttacagaaatgatattataactataactaatgccgctataaaaaaattgaaaaaaaaaatattgaggcatatgattacaaacgtaaaaattgactaagaggttttaattggaataacataataatattttttttaattttaatattaaatatatatttatatatactattttttttttggaaaaaaaaaatgaatattttcattaataggtatttttttaacaaatttatatatatatataaatatatatttacttactatctcaaacatactaaaaatttgtaagttatatttcaagataatctcatataatttcaataacacatagataaatatgtagtgtgtagattgtagctacatattatgttatttttatttatatattgaatctgatttttatcattattaattaatttagatttaaacatgtaacttctaatatgtgtatatttatatattgaaagtaaaaatgaactcaatacgaattattgtgagttaggattatgcaaaaataaatgtgagcttagtgacaatattatttggcttaagttagggtaacctttgtgataagaaattgacacaaattgacctgtttatatttcgtatcattaatattattaacttttaattaaattgttatttatttttatatatataaaaaaaagaactgaagtagaaacaaagttactcataagatgacttatttacacttgacatgaaaacacttgttcattgtattcataataatttacaatttgcaatttatatccttttatttatggtattattaatcaaatgagtcaaagataaaattaaaaatatatatgaattcaccaatgatgttgatcaacatgaaatgtaaaataattatagtcgacacgcaaatacgattagtcaagtttggattgactaactaaacatgtcaacataggaagtttacttgtatgttttataatcgatcttctcatatatatttattaataaataaataatttaactgtatattatttgggagcaatatatataagtaatattaagaacacgcatttaatttatccacactaacaaatcttacttacaaaattcaatatatagatatagttattatctctatacattacatattcctacatgattaatcaagattaaagccttaaaacacaattatatatatgtatactaatatagatgatattggtgatgaagatgatcataatatataagaaattaatgtaactttttaatgatgaattatagtgaaataaatataatgaaattaattaatataaactctagagtacttaatgggtataatggctatgaaaattgaaagaaagtgaaagatggttatatggcattgtaataaaactaacctataaatcacaagtgggttttaattcattataacatcctacaaaatggtacccatctatatctatgagtaggtacatactgaccacacaaccacatgaaattaatttataattataattaattaaacctatatatataatgaaaatgaccatatattatatatatggatcttatgaaaccatagaaaatgggagcattgtgatatatacatatatatattataattattatattttatgatatttcagtttttggtcactttaccaattataatattattccttaaaatggaaaacaaaaaaacaaaaacaatatctataaatatatataaattattattatttattattattatacatatcaaaaaaaggcaacactgaaacttggatatcctaacacacaatatatatcgatacatacattaatacaaatattatacaattatacaaatatttatatatatatatatatatatatatgaaatgtgagaataagtgtagtgagaagccttttccagcaataatatcccggcagctaaaatgagcaggagccatgctgatcatcatcatcgtcatcatatagatgaactatatatatatcttaataataacctaattacttaaaagttccaaagaaatgaggagtgggaataatgatcatcatgatgatcatgatcatcattagtagaagtaataaaagggtaattactataataatcttcattatcataaattatactattgttgttatgatcatcatgatgagctggaacagtagtactgcactgacctgatgatgatattgatgatgatgaatactgatgatgatgatgatcttgatcagaaagcccagaagatgaacaagtaaaaggggcaaaatggtcattttcaatattattggatgaataatccaagaaattcaacaaagaccaatccatgttattaaacccatcttcatcactcataataatattactactactgctattattatcattattattagtaatagtagtaatattattattataatcctcgtctgaaacaggttcaccagacgagtgatcaacatcaaacccattagggttttcttgttcttcttctcgatctttgatgatgaaatcattcgcaaatttagctgcaacgacttgaatctcatgaggactcaaagattgtccacctggaatatcaggtggactttctgggaaattgaagcgagcgtgaggacccctcaagcaaaattgagcggcgtcaaaagctctcgcagctttctcagccatatcgtatgaaccaagccatatcctctccctgctattgggaagcctaatctcagaaacccatttcccccattttctcaatctcactcctttgtattttgggtactcatcgtgttgttccataaaataataataataataatttatgtgttttctatatataataataataataataataatttagttgtaccaatcatgagactcatttcatctcatatttatactcccaaaaattcttcataataagaaaatgagtagtgtcacagtctttactgtctttctcattgattttttctttaaaataattttttttgggtcttaaattatttatttatttataatttataattttaattatttatttttagtaaacgtgtggattattattcagtgtaagatacgtggtcagtggaagagagtaatttttgagtctgagtatgactagaagagacgcggtgggcccactttcccatttacccaatttcaccacgtgc

SEQ ID NO: 70010 - DNA, 2005 bp, Cannabis sativa
aaataaataatcagacataagtatcgatcaatgattttctcatttcatccacaatagcaccaggttgtccctccctcaacttgaagacactctctataacagagagttcagttgcagttgtgtccgagccacagaaggccgtccagtcattcaccgtcatgccagctgcaatcacttcactccctcggttaaccgtcccagcaactaaagggacttgaagaagagttgaaagttcatccaagtcttcaacagatgtatgggggtgaacctgtttagacagaacacagcagaatttttagttgttttgatcgaaaaaaagtaatgaaagccttcaatttacaaaatatttaagcccgggaagagtttgattttgttttcctccttaccaagccacctctgttggagaaggtgcagtagcttccgactagtatgttcccggcaattgtctgcctgaaaacttctactccaagaacatctgctatcatctcttcggtttcctaacaaagttttggcacaaattaagaactgaaatggtacatttgggaatatgttattttaaactaattttactacaaagaaactataattcagacttttgaaacttttatatttaaacatcagaaatatacacaacacatattgaaactaagaatgtattctaatatctacaagcatagaatttactaaatctaaaactattttttcagagataaaagatttgagtaatacaaagacaataatagcaaacaatatatacatataaatatatgtttataccttgtcaagatcagtgtgtgtgagagccacatggtcattacatgctatacaatttccaagagcagataatttctcttcaatgcgttgaacaacaacttgatcaggtagactgttccttaagtgttgaagctctataataataacaatacaaagattaattaaaaactatagaaacataatcattgaagtttatgttatgaatatgcaaatgtttatacatgtatagttatatataccttggtcagtggtattatgaggtaccaaaagcccatttttgttacctgtaaaagatcaaatctttgatataagatactattcaaaaacacgaaaccaaacatttttactcactaatttttgattagaaagaggattaagggaacgaaccagcacaaaggcgaccgatgattcgagtgccggaaatagaggtcttcaccacaggaatcacaccagcaaactccgattcaaaagtgctgttgttaacaaattcatcgctttcagtttcaattattttcatatatacgaatcaaaacacagtaatagcaaacttcaatcatacctgtagaaattctcagagcctccaatagcaaccaaacagtaagcatttgtgagcttagagaacactccaacttcgcacgagttctcgaattgaagaccttcaagttcaacagttttgttagcaaactaaatcaaaatgaaaatcttattacaaacaaaggacaaaaacaaaaagctactcacgaatggccatgttgtatgttggagcttgatcacaggattgggttaacgaaatggtgttttagggtttaaagagttttttctttgagtggatgaaagttagggttttgaattgaaaagatttgggaatgaatttgatttgattatataaaggagaaaactattttctattcctactgtaatgaggtccatggaaaaaatatttaatctttaaattttgtaatgactaattttcgttaaatattcttttagtgtaaataaatatttaaatttaatttttaatgttaataatatttaaattatatatttttttttgaatgaaaataatctttattagatagaaacatttgctaatataaatgcctgaagagcaaggggaacatcacttttagtaaaacgacgacctgaccaataacaagcaccacatgctatacagtgcgcgactttgttagcagaccgtttaacatgaccaatagaaatattacttaaagaa

SEQ ID NO: 70011 - DNA, 1834 bp, Cannabis sativa
aattggtaacttttgtaaaatagagggtccaaaatggtatttacccaaaaaataatagtattttgattaaaatactattaaaaaaaattagcaaaaaatagaaatattttttgtatgattgaagttcattttttaaacctcactccgtattttagtattttagttaagaaatatgtttagaaaatataattggtgatactctaagctagaaattagtgtacctagtaaaattaataaattatagggatatttgtgacaaaacttctataatatttataattgttacacataagatcataataaaaaaaaaatgacagcaaaagtacattctcttataattttgttacagttgtatcgttttgtagtccttaaatgtcaacttaaaaacacatatcaatattttattagacaacatattaaataagttaacaactaaaaatggtacgactgtaataaaattataaaattaaatatttttgttgctatgttttattaaaattatacctataataataataattattaaatttttttaaccctaaatatctctaaattatattaattaaatgtataaatcacaattaatttcgactttaacttgtttgaaaagaaaaagctcgccaaagatctccaataaggtgaacagaagacacgtagtctacgtggctatgacacgtggaaacaagcggacagtcaaatgcgctgagaaaaaaaaaaactaaaaaggttaagactaaactcagactcagttcggttgggtttgagcgcttcaatgcaattttctcattggcaacgaattcctatgcagttaccgccgtttcagccggttacttcatctctacggtaacattctaagttctaaccctctcataatcctcttcaaagtccattcattatagactcagtcctctgcttttctttctttgaattttctgggttggtggctgtatatttcggccaacttgcattgcgttgattttgttactcttctgtttctcgattccgatctgggtttctcgcggttttaggatttcgaaactggtttgcttttcagttcctttgttagttccgttgacccttttggcatttttttctcttcttgtttcggtatgacgtagctcgaattgagaaaatcgaatttaaggaaaccgaatttgagtttgaggaagaagaagaagaagaagagtaagcggcagagccatggatattacggaagtatcaataatacatcacgtggggatggtgctactcggcctatggtttcttgctaaattcaattggtgtcaccctgtggcctacttcatttccctggtttatttgtatctggtactattttcactctttaaaaaatttatgctttttcttcaatgattttctttttctttacaagttttctattataaaattcacaaagtaaagtactatattattctctattgtacaaggaatattgtgcgaacatatttgtttatcttttaattcgatcgttagacttcgctttccaagggtgatttttttttttctttagcaataaatttatgtatgttcgaagtgggttttttctaaactagtgtttcttttttagtctaaatggagggctttaaatgatcgtttgatttgtctttttaataggttcatgagcgctatgttatgcgattgaagaaaaaagtgcagtttgaggaaagaaaacaagctaatcagaaaagggtaagtttttatttatgaatttatacaacttaagttgggagttatgaatgatttctgaattgtttttgcagcatagtgcttttttccccccttttccgttcttattgaaatttttatttttttattt

SEQ ID NO: 70012 - DNA, 1069 bp, Cannabis sativa
acattgatacctataatagtaatatttcttttttatttagtagtgctaactttaacacttgtgtgaatacataattgggcgaaatcttataatataagttaattaatttgaaaaaaaaaatatttaatttagaaaaaattaattttagaaaaaaaaaataatatacctattatttatttatatttaattaacaaaatgaattagaactcaaattaatgaactagttcattaataatctattgtggaaaaagttagtgattccttctcaaaactcaagctcaacaatatatttgttgttgaagaggaatatgatccccaatataagaaactaatgttttcattaattaacttataaataatgtgtttttacatataagaaactaaagaaattaatcaataatatattatgtatttacattgattaatgttagaagctggtcatcttaaggtgcatgtctcccattgtataatgcagtaccctacatgtaataaaatttaaaattaggtttgatttattatatattataattttttcttttttttttaaaaaaaataaatagtgttagattagataacctaaattatacttagttaggagtacttagatgtgtccatgaataatattttgtcattatactgttgtaacatgcaaggcattactcaacatatgtgaacagacaacgattttgactatttatcattacaaatatattggttttaaaatacatgcatacaatttattaaacttaaaaaattaaaatttctcatttctaaatttatagttatatgagattgtcttttatttcttgccaagcccgccggccttccctagctataggtgcggtttgatcgagattatattttgctattgcaattaaacttttgctactacgattcgtcttatctctgtaacataaatttgattgttttagtcttgtcactaggggtgtgcataaatcgatccaatccaatgagaatcaaccgatccaattacaacctactaattaatacttgatatccaattgtgactggatcggattgaatgttatttttaaatatctaattggat

SEQ ID NO: 70013 - DNA, 1192 bp, Cannabis sativa
tactggtcatttttcaagccaagaaagattgtcatggtaggatcttcatcacaagaagaaacggaggaaataaaggccaaagaaagcaaagagttgaacagggttttctttacctattcaagtgaaagcagtgagagattttatgggttcggagagcagttctctcacatgaattttaaagggaaaaaggtcccaattttagttcaagaacaaggtattgggagaggagatcagcccattacttttgcagctaatttgatcagttacaggtaaaacattaaagattgattcttacaagcacggatttacatagttgttcttgacttattaagattttattacaaattttaacaacatttaattgtgggttttttatttttcaaatttaatggctggatttgttccaagggaaaccaatgctataaacccatctgataaaacatcagattttgattttaataagttttcttgacatttgcagggcgggaggagactggtcaaccacttatgctccttctccattctatatgacttcaaaaatgaggtccctttaccttgaaggatatgaatattctatatttgatctgacaaaaccagacaaagttcagatacaggtaagaagtttagatgacttttttacttacacttttgtaggagagtaataagataccaatggatgtattaaaaacacacacacacttttgaattatgaccaatagcattactttgtactgatctcattatgtattttgtactgatctcattttgtaatatgtagtaagtttcgaagaaggtaagggttggcttttttctttagaaattagtacatacatgatggcttaatgcttatccaagatcttaaccttgcaatgtttaactttgcagatacatggaaattcagtacaaggacggatattgcatggtaacactccttcagagctcattgaaagcttcactggaaccattggaagacctcctcagcttcctgagtggataatatctggagctgttgtcggaatgcagggtggcacagaaatggtgcgccgagtttgggatcaactcagacaatacgatgttccgatttcagcattctggttgcaagtaatacaaactactaaatcaagtttatgaatatatttttctatatgctgtactgcttatatatttatgcctaccagcaaatgcatatata

SEQ ID NO: 70014 - DNA, 1372 bp, Cannabis sativa
caacaacaacaacaacaaagactagatatatagttatttgataagaaaggtattaaggtggctgttccctctttatgatatctatgtacctatatatatatagttggttactacaaaaccaaagctgtaatctgggctttctctgtttagactcttctgattcttttctttctttcttttgtagttcctacagtacccgttttattccaaaaataacagtactaatacaaaaacacactgagaagttgaaagattctgatgtatatatcctacttgtggaccctactcctcccatcccatctcttcttgtagttctcgtccttttaaagtcaaccaaagttcgatccaggaagctgactcttttttttttctttctattttgatgaaatggtttctctaaaatttaagaaatgggaaaatcttggaatcataactttagttcccaaaaataaataatatatttatatggttgaatttcattgggtgatgtgaaacttggggctttagatcagacttttactttgccacgctatcttccctctaatggtaatcataattatgtgttattaattttgttaattaagttgtacaaaaataataattcgctgtaacattttatttaatcgtatataaacgctgcctactggcgccaggcacgctgattgtgttgagtttgtctcccggccccttgtttataattacttaattaatacatttatttctaaattaagatctattttttatttaatcatgcaaaaaatagtaatttagataagatctatttgctttaattactatgcttaaatcacatttcacagagttagttgtcaatctcatcctatcattgcgattagtatatatatataaatatatttttcccatgggatggtcctacggtgattgtccttaatgcggcgaagattttctgtctaaataagaaatggagcagagacaaaaattattttttgtccccgaatgttagacggaatgggtacgacaatgatactcacagcggaccagtttgatattttattttatatttctaataatattttatattttataatttgtctttgtattttttagtatattagtattcttttatgaattttacactatgttttagataataattaaattattaaataataatttatgtgtaatatttaatttttatgtagtttaatatttttatacatttaaatttttattataaactttatttttttattaagagattccttacctgttttaggagattttctgtcttatccccaataaaaaataaatgagaataggaattaaaattgttaataggaataataaggatttgctcgccaatttttcactccatgaacatccctaattgcga

SEQ ID NO: 70015 - DNA, 1988 bp, Cannabis sativa
  modified_base (49)..(65): a, c, t, g, unknown or other
agtttaacataatattatataaaaatataatatataatctaatttaatnnnnnnnnnnnnnnnnnaatacaatacgacttaatacgacgttccaaatgaacccagtatatatttgtaaatacaaatataatccttttatattattggtgtgttattttgaaagataaatatatacccacttattatctcttatgtcatcaatcatttatttgttttaaaagtcaaaatgttaaagttttgtaaacaattttagaattatcttattgtgttgatattcatagaaaattataaatttacataataattcacagctatttatatcaagagtagtcctaataacgtaaacatcaatgtttgacatgtaacaagaaagattacacctcagagttgagtagtcccgagccatagcaaatcgacttgggaggggtccctagccctgcacccatgttgattttgggaactccggaatggaagtttaaacttcaataacttgaatcaaactcacttggagcagtcaaagccaatcaccgtgagctgaaattaaatgaaactgcaacctagaagccaacttgggcacctaggatttcaccccagcgcccaggttaacatttctaactagggttttagttttcgggaccgtcttagtgcaaaagggtcaagacttgtattgggacatcaactagacataccacagacatgtttgaggcatcaaaatcagaatcagagcaagttatttttgagcacccagggccccgacacctagtgcccacaatctgtcaatctgggcgccttccatatatcaaatcggagatccaacttttgtatcttcttagtcttcataaaaaaaacaggaacatatgtcttttcaaaaaagaaacaacatataaaatatacatatatatttacactcttaatatagaccaaaaccgtcttctcatgctgaaggagttgaataaagttaagcacgagattacagacatcgacttcacttgaagatcgtttgtaatcatatacttaactttttctctcacaatctgagtcacagatgatgacaatgataatgatctcacaaactttaagagtttattcattaatctctcacaattagtttgggatcctcaattacatgcttgttatgacaagtagtagcataggtgtacgagatgaagaagcaaaatatttactattacaactgtagaactatttcgcaagaatagtgatagaattagggtttttaaaacataatttatgtaaacaattagataaattaggttagagaaaacttatagtgctacatcacttcttttgtcttctagtttatataaatacatatagagtgtcaattaatttatttttatttaaaaaatttattggtttataaagtatttatgggattaaacaagcaacaaaacatgtttgtttctgaataacttattaaacataacttataagtgacacttttaaaatattattgagtgagattttataataagattctcatttaatattatttataaatttaataaatgaaaccatatttaaaattagaaaagaaattaaaaatatactgagaaagaaaacatttttcacattgcatgaaagtaaaatagttcatcacattccattgaaaaaaaaaagtaattgaagtccacaaagctaatctcttttcaaagataactcattgtccgaagtctcagttggtggattttcatggtttttttcttgattgtctaagaagaaaatatcgaatcctacttattttactttaatagatattataaaaaataactaatcaattatataacaacactttataactgctctaacaacagataatatatgattactggaaaaatataattgtgtagactaaggaaaaagtaagaggttgatgttataagacacatcttctcaatatatttattgggatatgatttttgtcccgtgatgtactttacagaatgtattccgtggtacattagatgggt

SEQ ID NO: 70016 - DNA, 2283 bp, Cannabis sativa
aaggtagttagggtgttacacaactacttgagagaatatctcaacaattttgaaatatctataaccacttttcaaatttaaatatttacctaatttcttttgaaaaaatattaagccattcggaattgaccagccccttatctagtgctgatttcacatgctcagagtcgttctaatgattatcccaagtcaaattattacctttaataggtaattcaaacaactcgttgtttttgattaaactcaaaataatctgaatgaaagagtcccttccatgggaaccttttctatctgaactcgagagaacaaaattaacatcccaaaataataagccaaggatccccaaatcgagctcgatccaagacccaaaagctcattccaaaatcgttgtttctcatgaaagtacagggggcataaacacatgaggataactaggggtgatggaacagatccgagtagataaaactaaaaatttgattcttggaaacccgaatattctcaaagacaaagccctctttccaaacaagtaaaagctgacccacaataccaacaaccggaacattaatatgaaaataaaagttaaattgtttaagggtacgtactagagaagaaacttccacttgcacttcagacaagaacacaaagtcaggattccactactgaatgagggctttaagttccagaattgtagaagtctgccccaaccctctataattctaagcgaaatctctcatggctcttgtggatgatatgaaccaccatcctccacagggggacagccaacatagcgccactagcaataggtaagttaaaattgcaatcctttcccaagtcactaggcaatattaagttagtgagactagcttaagctttcctggtagtaagtcttatagggagacatgacgaacgaaccttcctagccgaagattgcaaagactcatcatctctgttaacgcatattattttaaaccaaattaatagctttttttttttttaaaaaaaaaaagtacttttttagggggcaattaataatgcaaattttcaaaaacaatctgcgttaacaatttccacaaacggtgttcgactggaggggaataaaagacataccagcacgaaggccaaccttcatggagtgaagagcacacggagcaaggatctgggaagagttagccacatttgtatcatcttcttccccataaagatcaacaaagccatacttattgcgaataagtttctcaggtcgtgagagatagattaataagtttccttttcgctttagcggcattttcaatactcgaaaaagttataattaatgtaatatataaatgatgttgtaggttgtaattatatcgcacaaaattttaaataattttaccgtttccataaaaaggttttttttatttttattttacattaattttaaaataatttttttttgtattttttacataaattcacgtaataactcacatagcaattaagagaacaatttaaatcgcaactcatatttatatagcaacccacataaatttaacgcaatctaaacggtacaaataataaaaaaaaataattaaaaaataatttctcaaaatttaaaataaaataatgagttatatatataaatatatatacatatatatagacatgtttaccctctaactatttgaatattattttttattttatgttcttaaacttaatgaaaccttgtagaataccctcacatttcttttcctaaaagaaaatatattttttttttttaaatttcaatcaaactcgattctattatcagattttaatcatgagttatggcttgatattcatgagtgaacataaaataaaaataaacattaattaataattgaaacataacttctacaactacaacattcatacatttttaccaaataattttctacacatgtgtgtttgagtttgataatcgtttcctttttgtaggagtgaaaaaaaagaatcataaattttactttcaaatatacatttataaaagtaagataaccaaaatataatttcagtatatataattgtcccttttttttgatttaagcgtttatatattacaacaatgttttacgtgggactcgaacccaagacccccaacactcacacacccacctatatataattgtcccttgctttgcgtacatatagatttaatcaattaaatgttgagatatatataattttgtctaataaagtgattttttttataatttcaaaataaaagtttcctcatctattaaattaagggggcgtttggta

SEQ ID NO: 70017 - DNA, 2945 bp, Cannabis sativa
tttatatattacatcagcataacctgggactcgaacccaggacctccaatacacacgcaccccctatggccacttgagctagcctcaagtggttatctcaaaatatctgtcacctctatgccccattcataaaaaaatgacactttgtctaattttttatagctcacgtgttctcaattttcttaaattgtatttgtttgtctgttaatgtgagaacacggttttttaaaagaattttttttttttttgacatttagaatttttataataaaaatgataattgtagtgaattgtcacatcatttcaaaacatctagaatttttattttattttatattgaattaatcaagagaaatataaaatatattatatttttactaaagtactctgttaaaattaaactaatacctaaaaataattttaatattgaatattaaattaattatttttaagaaaaatataatgtttttcaattttatgaatatgttgaaagtttttcaacaaagaaaatcaagaaaggatttctccatccaaagcatattaaaataatagcatataaatagtttcataacacattgtcaaaaatttaaaaaattaactcattgataaagattattcaaataaaaatagagtcaccatcactatagccctcatcaccgttagagtacattgccaacatttgatatttatttggattcttcatgtaaattcaaatttgatgaaacttgaaaatacaaacacttagttttagctaaatattcacattacaaacatataatatatatgaattaacatacaatttttaatttcatacttggccaaaataaaagtatggtgtgtctagacaccacctgcataataaatatataagactataatatttatatatatatatttatatgaatgtatatataacatatacatatttatactttaccctttagttcctgaatttgtttaaaactatttatctttattttaatcttttcaagggaaccttttagtctatgggatgtaccactaatctttcctttcatttttacatcctttactttgctatcatttggatttctcacatcattcttgtaagtttcattagagtcttcaccttgtatgcatgcatcaatatcttccaaagcttcttttttttttttataactttgtattgcaatctcataagctttctcagttagtgatcctcttgttgagatttgagtgctaattctactcaattcttggtaacgtcttgtcatacatgttttaagatcatcaagatgtgcatttttttatgtggaagttatcgttcccaccttagcatattttgtccatctttttaaaatatactgagaaggaatttttcctatattacgacaagaaaaaactttgagaacatgtgagcataatattcctgcgaactcaaatttcttgcaactgcatgtaattttgtcatttaatgaatcatagttaacagtatgatgaaaacgtctctcattaggagtcaacttgtatactgtttttgtctcatgctcaagacaaatatccataacacaattatatacttttgaaaattcaaattcaaatattttcaaaattgctggggtgtatacagttgcagcgtgatttagaatttcaattggaagagatggtggtaacttacgttgaattgctctgaagtctttttttacctatttgtaacgacgatcatcaactaatctttcaaaattttgtaaaagtcgcaacatattatgttgatagctaacataatgcttcaaaacattattcatactttcacttcgttgagtagtagtcatatttgcacaaaaaaatgtccctaccgtagaccaaagcccgtttctcctttagtttgaatgtacgctccaaccattcattatccttgagattatatctttcaagcatctttttccatgcttcgataaattcatcttcctcctcatgttcctatatacaatcaccaaagtctgtctttggctttttttctaacattgctgctgaaaatgtgtcaaataaccacataaaagtttcacatgtttcatcatataataatgctgctccaaacaatgtggtttgtttatgatgatttacaccaacaaacatagtaaagggtctgcattcatgattttttctgtaagttgtatcaaaacaaacaacatcaccaaaatgtgaataagcttccttcattttcgcatcagctcaaaaaatattagttagtaaatcattttcttctgcttgaagggcataaaaaacattagaatcttccactacaacaaataccaatattaggggcggaacagtccgctggtaataatccagaaatccgccggtattgccctttagcggtgggtattcgccggtaattccccgctggttataataacccgtcgctattaatcattaatagcggtggactgacacgtccgccggtattaatgattaatacttgcggaccattagcggcggggtccaccggtaattaagcgtaagtacagtataatgtttttttaaaaaaaataaaaaatgtaatacatattattaataaatattataaataattatttaattaaaaaaacatttatattattaattaaatttttataaaaaataaaaatttaatattataaatattttttctatatttatttaattaatttttttaaaatttatattattaataaatattaaaattaaaattaaaattaacaaatccacaaattatcatccatacattatttaaaacttaaaaattaaataattgttatccatacattattaaaacttaaagaaatccaaacataattaaaaagtaaaaataaattccgacataattaaaattaagatacactaattaatattgtcttgatcaaacaaatcatcttcaaaatttgagccagtagcgtttaagttaatatcaggatttggtgcattgt

SEQ ID NO: 70018 - DNA, 4042 bp, Cannabis sativa
caccatgactaaataatctctttccagacaaaattcataaataaaacaatgtaaattataaccataccagataactcagtatcacgtttttgaggtttgtggtcccaactaaccaaccccttcccaccaataaacggaagcataaccggcaaagaaaacgggaatttgtcggcggccatcggacgtggagaagaagacattgaactagaagctccttcagcatcaaacctccggcaagagaaactgctacaactctccgactcactaacgtcggcactcaagctatagcttccgcaacgttcactctgctgatcggaaacggcttcatcatcggaagagacacttcccattgttgaaataataataataaaaaaaaatgaagagatctcgttggtaagtcacattcgctgccttgagccgtaatagtaccgcagccaattatcaccgaaactttcgcttccttcctcgcgtggtctgagaattctgcacagagagaaagagagagaaagaaagaagaagaagataaaaagcagtagtggtggtggtagtgatgaaatgataaaaagcagataaagtaacagacacactctctttctctctcctctctttttctctctcttctcttctctttctctctcctctctttttttcctctctctctcttctctctcttttttttttctctttcttctgtttttttttttctttctttctttctctctctaaaatcaatgggatggggattctcactctactgaaaaggaatgtaattaaattaataataaaatagggaaggagtatttcctaaaaaactacaaaacttcttggactggaccacttcacacttgactctatatcttctaattttttttatttattttttttctgggtttttttttttgtctatttaattatttatttttttaataaaattttatattgtttatgataataattgacacaatacgattttgtaatgaaaaaacaattctaaaaatataatgatataagataaatgaaaattgaagataattttagaatttttttaatgaatttattcgttatttctaaaaaaataaattatagagaaaaaattatgagcaataaataaagaaacttgatgtattttacatatttttttaactcaatgaataatgcttagttaaataaagagataattattcattaagctaaatatattttaatattaaaaaaattgatgtatcatatagtgtaaaaatttaaggtaaaatagataaaaaagtagtagagagttttttgataatgtattttaaagaatagactaaaaaaactattgaaagtatttttttcatttttttttattattgtatattggggcacaatattaaaattaaattatattttattaaaaaattattttttgggtgaaatatataaaaagaaaattacaacttgaacttatagatccaaatcttatcttcttttgttttgtttttcctatcttaggaattatttaatttaaaaaatgactttaggaatataggagtatgtgtatgtaatgattgatattggctatcatttaattaaaaaacttctatatttttctattgttatattttttaagaaaaaaaataatccaaactttctaaggaaatcgatttttttttttttaaggaaattgaaacattttttttcttgtattatagatattttaattatgtataacaaataatatccgttaaatcaacgtgaatttaataaacataaaactatattatacatttccccaaggctagaatgttaaaagactgatgttattgtaatataagagattattttaaggttttttttttttttttaagaaaatgccttgattatactaagaaaaagttagacccatgaggttattataagggggtttttgataaaaatattaaattgtgaagaatagtttataattatactatgatacagaatttttataaaaattttatctttttataaaacaaccgtaaaacaacaaaatagaacaattaaaataacagtgaaataactaaaaaaacaactatagaataatagtaaaaacttaacacattacacagtataaaatttacacaatatttttgaaaaaaattctgtcccacaataaagaagtaaaaaagttaaatatttcagtatgtggtgtaaaaaccgtattataaattaagttcgaaggaatgtcatcaacatccaaacaactatattgattgtgggtaaacattatgggcacaaaaattatactaaccgagttacattagagaaaatacaacccgcaaataaagaaaaagtgcttaaacagtactgagggtaattctcaatttttcatctagactccacttcctttagagagttgatcaccaaaattatattattttgtttgcataactaaaaaaaataatcaaaatgctttaatttgacaaaattataattgctagaacatgtaattatttttttatttatagattttcaaaaggcatatttatttattttatttttaattaataaaaataaaaataaaacaagttaggaaagagaaaattattccctaacatttttttttattatttttttcttaatttgtgtgtgctctactagtttctctttttctaaaatttagtaaacaattatggaaatcgatatcatacaattaattctctttctctttaaataaacatgcctcattcaaaggttaacaaaagggacaaagcgctacaagtaaggtagtaaaaaagccgtacaaatttcacttagagatgactgcctaccacacatcaataaagaaagaagcaagccacttcataatattagacataattagtgttgtaagttcgtgtgtgtcatgctgacccaccccattttcgactcgagtatgaacatttaaactcatacccgctctcgcccccgaaagtcaatccccacccccgtcccattaggggtaggtacccgcaagtataattgtcatccttaatgggttgtgtcgtgtcgtgtcaacatatttaaagggtaggcctagcacggcccgtaacttcagtattttcgtactgtgcttggctcgtgtcggctcgtatttctcaaacaggtcagtccattttcatattcgagcttaaattcgtgctttatttttcatattttcttacaattaataaattatatgtatattttaaagctttagttatatttatataaattttgaacaatactttattgacaattatataaaataattattaacatcattaaaatttaaatatttatttataaatacttaaatttttgtatcacactctataaataaattaatttattattttaattttttatattttaatagttttaattataaaattataatattcagtattatatttaaattttattattattttaacttatttataattgataaatccatatcttattattattaatagtttataagattttttttaatatctcatgccgtgttttttgaatttgtcgtgagtcgtatctttcgagttagtctattcatacttacgtatcttgcatttcgtgtttatcgtgtcgtgtcgtgcttaattaatatttttcgtgtcgtgtcgtgtcaaatgccaatttgtaacaccgtgtcgtgtcgtgtccaatctcgtattttttcgtgcctaatcgtgcttgtgccttctgggtttgtgtcaatttcatgccgtattataaaacccaacctgtattttcagcactaggacaccattgacctctaatagtaaattacttttttttaaaaaaaaaaaaaaacataatagtaatactctttaaaatatatatttatatatagtttcttggtcatcctaaatcgatgagtattgctataaaatgctagtagtgtctagtatcgtgcaccacttaaagataatgttttacgattagttagcgatattctataaaattattacattaaattaaattatatgagacataatacttaattatactaatagtgtattacatgtgagaattactagcaccacatgtgtcttttaacatt

SEQ ID NO: 70019 - DNA, 1035 bp, Cannabis sativa
gcaaatagcagaataagaatactgaaaaacagtcaaggagccataaaaacctcaaagatagcaatcaaaacgatattctaaagtcatcagattcgcatacaaataatcagttcccaattacaacaacataacataaaaaattaacaaatcgagcaaatgatagtgttccaattaaataacgaattaaacattcaaaagaatttaaatccaaaacgtaccttgatggtgaggtcaggaggtagagcccaggcaagagaattgtgcttcgaggcgcgttttctggcagaacgcttaccagcctcaaggagtagagttcccaaacccatggcgcgatcgatgagctgagtttgatccgaatcggaggtcctggagtcgaggagcctctcaaaggagagatcgatggaagaagaataagaagaagaggatggggctagggatgaatcggtgggaggggaatactgtcgaagaaggattgtctcaaggaggtggtccatatggtcatccatgtcgaaatcgaggttagggttttggattgtagggttttgagaaggacaaggtcgcttagccatggaagacaaggtgaggagaagggtggtatccattggtatgggatagtggagaagggattaggataccaaagccatacaatctcatctcagacagtttgtcttttgggagcttaagataccgacgacccatttctcgccacgtgtccatctgcgtgtgtgcatgtgaattttggtgggaatttttcttacatcacctcagctctcctctctgcttttacattttttttttctttatttcatttttttagtgtttaacacgtcctcaattaataatcaccgaatctaacccaacatttaatcagaatagaataatatttactgatatgacaatatattatatacatatatttatgtgctatctaataaaaatgcttggtttaagagttattcttattgaaatttacacttaaaataaacattgtttgattaataaattaattattttttcaaaaaaattaattttaaa

SEQ ID NO: 70020 - DNA, 1607 bp, Cannabis sativa
tttttaacatttctcatattttttttttttaaattattatgtcagagttccgtatttatattaattatgagttcccatcacatagccatgttaatatacatatacatatatatataatatattgttttgtgttttattccatgccatgcttgtttacctaattcttgaataatgagcaagagttcaatggaagcaatactggaattggaatggttgtttttgacttaaagaaattgtgctttagcatgtagcgttaccatgttaggaattaaaaaaagaaatggtaaacatagttgaaatattaattaattagttcaaaaaaaaaaaaaaattagcttgaatgaataggagcaatcaaaattctacatgagaaagaaaaacagaagattgttttaaactataatatgaaagaaagaaaaaactataatatacagcgtaatcctaaagttaattatagatattgtccgaagccacataaaaatctcttttctcatgtattaatgtatttttagatttccaagctcaattcaatttttttaatgccatcaatgtcctatcgttgaccaaaacaatagtcataatgaattattttaattgtattataaaccatttgaagtctgtttgagatctattcttcacatatcagaaataaacaaacataaaaaatgattgtaccaactaccaagatttaagatggatgaaattattccactaccccacaagcgaagctttatttttttatttttttttcccttgtttaaatttcgaattttaatacaacaataataatgaacaagaaaacactatacgaaacatacctcccaaagccacccacttttatgagcttgatccttcaaatagaactgagtttctggtgataatctctaaattttagagaattaagaaagaaaaataaagagagaaaggttgaaaacaaacaataaaaataaaatagaaaagtgacatgtttaaaccaaaatgaactaatgtgtgtgtgggtacacttagaatccagttaggacaaataaaaaggtgacctcaaaagccataacaacagctggtctgccacgtcatacgtttgttataaaagtggaaaacccatgtcactaaacccttccttaaaataactgccaaacttgtttttttcctttattaagattcttaacaaaccatttcttttgttttaggaatgacaactattaacttaattcttttatttttaccagaattaccctcttttggaaaacaaaattgctaattgtatactacttttgatgactcagtcagctttactccaggatggttctaattcacgaaattttcgtggatttaattaggggtttataaaatgtgttgtatgtgagtcgcttctttattttttgactcgtgtttaattttagataatttacatatacacacattttttctagtttattattaataataaacttaaatttcgttcgggaaccattttgttttttgtttttttaaattttacttaacaaaattttgtagttttttcatgatttttgattaattaatcaaaaaactgattttttaatggttaccgaacactactttagtctatctcatttacaattttaaca

SEQ ID NO: 70021 - DNA, 3146 bp, Cannabis sativa
gttttttaataattaattaatcctttagtattaaaataatttataaaatcacacacgtggcatccctatagtttagggcgttacaagccaaatgttgtagacaaggcttgctatagcagctgtgtaaaccagcttcctgaatttgcttgctttggctctccctagccatttgataatattggagagagatatgtgcattgtcctccaacctaaccagctttttattttttgtaagctacttttagtctttgagcattcaaagaacaaatgctcaatattttcagtgttgtcacagctggaaaaggaattccagttcagctgctatattcattttgtacaatcgatctctggtttttagcttttggtgcattgctagccaaagaatgaagctgtgttttggtgcatttaactgactccttacatgcctactccattgcacttttggtggagtttgaacaagcaatttgtacccctgtgctacagtatattgctgttgtagaattaagccttgttgtgtagccttgaactgatctttgagcctaactaagcatttccaatactagctggattggcttgaagcgttgtaggcccaccagtcatcaccatgtaggtacacactattgatccacttcatccataaactgtcttccttgtttgcaatagcccatatgtatttccccatagcagctttatttcatacagctatattcctgaaaccaatgccaccagcagcctttggttgacaaataaagtcccaagctattgctccaagtccatggtactcagctttaatattccataaaaaattcatgcatatagcttctatgttattcacaactttcttagttaaaatcaagacttggcaccaatatgcatgtatagccatcaaaactgaattgattagcaccactctacccgcaaaagaaaaatttctagagctccacgttttgattctagctgtcattttctttgccaaaatctcacagtctttcccgagatcttctttgcaccaattggaactcccaaatcagtaaaaggcagggactggtgttggaaaccagaaacagccagaattcttctcaaatgttcctcaggcatattacttgtgtagatggctgactttgcaacattaggctgtaaaccaaatgtcttagagaacattttaagcccttgcaataagtagtacacacttctgaagtctccatcatagaaaattaacacatcatctgcaaaggccaaatgatttagtttggttgttgcacatctatcatgaaagtagaaatctgttttgtctccaattctccccattatttgagatggatattccatacccaacacaaataatagaggagacattggatctccctgtctgagacctctttttgactcaaagtatccatgcaaagatccattaagcattagtgaaaatcttggggttctcacacaagtcatcacaagcttaatgaatgcagatgggaatgagagaccatgcatcatctcttttaggaaatctcattctatagtatcataagccttttgcaaatccagtttgataatgcaagaaggcttattgattttcctcccataatgtctaagtagatcttgaaaaatcatgatgttgtgccctataaaccttcccctaataaagcccccttggttcatggagactaaattaggaagaatgtttttgattctagaacacaaaagcttggttgcaattttataaataacattgcagcaagctattggcgtaaaatctttgactgtatttggattaatgtcaatacagaagcattgatctctttaagaaggttacctgtttccagaaaagatgtcacagcctcaaaaatgtcctttccaactaactcccagttgtcttgaaagaagaaactcgagaagccatctggaccaggtgccttgtttccaggtatgtcaaataaagccggattcacctcctccttggtgaattttatcattagtgtctcacctcacaatcttgttcaatactgctctcctgttgttcatccttgaacccagtagctctttataataatctacaaaagctgacgaaatctggttggggtctattattctggtgccatcttacttttctatagagaaaatttggttgtgtcttgctctttgtttgatacttgcatgaaagataacagtgtttaaattaccattttgcacccaaataactttggccttttgttgtaggaaagaagtgtagtctttctgcacttgtatgagctttgttctagccttcaattcttcatcaatcatatcctcatttaaaggattctgctataaacttttctgcacttcttcaagttctccctgtgccctcataactgctgtatgtatatcagaatatccagccttgtttatctctttaagaacaggtttgagagcctttaacttggatacaatttgaaacatcttggtgcctttgatctgcttcctccaaacagtctgaactttatttccaaactcagcatagcttttccacattctaaagtaacgaaaggtttcataccatcagccctcctaggatacaaaaaacgtataccaggagagtgatcgaataaaccttcattcatgaaattaacttcagcattttgataccgatctagccaagcttggttagccatgactctatcaattttggaacagattctgtctctaccctgctgcttattcgaccaagtgaaaaaattcccggtcgttttcacatcttctaattggcaatcatttacacaattagcaaaagctgtgtcaggatagaacttgaccttgtgcccaactctctcctccttggagaggatatcattaaaatctcccatcaaaagccagttttctttagtagccaactcacttaaatccttccataaaacctgcctaccattcttgtcattgaatgcatagattatagtaacaaaactactataagtgtgatccattgtagagacttttaaatgcattaattgactagtacatttaataatatctacaatgtacctcactagattccaagcaatgacaatccttcctccatgatggcaagctatattttttgagaaacaccatccatcaaatacattgaggtacaaggtccccaatttgtgaaccttgacccttgtctc

SEQ ID NO: 70022 - DNA, 1535 bp, Cannabis sativa
atatatataggttacctgggttgaacatgtgctggtggatgataatgtccaaactcatcggctctatagagatgttgtgtgcattaataacactgcatatggagctgaaagatggattgtctcattggaaagaatgattgaaagacgcacttattgttccaaagtcattgatcacagtaatatttcaggttttcatgaatttggtggaggtatgttgtgtgtaattgaacattatatataattcgaaattaacattagaaataggttgcaattaataacaaattttgcaagcacatgcacttttattggcagtgataagcttagcagaaggaaagaaaagcataacgaaacttgggcatagaatgttgaaaagctttagtgggatgttggggatgtcagggaaaatggattttcctcatttatctgaagtcaacaatagtggaatcagagtgtcagttcgtaagggcacagcgccaagtcaaccttttggaatgattgtcagtgctgctacctctctttggcttcctttgccgcccctaactctctttgatttcttcacgcaacacaaatccagactccaggtcatttatctttcactcatatatttcctccaatattttgtatatatgtgatcaatttgtttgtgatgtaactgtgtgaatgttaggatatttgtaatgcacaacaaagttaacatgaggatctataataataacttttttcctttccaaaatttctcagtgggatgttctctccaacggtaaacaaatacatgagattgcacatattccaactggtgcaaatcccaaaaattgcatttctattttacgggtaagtaattatttaattatctccttttgtttttttacttcttcaattgattaattttaaaatatgagcgattgaagaatgataaagagcatcaaaatatggtaggcagaatgctatatttttctaaaattattttcaagttctcaaatagttattcatttattgttaggtgcaggacaccgacactaaaactaatataaagaatataattataattttagttgtatatcatgagcctatgtaaaagtattggagaaatatttcgaaaataatattcaaaagcaacactataataataataataatagcaataatagaataatagaaagatattaattttattgtaaatatagaaaaataaaaaaaaaatattattcttttagttttgttatgggtctttaattattatctattgtaaatttaaagaaacaatgataaaaatatttttttatatgtatagtaaatttaaatttaaatgacaatatttttgaaaaaacaaatatttacttttacataatcacgttttttttggtaaatccgaaatctttataatcaagatcagaactcaaacaaaactaagcgaacattttaattataagcttaatagagctcccacaccgaaagttatctagactatatattgaactttttcaagttcatgaactgtaacctatctgtaagacttatattctttacaacatgaa

SEQ ID NO: 70023 - DNA, 2076 bp, Cannabis sativa
  modified_base (27)..(41): a, c, t, g, unknown or other
  modified_base (1998)..(2015): a, c, t, g, unknown or other
tcataaataataataaaataataaaannnnnnnnnnnnnnnctttactaatccaaattactagagcggtcattacaataagtataccattgtattacacactaaaattttaaaattaacatatttttaagataattataaatagttttgattaaattaaaccaaaaaattgaacttaaataaataaaaatgtaaatgtgttttttaatatatatatattttttgtttatttaatctttttaaattatacccatttccttattgggaatattattttttttttggtattaacaatttaatttttttttttttttgaattaacaacaatttaaattctaaaactattgatccttctcataaattttgctcattttctctatttcttacaaaataaaataaaattgaggtttaacttttggttgtacaagatgattttgatgtaattatcttaaaataacttgtagccataataataaaacatgaatgtgatatttataccatactatttttaacaaaatcctattataatttttttactttgctttactctcaatattttcatttacgtatatacgttacatcactttagaggaaatatttatgattggttccttaatcataaagtatttattttatgtatgaaatgttttttcacacattttctcataagtttctttcttctaataaattcaaaaagacagctgtgcttagaaaaataggcgttattgttattattattagccaaaaaaaaagtagaaaaagaaaggcatattaatttcacaaaataacaaaccatgaatgtcttcttctatatatatattattatagggtgtttttagaatgtatccaaataaaataagtgttctgatgtaatatctaactgttttagtatttaaaagaattttttattttatatttttatagtcgtgtatgttataatcatttaagatatcttgtaaaattttgagaaatttgatagtttacaatatagaatttaatgttcaaattgtctatttcacacgcatataaaataaaaggattacgcgtgcaacagactctttaaatcttattttcgactgttaaattttttaaaattttaaaggatgtattttttaaaggatgtattaaatgattataacatatacaatcataacaaagtttcgaactataatttttttagataccaaaactgataaaagtgcatttatatacccggcctttaatcaaaggctgcttcactataaaattttccaatattatatgtactttaatacttaattgcctcaaagtctatgatttctttttctcactaaaacttgatgtggacaacataaaccatgcatgtctccaaccacacctttgttttttctaatgtttttattttgagtccccctatattaaaagtttattgaaataattttcatgtaatcataaatagtaatttacacgtaaatacaatgttttatttaagaacattaccactaataagtatgtactaatagttattcaaatatatataaaaaatgatacacattatgttaccttaaaacttgaaaaaaaatgatgatcatcttttcgtcactaatttgtaaattccaaataattaaaaataatataaactttaatcacataaaaaaacttataaccaccgaataatcctttaaagcgatgaatataattgtctaatatttatgattatatatagtgattttcgataatatttaattaaattattattaattaaagaataatttatggcataaatatttaaattttaatttctaattataaataaatacatatttttattttttggcaagttataattttagatatctgattgttaaatgttaagtaaattaccacgtgacaatcactgattggtcaaagttattattatttttttttaaatagtttaaatatatcaaaaaaaaaaatgacaaatggataatgacttaagtgtcctgatatctacaggtaggggtgttcatccgatccnnnnnnnnnnnnnnnnnncaaacaacatccaatccgcactaagtgcggatttcatattttggatccaatccgatccgca

SEQ ID NO: 70024 - DNA, 1568 bp, Cannabis sativa
aagtaaaaagatggaggaatttggaaaggaataccttgaagatctcttatcaaggtccttctttcaaaattcaagtaagaatgaatcccttctccaaatgcatgacctcgtacatgatctagccatacttgtatcaggtgatttttgttccagattagactagagccatgatttacttggcttttcaacaaatattcgtcatgtgtcatataagggaaagtcggacaatcttaacaaacttaccagtttgagtaaagctagttgtctgcgtagctgcttaaattgttatgtcaaatcggagctggtatcgaactccttcatccagctttcgattatatgatcttgtcttgtggagcttagttggatcttttatggccttattgtgaccaaataatcttttgaagagcttaattagtggtgtatttggtaatatgtgtttttgctattgtgttaaaaggaataaggatacaagtaaactacttctcttttctttggtgctttgaacatctgttatatttgttttctctgactaatttaaaatcataagcttacttaaaagctaaacaatttaagtgattatattatataaccaattatatattaaacatcataaaacaaccattacactacacgtgattcaccatagaaactctcaacttttttggggcatagtcatcactatatatatttatataacagattccataataataaaacaagaaaaaaaggaccattgaagactagtccactaacacagtaacagccccctaattattatattaaaaagcaacaaaaaaactatcaattccaaattgggttttcataatagactgattccataatgaaacacactaacacaacttttaatatataatcatataataaataaaggaccactattgtcctactatcaatgcatacggcttctctttactcttgttcatcaaataaaagttctagcttgaatataattgctctgtctgactgtctccattgattaccaaacatggctgttgaactagttgctggtgctttgctatcttcttcacttcaggtagatttattttaaccatacaatcacaaggcatgtaaatacattagcttttgttccttaattactactttttctcaagaatgaaaattggctgctgatcttttagctgtgctctactttctgcttcacttcaggtcttgtttgaacgattggcctctgtggacataccccggttgttccagggaaagaaagcgatcttggatcagctagatgagctgaacactgtgttgctatcagctaatgtactcctcaatgatgccgaggagaagcaacttcaaaacgatgaggttaggaagtggctgttcaagcttcaagatgtcatctatcaagctgatgacttgctcgataggattgactatgaagcactaagatccaagcttgaagatgatgatcagtctggaagcagtagtgccagcaaggtatttagccagctgaaatctttgtcatttttcatgtctgaatttgataaatctgttcagcttgattccatggagatccttcgtaagctgaagat

SEQ ID NO: 70025 - DNA, 2080 bp, Cannabis sativa
atttattgtgtgccaaatttggcacaatgttatatttgtgctagcacaatgttataagtgtgttttagctctaccattcacaaattagagtgtaaatatttgattaaactaagttagtgtcttttttatctaaattagatcaaatcaaacaataatattaacaaaggagaaaaaaaaaagaaagaacctcaaagaaactacattctatatatttgatgaagcatattaaattaagagtcaggaacatcatcaagaataaaaggaccaagtttaccagtcctgaaaagtgttagaaacttttttgataccattagacgagcttcagaggctttatggggtatcttcagtgctttctgcagagtttcaaactgttgctctataagacactccaagtcattttcatcttccacattgccattaaattccgacacagtcaaatataatgcatgttgtacttctgcaacaatatcctgcaaaagatataggatgaaaactagaaatgtgaaaaaataaacaaacaatgataaatgaagatgaaatccttaaactattagaccattttacatgaaatcctttgtcgaggatgtgcgactcgatgtatcatggcgaaatcaaaatatgaagatgttctttgttagattcccgtgatgaaagaaaaaatgtatgcaatttgtatgttccagtgagagacttgtaagagattttctgagtatttttttgaagaaattgtagattggcaattaaataagtacacaaatggcagcattttacattttactcatatcagttttgaggggtttttaaggaaaatctactataatgcataaggaaatcctatttaaagagttttatcttaacaagtacaaacactaccaagcttattcaaaaagtagcgacttcggattataaccatagaaattgcagctctagcagaaatacaagtatttacctcaatgtaccggacactagacttatccagtgttttcctacgtgaccgaagatctttaaggctgtgttccactgtttcagcaacatcatattgaatcccttctgctctcctgttgttccagtgcttccaatgaaaaggagtccgtcgggtatttaaaactgcaagtaagtactgggcaatacgctcttctccaaccactgaatctttcacagaccctacatgcaaagtcaacaaacttttttcaggtaaaaatgaagaagcaataccataccacaactctaaaagatatatcaactaatgaacatacaattatgtaaaacataaataaaagaaatcaaattataactttctatctctgtagacaggtctggtttctatctctgtcaatgttctgttcagaatctacatgtaatttttagctattctattcttcagctacagtaatagttttgataagaattatatcattttgagcacatactaagtttcctatatttttgtcggccatgcatccgcagcatgaaatgaataactccaagcccacatctcagtatacaaggtcctcttgaaagggaataaagcaagaattgaaggatattaattcattttctattccattgatcaacaaaaccaatagccaatatcacagcaactaatctacaatatacagtttaaccgattctagattttgtacttattacattttacagcatcaaatgttcaattaatttagtatagacaaaatataaaaacaaagagtactaatccaaaagggctgacctgcaagagcaagctttaatcctgtctctatatctgggatacttggaaccagtacacctggagtgtccagtacatatatgctcggctgatgagcaatctgtattaaaaaaaaaagttttgaataaaaattaaaggaaactagaatctaaatcttttcattaggatgaataatgtaatataaatatatatatagaaaaattgtgtagtaaagacatcacttttgtcctatggtaggggcattcatggtttcggtatatagagaaattataatctaaactttttttatatatcaatttacattatagttatacgacacatcttaccagttttcagaaaaaaaaaaaaaatatt

SEQ ID NO: 70026 - DNA, 835 bp, Cannabis sativa
acacacacacacagtcccttggttagtcgctcttctgttcattcaagaaacactctttttcctcatacgttttctcatcctttctatgcgattttccatggagttcaaatttcgagccgtagatcatagacctcacccaccgctattcaactcctccgcaccacctttctcaggtttgtcttctctgtctcctcatatttcacagcaagttctactctttttttttctctcatttcccttactttcttggcaaccaaacagcccaacatttcttaccgccgatgaatttcatgcccgacacccgaccgatcccttctaatggccttccctttggtgattttcgctattaccctggcccaacttgtgacccggtcgggagattgaataccgcgtccgttcttgagttcgggagggagcgtgcgagtgatgacattatcttgtccgagatcgcaaggcgacgagaactcgagatggtgttgcgtcgggatatcatgttgctggagcaagaattcgacttgcgaagagataccacttctaaagggttggttcgatggggagaaacacagtacagtaaccacaggtttccaatggtggactcgttccatgagcgtctaactgtatttgaagcagttcccttggttaagcctctggacaacattggcttaaacatagacactcctccagcggcgcctgagaaggacaaattgatcgttctggttagtctttttgtttttgttttttctgattctttgtttgaaaatgtatttgattcgcttcaattgttttaagattttatcttagttagttcctcttataaaacacatgcatgagatga

SEQ ID NO: 70027 - DNA, 2387 bp, Cannabis sativa
ttttaataattaattattctattagtattaatctagtttataaaatcacacacgtggcgtccctatagattaaggcgttacattcgggttgggtgataagtcaatatcttgtcttataaatatgatcaatttatgtattattattcgtaaattgattctttaaattattaattagtgtaattttaatttgttagaatatttttaagactaatcatgtatttcgagttatttagagggattttagcacattttgttgaaaataatggaagctggcgagctcgattttacatggtagaacttaattacaaatttcaatgaccttagaagcagtactagacttggatctaaacacgaaagatttagatcacattcttagcttttcaaaacatctagaatcgtccaattccgagttgtattgaagaagttatgaccaaaatactaatattaacacgtgacagaaatttttcggtagcaagcggtcgccacgacgagggaattcgtggccgcggcgaggactcgaattttgccaaatttcaaatttttatctatttttaaaacaagatacttttagaggttatatataagacttttagggcatgtgtttaaggacctttgaactgcaaatttgagagaaaaactcagagagtgaaagaagaagacaaagattgcggcatcaattgttttatatcattgttctttttcttctccctaaactcaaactttttattatgactttaattttaatgtctagtgtagagtagtttctttttagttaagagttatttcaaaactcaagacatgaatctttaatttgtatgatgaatgttaatttctagttgttattatatcgaattgcttctattcttttagattcaatgccatgattattattttaatcttgtttagacgatcactaaattatattttactttaatctattgtcatctcaggattattatttacctaatagtctaggattctaagtgtttgtgataaattataatttttaatattgttaaaggtatttttaattgtgatgaataatagaacctatgttaaatgaattgtatgcttcattaatttattgcctatattaatttatctccattgaacttaaaactttatctaagttaaataaattgcatgtttcatagatttactgcttaggtaaaagagttaattattgagcacatcactttgattacatacaatagagagattgagataattaattgcttcggcgatatttgtgggattaatcattcgattgaaaatttgaaataacattaattattaggaattgagaatgattgttgaggatggagattaatttttaactatttcttgaatattgtagtatctcattatatttattttttaatttatgttatttaatctttatagttaaaactcattttttaattcttgttactagtttttgaataataaattgataatagttcttgtggaatcgacttatatttaccgttatatcgaagtaattggtaatatagaaataaaaattaatatatttgttgtggtaaacaatatgcattattggggtcgagatttgggtctggagttaaggtctaaattcggttctaaagtctaagttgaggttagaatttaatatattgatcatataaaaaaaaaactgcttaaaaaaatttaaaagtgatattttttttttatttttaaaatttaaattttcaattaaaaaattaaattaaatttataaaatataattttgaaaaatatttttatttttttaattttttttttaaaaaaaaaactaagggaaaagaagtgtcaacaaagacactcaaaattaatgaataataagaaaagtaaaagaggaattggttgaggagtgtccttctctctgttaagtgagcaactgcaaatgatacatacatgtaattagtggataaagtcccgtggagatcaccctgaggcgacacgtacacattctctctaattattgctctattatttatagtttttagtttttattatatatattcttctggaagaaaaataaaaccaaaagcttgtcctgcaagaatggaataaagcaatttctttttctttttttttttttttttgaaaggagtgcaatatgtaatctacaggtaagagtattttcaataggggccgtctaaatggtgtgaatttttcactatttaattccaatgatacatcaaattttatattatttgtattggattttgagtttaagtcaatttaatttatatattttttttacattctcattctcattttaatttattttaaaaaataacttagtattttaatcctcaaattaaaaattaccacaaaagtaagttatgaagtttgagagaacaacataaataaaaataaatatt

SEQ ID NO: 70028 - DNA, 2337 bp, Cannabis sativa
atatacagatttacatctcacaccgttttgaagacatagatgaaatgcaaccactgtctaaacaatactatatcattcctttagaaagctatatcatccctttagaaaacatagacataaatcaccaggctgctaaattcatcatgaaattgtgccaatcaagaaatgacagtactatttagctgctgcatcaattagtaagtcattaatgtggggtcaattttcaaactgagtttccccttttctctttttattgcttgaggcatgtttttatagcatcagagcaatgtgcaataaataatgatgtatccaccaagtgaacctaaatgcatttgattaagtgactgatagatttgtttaacaaagatcaggtcaacattataaacctttttagcataaacacttcatgattatctaaactagtttatgaagataagtataagagattcttacagtcagtaagggccaaaatgttgacttcagttcattcaaaagactcactggggattcaaaacgtaagagtcccaaaacgaaaaaatagatgctgttccaaattgcagcccatacagtttggtcaaaggcaactttggctggaaccacccaccaatcctcaaacggaaagagagcctacaaagtacaaaccaaagtcaggattttcagcttattcacagcaaaccaagaatatctaaatctgataacaattgtcacctcacaaaattggtagtagtaatgggaaagggagccgtggagggtaaaaccaacaaggcctgatctgaaaacgcgtgttctttcaatttcaaaaattggttttccttcataacactgtatattgaaggaaagagaattaagatatcaccaaatgtaaaagatgttatgacaatttacaataaggtcttacttgtgcaatccaatctccaatggcgtagacaacaccgctaattatcattttggacagaacagggtttgctttgagagcttgttcataggcaatccaattatgttggggtgcatatcttagaacctcataaattgtccacccctgtgtaataaaaaatcaataaaaaagagctaaaatgtgcaaaggatgccaacttatcaagtacttagacaaatgtgattccgccagagtcatttttgttttaaaatttcatcatccttgataataagtatccaaataactaataattgctggacaatttacactaaattgaaaaacccagcaaagaaaaattccactttaagcaaattatttaacaaaaacccaccacaaaagttatagaatcaattataaagatatcataaaagtctcacttttgggataaagcttaaagaaagagattttgacaatattttcagcacattagaatcataagtataccccttgttttggaatcaaagtaaaccaattttcgaatccccaatatccatatgattacttgggaaaaagcaaggaaaaaacacccaataaagtacctcaaatttcataaataggatcatcgaattaactcacatgccagtactcgtggtcaatggtgaacaacttagttatagcaagggtcccaaatccgagaacaatagcagcgtttatagccctgctggtcaatctatcccaatcttcttcaccatcgactgaaacgggtaacaaagacgaaaatggctcaactttttcagacccatcactcaataaggcgttatcttcctcctttgactcgttaggcttccccggagccagttcttgttcctcaacgatagcacggaggacccagtttctccttttacgagtagagaagacccctcttctggtttctgcgtctaacttggtataaagtttggtcggtaggagaactcgagtaaagctggagtcctttttggatttaatggtgaaggaaggaactccatgaccaccatgactgatgatggtgttaagagttgccatacaaatagttaacagagagaattttgatcatacaatcttttacgtacaacatacagactagtggattaagattttggagataataataccattttctggccttgtggctcatcactcgccggtactagagttgtcttatttacgtaactaaaacgacttgtcgtctaaaattttatctactggcagttaaactttttttttttttttttttatttaagagtgtatatagtataactatgttttacttgagactcaaacctataccactttaactatcctcaaatggttctggcagttaagcctttatccttccatttttatatacttcacctcttaatttttctccttaaaaaaagaataatatttttaacttaccttttatttagaagtaggcaacatac

SEQ ID NO: 70029 - DNA, 4767 bp, Cannabis sativa
tttatttggacaatattataaggggataaagaagaaattaggggagtataagtgggccaaagaggtcaaaatgccaatactactacaccacaaaaccaaagctaaagtaaagccgaagaagccaagcttaagcaaatcagcgccgcctcttctttccgaatcaggcaatcatccatggctgcctcttcttccttgttcaacacctccctctcttcattcgacccaaaacctaaacccttttacccaaactctctttccaaacaccgcccttcctctctcatcacttgcaccacctcttcttcctccaacaatgcctctccttctaaggtccgccgctccgatgagaacatcagggacgaggctcgccgccaccgcgccatttccaacgacttttccgccaagtacgtgcccttcaacgctgggttcgactcctccgagtcgtactcgctcgatgaaatcgtctacaggagtcgctccggaggcctactcgatgtccagcacgacatggatgcgctcaagaagttcgacggcgcgtactggcgacgcttatttgactcgcgcgtggggaagacgacgtggccgtatggctctggggtttggagcaagaaggagtgggtgttgccggagatcgataacgatgacatcattagcgcgttcgaagggaactctaatctcttctggtctgagcgttttggcaaacagtttctgggcatgaacgatctatgggttaagcactgtggtattagccacactgggagctttaaggacttggggatgacggttttggtcagccaagtgaaccgtctccggaaattgaaaagacctgtggttggggttggctgtgcctcgacgggagatacctcggcggccctctccgcctattgcgcatccgcagggatcccatcgatcgttttcctccctgcgaacaagatctcaatggctcagttggtccaacccattgccaatggcgcatttgtacttagcattgacacagatttcgacggttgtatgaagctaattagggaaatcaccgccgagttgcccatttacttggccaattctttgaacagtttaaggctcgagggtcagaaaacagcagctattgagattttgcagcagttcgattggcaagttcccgattgggttatcgttccgggtggtaatcttggtaatatttatgccttctacaaaggattcaaaatgtgccaagagttgggtctcgttgataagattccaaggcttgtttgtgctcaggctgccaacgccaaccctctttatcttcactacaagtcaaattggaaggactttaaagccgttaaggctgagtcgacctttgcttcagctatacagattggtgaccctgtttccattgatagagctgtgtatgctcttcagaattgtgatgggattgttgaggaagctactgaggaggagctcatggatgccatggcgcaagctgactcaactggcatgttcatatgcccacataccggagttgcactaacggctctgttcaagctcaggaagagtggggttattggacccagtgatcggacggtggttgttagcactgctcatggtcttaagtttacgcaatcgaagatcgattatcactctaaagacatcctggaaatggcatgccggttcgctaatccaccagtggaagtgaaggcaaattttggctcagttatggatgttctcaaggactttttgaataagactccaaagttatgagcacataaacgataaaactgtaagtttagtagcagttttgctattttgttgcggtcaaggttctatttttagcttctgctgtttagcttgtagtatcctattacttttcctgttttggggctcaatatcttgttctctattttgttgagttaaattaagctataaggctagaagtgatacactcaatttcctgttgcaatggtttacagtttttgcttgtgaaataaagattgcaacttttccaatgatcgaaagtgaagaaagaaaaataaaaggaagggttaattatttgattttgtacaaaagttttatggttgcgcttttaagagtttactagcacttcccaagtgcgtggagtgtttttgcacatttgaaacgagatgatttcaatggtggtgtcatgtcaaatatcttcttttggttttgaagagttcttgtggtggtgtcatctcaagaagtattaaagtattgaatgatgcaagaaaatgattaatgtgatttgaacatgggatagggagtgaacgaccaattcttcgttgtgatatttttgcttaatcttttggggacatgttggaggggatgacatcttccattacatgatgattgccagttgttctcaaagctttgttttttttttcttgaaaactctcaaagctgtgttaatgcaatcaatattcacaatcacaatgatcaaaatagttaaagctcagcctctattgattttgcacaatgggaaagctgttatccttacagaaaaaacttgcgcgctaactgcttattaagtactaacatcaagattgggggggggttcaaggttattctaaataaatatctgaattcaattaccatatatagtactatttgtctcactttaaagatgtttgagctgtatatacaacaccagaacttccaagttcttaatgctcaggtaagaaaaaggtttcagcctttcaggtcaagatgcattagtgtatacatcaccaaccagaaacaactgtactttttttttttggtaagtagaaactactgtacttaggtaagtggactggcaattgtaagaatggtgagaaaattaattagtgagataatattgtcgaattaaacaaaaatatttatcacttttttaatgttgtacttattatatttaacaacttttacttatccttttctaaaatcggattgagaagtaggcaagcacatctcaattttgatgctcaacatacttgcaatgtcatatttacagtaaaaatatattcctgataaataaaataaaataaataatggtccttgtttgttggttacttgcaactatggggagaatcagtacgcaagtgatctaaatctaaattgtcatttcatggaacatttgatgatattgatgaatgcaatgtgccaacaattttagctagtagcatgaatacaggcaaatttcacaatgggagtaagatcctctttttaggcaattttaaattaaatattagaagtgctttatataatttaacaatgtatgaaatcaatttttcgataaaatttaaaaccagaagaatttgcaatgactctaaactatcacaaatcttcttagtcctcatttgcaaggagagacttttctcaggagaagtcatatagggatatactcttatcatctgatacactagcaagccgaccaggccctccggctggtccaaaggccactccccaaacttggtcggcgtggttgctcattgtctggacagcagccctcatgccgatgtcccatagccgcactgttctgtcacttgaacctgttgcaatagctgtcccatctgggctaacatccacactcagcacccagctagagtgccccgacatggccccaacaagagtcttaccctcagcatcgtacatgtgtacatgggcatcatctgaggctgaaaacagcagcctcggttcggtgggagaatatgccagtgagcgtacaggcatgaaatggccttccaggtggtgaagaaacttggaacggccaacatcaaacacagaaatagttccgtccattgagccacaagcaagccgtcttccatccggactccaagcaactgacagaacaaacttcttgctgctgtttttctcagatggttttgctgcttcaggccgaggaatcgataaagtggcaaccaaattccatgtggctgtgtcccaaagcttcactgatgcgctgcccccgcctgcaactgctaggatggtgccctggtaaaatagatattgttccatgaatttttaaactgataactgttttgtttgagtaacaaggtttctagacaatccaaagctcagtattgttattctattactaataatgtcaaagaatatgtttaaaccaaatgcagacactcatccatgaaaacaaaactgaaaaaagcatttatagataaaacatatattcataccatatcaagaatgggttaattatgaactttcaaaccccattcctcaatcaatcttaacctaattgttcacacttcacacaaccccaatactaattagttcatcatatatatgtgaaaaatttggtaaactaacagcataaaatttacaaaataaacatattgaatttacacatggtgtaaatttaaggtcacatagtgtaattttaattttaaggcagcattaaaatttgtaaaataaccccattgaatcacggaatgttgcagttaaggtcaaataaaatttgccaaataatttttgagtgactcctcttgtgccaccaaagtggttattttgctaataaaatatgtccacgttattttcacaaaacactgagtttcctaaagaaagttattttcttctactctttagatatttttgtcaaacaaaatatataaataataaataaaaaaagaaaagtaatttgagtgttagtataccctgggatcaaattgcatttgccagacttcggaaggaggagcttcaagattagctaaggtgttattagtgtcgacatcgaaaaccctaacgaagctgtcgagggaggcggatgcggcaaagtggccggagggg

SEQ ID NO: 70030 - DNA, 1279 bp, Cannabis sativa
ctaatcaatatatatatatatattctcgtaactccaatagaccagctagagatatgatcatcacctctatgatgtcataagtaaagttttattctgtcttgagcctatgcattaggtcaacataattcttaagtttaactttttcaccttttgtctttcgactacaagccgaaataaagccaatgtctttcgagaaattgaaagctgcattatactcagcatccctgaaaaattatttaaacgttaaatacaatatacattacaagttcttttctacgttaaaacaatcaagtggatgaagaaaaccatacacatcagttatgcagaaaccaaagttctttttaatgtcacccttaaaaatggcagtgaaattcttgatttggttattgagaagctcggagaaaatgtcgagcgccgctggattgttgatctgcttggcatcttgcccagcgacgaacagaaagctcgatacaagcacagagaacactagaacaagcccagagaaaccgccatttgcctttttcctgctcatgatcgcctaaagaaaaagaaaggaggctcctatcgaagtctgttgctagggtgtgaagacgaagataggatgcatgtgtggagaaaacggagagtgaaattgggttgacagaaacaggggatggaagatgggtaagaagagagagaaagaaagcattgtttttctggtgtagagagagagagagaaacggagggtatggaataattgatggaaggagctggtttttagggagggaagaaatggcggggaggaagagttggcgaagtacgtgggagagagagtgacgtgttgcaatacggaccaccgttggattcaatttcatgtccaatttcaaatgaaagtcgttcggtctgcgtgctgtcacttcattactccaaaaatttaaaaaacacccattttattatttttatataattaaaaaggctgcaccttacatttctcattgttttagtaaaaaaaaattaattgttttttatataagcatgtaaattataattatttaccaaatacaaaattttacaataatttattatacaaaaagcattgtttgtaaaatattatataataagaattaaggagttttttctattttgagttaatattactttaaataaatttttatactattacaagcaaaaataaatatttatattctttcttaattttaaatatgttattttcaaagtttttgatttacaaaaatacgatagaaaaactccccctaatgcgcaaggagaagtgtgacac

SEQ ID NO: 70031 - DNA, 1572 bp, Cannabis sativa
gaggccagcaccgagatgttttgagcccaagctggtagcttaagaacaacctaaatccttgatcccagtccagggtgaacggaggatgacaatatggttcagctcattggaaagataggtggtcggcatccatcccttgtgcaatataatagtctttcaaaacaccacctatctttgttacctctgtgttgttagtgtcggtcagccatggatgctgtaactatgaaaaataaaagtagcctaagcagttatgcctcgggctaaacatcagattaaataaccagtttgtatcatgtggggattgctccccccaacaccctgattggcgtaaagcacaaatcgtgcagccaaatacttaattccctttttgggtgaattaaatcaagcaaatcttgtaataattggtgatcctcttaaaatatgagtgaataggcaagatcatgccctcctcagtgtcgggtccagagcatgcacaaagctcctctccagcgttagtagcaagctacctgagattaggcaagaaggcctcgacatctccaagaaggcccttatcttggagattatttatcctctttaaggtaagggtggacggaggcaatattcaccgagttgctttcttgtccttggttttcatggggagggcctcctcaaattctacctcaatgtagccctgatcttggaccaagacctccccggacttcgagatgagttctttggcctcattgtaccctccgtatgacatggtccaaggaaccttttcctcttctatttatttgcttgaggaaccagttgcacaggcttcctcttgttcattagcctcccctatttcctcgacacccctaggcacctcggggtcatcttatggctctttggcatactctgcagcaaccatggttgtgatccaagcaaggtgaggatcctcagtagaaaccttcgtcaagagttccttggttttttccattttcttaggtttgggtagtaggtttgatagtatgcttagctatagaatctgcatgtgtgaagtttcttcttaaaggccctagacgaccctccaaaagtgtatctggaactcttgcatggaccctttatatctaagaggtcgggagatactgcctctagcctctattgagttcttaaatgaacctttcgttctcctctttgcttatatgtctgaggtaattaatgattgtgttgtacgactagttttggagactctaatgaatcactagatacttcccactcgtcaaagcttgaagtggatgaatctccacttgatgatgattgaatctggccagagtcttagctgatcttcaaggagcagttcgagtagatcgttgtctatttagtgttcacctctctagaattcgcccggattcatctataaaagaaggagagagaggtgaggacagaacagatgagaaggtttttccaaagaaaaatatctccaatgctccgactaaaagacacttgaagattaaaaagggaaaattccttcctggttgtgaaattccaaaccagaaaagcttcgagaacctagcaattgcccaaaagctccaaagagccaaaattaag

SEQ ID NO: 70032 - DNA, 2438 bp, Cannabis sativa
  modified_base (165)..(171): a, c, t, g, unknown or other
  modified_base (398)..(399): a, c, t, g, unknown or other
aagcattgtccactctacaactgcagaaaatgtgtcacttcctgcaataaaaatatcctgaaaatataccactttcgatcatcagttcgttttttctttttacagaaggcttatttgtactgaggtccctaaactattattacaaaaaaaatttacttttagtcnnnnnnnaatttgtgactaaaagtgaaaaaggttgttactaattataaaccatcattctatcactaaaaggattcatgtgactgaatgtattagtcataaaaattacaatttgttgcgattaattaaatgtgtttttaattagtcacaataatttttgtgattaaattaaattaataacaatttgtatttaatactatattttagttataattaattttttgttgtgactaaanntcatatttagtcacaaaaaaaattattgtgactaaaaggttgtatcttttattgtactgtatatatatgatttgacaagttggtccccaaacttattttttggcaaattattgatcaaatatttgaaattaacaaaacataatgattatttaagagtagggacttaacaatgttgccaaaaaactaaaattagtttaggaaccaatttgtcagaaaataaaattttgagatgaattttccaaaactcatatattcaaggaccaactttctatgaaaaaaaaaataatgtattggagatcaacttactaaaacctatatagttcactttacgagtacaaataagccataaaaaaaaaataataataattaataataatactaaccatgatgactgctttgatgtttgtaatctctaatggaactgtaagctcactactaccttgcaactccaaaagaacatccaacaaacactttgcattttttgaataatcatgagtgttaatcattgcttccttatctttattatgttcatctaagatgttgtcaagggtgatctcaactgtttcaatattcttctcaaaattcttctttatgtgactaatccaatttagccatgtttgtgaagggaatgcctcagtgacactaaatccagaagcaatctttaggccttcttccacagctaatataaaagctctttgttctttacacttcttaccaaaagcagctcttgcagtgatattatatgtcaatgagaatattttttcactaagattaaagggttgttgttgatgatgatcatgatcatgactaactacttttgaatgtacaaattgaactaaatcaaacacttcttcttctcgaattgatcgaaaagattggactcgtctagggcttaacaattcttctgagcaaatcttcctcatttgtctccaataatcaccataatgtgcaaatgcaatgtctataccataatacttacttgcaatgaggagaaaaggcctttgagaaaagttgacatcatgagttttcatcatctctttcgcaatctcgggtgaggagacaatgatatgaggaacttcaccgagttgaaggtgcatcaacggtccatatttcttagccaaatcgctcaaccggcgatgagggagagaagagcctataaggttgtgtagatttccaattagaggtagcttctttggccctggtggtaactttggtgttgatgtaattttgactttggttttggaactcttctttgaattagataaggttattatgagataggatgggatgatgatcatgatgaaaagaaacaaagttaagaaaattgagaaacaataatggaagagatactccatgatattgaaaaaaaaaaggtgtaagaagtattaagagtgttttgtgttatgaacaatattcattcaaagcttttacatactagtttatttttgtagtgttatgaacaattcatgatgatgcatgttttagtacatacttttttatgtgagattgatatatattaatataaagctctctataataatcaattattatttgctgaccatgtgtatacatagtgcaaattttgtcaacatataataatttactctagctaacatattgtactatacaaatataaattcattaaaggcattatacatcatggttggtgtcaattatcattccctaggctactgcaaatctgtactatattatttatgttctgctactgcaaataatttgtgtttaccatataagtctcttgtgttaagttttaatattctgcactatattatttcttttctactactgtaaatctgtgttctgcaataacaagtttccaatttgttattacagatctttacagttacattttttttactattttttttttttgattcagaaaaatttattaaactcaacaacaacaattacaagataacttacaaagcttttgttaaaactttcacccactcactatctatattactcaagttcttagtttttaaagagttcagtctagcacaaacactattagcaat

SEQ ID NO: 70033 - DNA, 1317 bp, Cannabis sativa
ccagcatggaaaaatcgtgaaaaataggatggggtagcacagcggagttatttacaggtatcaaatcccagcaggaatctcttacacaaaagactgacataagagagaattggtgcactagattcttctataaaacaacacactgacatagcatagaatgagtaaacaaacaggggctctcttccatataaagtttatttgactacgtttcttatatctcatcatcaccaaaaacgacttatttcttgtttccctttagataatatgtcatagtgctttcttttaattccatagaagaaatgagcttgctgccccaaatattgtaaccaaaactacaatactacataaaggttctatctttttatcttttgcatacaaaatcgtaaaatcttaacaaaagggtatgttaattttagcattattaaagatcttaattttgtttcttggttttggttttatctagattagtattcattcatgggttgatttgacttgcaattttctctcagctactactcatcagtaatttttcaatcttttgaagttgatcaaccatgtctcgtggtcctgtgggagacagtagccagcagcaactattttactcaagaactccccactttttcaagattattcttgaagagactcttcaagcaaacatgcttgtaagcattattcatctctttcttttctcttactaaacacataacattactccttataattctaagccagtaataaagttttcattaagtaacaacctcaattaacctctataaatagtactctatcccctgccatttcgggttggggcttgttttgttacacagagagaaatcacatagtgatcgagccaatatttgagagaacggagggatgtaaaaggggattgtctattcttgaaatagcttcccccatgtgagattgatatgtaattttgttacattgtttagtggcttgaatctctatctttctttctgtaattgtcatcaaagatcatcaataaagattcttcatgattcatggtggtattgagtatgagtcacattgatcatagctcaatctactaaaactctggtgtcattcttccctactgttttatattaaattgattatttggattcttgtttagtttgtactattctctactaactgatcttgttcaagtactgttcctgtttttacaattgcttgtatatctgttactagtaatttgaatctgtttatatgtgcttcttctacaccagcaagaatggtatggtagacctataggagtgtgtttgttttagacttatatgatcctaaagatattgcttacac

SEQ ID NO: 70034 - DNA, 3199 bp, Cannabis sativa
gaggcatgtcccggatgctgccttatatcacaaagacttagcaaataattcaagcattaagacgttttgatccacgtgtccctgtcaggttggtccacgtatattgggcgaaatcaggggcaacatttaccattcagaatttccacatccttgagattcgctctagagaataggatggtgtcatccgcaaacatgagatgggaaatttcaagcacattccgagccactcaaataccatgaaacaggcccctactttgctcatgggataataaacgagaaaacacttcattgcacagaagaaataggtacaaggacataggatcgccttggcgaatacctctaccaggctgaaatttcttcaaaggtcttccattgaggaggatagagtaggagccagtagaaacacaattcagtatcattttgacaaaatgtgggcagaacccgaaccgctccataacattcacaatctcttgagtgagaatggatgactccgtaatccatcttccaggttggaacgccgattgtatgggggcaatgatgtgatcaagaaccaatctcaatctttgggctatgattctgggaattactttatacacaaaattgcacaaagctataggtcggaatcgatcaacactgtctggattaatacccttgggaatgagacaaaaaaaattagttctgtaaagcaactaagataaaaactcacacacaaaaaccagttaaataaaataactcaaacaaaaaatccattcaacatgctcaaacccactaaatacttatacacataccatatttaccccaaaaatactaatttattatgttatataaccggttctattttagttataaccagtttgagttatttcgtattatttgtttttattcattataacattgttatagaactggttttattttaattataattggtttgagttattttgtgttatttgtttttatttattatgttacagaactggttatatttcaattataaccggtttgagttattttctattatttatttttattcattatgttatagaatcggttttatttttatttatatctgagacatctacttctggtgactttctcagcgatcttttccggtgatggtcactttttcagtgacttttctagcgactgtgactttttcgataacttttctagcgacactaactttttcggtgacttttttagcaccaatgacttttctcgacgacttttctggtgatgatgacttttccggcgaaaactttctattgttttaacaatatggaatttccatattttcttacaaaaatatggcataaaaaatcccatataaatgtacaaaaaaaaataaaaaaaaacctataacctcatattattatttatttatgccataaaaaagtaaacttttataattttccgatatattgtgtaatttctactttacaatgtagagtgtatttgtggggggtgcttgtttatccattcgcgatgctctaaataaattgaatggaacaattcaaattttagaagaaactattatactttcttttttattcatcatatgccaactaggaggcaatcttaaaagtcggaatcaagtatttattaaagattcaaaaactgtctttggaagagcttttaaagtctaaaaactacttttagatatgtttggataaaatatgagaagagcttttttgatttaaaagagctttttagagaagcaatgattctcaccagattttttagaaagggcttctaaaaaaaacacgggaagttattttttttagtttaatgaatcttttataatacctactttatccctttcatattcttctcataatgaaaacttaatagttttcagccaaaaaaaaaatcacagcacctatttttattgaagaaagaaaaaatagagttattgttttgtcaaaataattgaagattaatattctttaatttttctattctcattagaatctattaacaatttgattgcattcataataaaaagagaaaaaaaaaaaattaagctttgtttctttttaaagttgtgaatgttgatcacaacaaaatgaacgagtaattttttttttctttaatggtcgtttttttttatatttcttattaattattagaattttttttttcaaaaaactgatattttttttttatttttttttctttttaagttagaatttttatttaaaaaaaaacattaaaatctcattgtttgttaattaatgtaacaaacaaagactctcttgcaaaaataatggtgatggcatcattaacttgaagttaatccatggagactcaccaaaatatccattctattcttcttgacaaatctattgacacgcttatccatagcccttggatgatacacccaccaaccacttgatcttaataaaaaaagaacaacaaaaacaacattagtactaatactgccagccaatttgagttattcccgagcagaagagaatatctaatgagcatctccataggtacaccactttttccaattctagccattgctgacacaggaagcaatctcatgtggatccaatgccacccctgtccctatcgttttacccaaaagggtcttctatttcaacctgaatcttcctcatcttttcaccttcttccttgcaaattccaacagtactgtatacattaattaaaaaaaaacaattaaaaataaagataataaaataaattttttatattagttaacttgggaatcatattaatacatttatactaatttaataagctcgtgaactatatacataaaatccaatttttaaatatttctttcataatgataaaatttcttacatttcctttataatgataattatacataaaatttgattgagctatttatataaaaataatgtgattgagatagaagttttatgtattattctttcttttacaaattaaaatctttttattattgaggtgttttatatttatatatctttctttttaaattgttaccatgtttgtttaacattttacattcttgttttgtagtttttttttcttttaaaaggaaatttgacattttatgctaaaaaatgacaaatgattaattataccaccgccctaaattttttttaattatgctaatcttttagtgttaactccaaaatgcccctctcctcaaatcaaaaaaatttagctctctctctctctctct

SEQ ID NO: 70035 - DNA, 2530 bp, Cannabis sativa
cgcgccgacgtggcgagcctcaccgtgtcctcgttgaagcccaaaacgacgccgcttcggctgagtctaacagcaacaactacgctacctttgatatctctaagatacttaaggacgagggtgaagatgataagcctgatccgaataagccgtacagtctcggacccaaaatatccgattgggacgaacagcgtgccgagtggttgaaggaaaaccctggtttccctaactttatccgacctaataagcctcgggtccttctcgtaactgggtcttcgccgaaaccgtgtgaaaatccagttggggatcattacttattgaagtcgatcaagaacaaaattgattactgtaggcttcatggtattgaaattttctacaatatggctcttcttgatgcggagatggctggtttctgggctaagcttccattgattagaaagcttctgttatcgcatccagagatcgagttcctgtggtggatggatagtgatgcaatgttcaccgatatggcttttgaggttccttgggagcggtacaaggatcacaatttcgtgatgcacgggtggaacgagatggtttatgatgataagaattggattggactcaacactggaagctttcttttgaggaattgtcagtggtcgttggacattctcgatgcttgggctcctatgggtccgaaggggaaaatcagagacgatgctgggaagattctcactagggagctcaaaggaagacctgttttcgaagctgatgatcagtccgccatggtttatcttctgatgaaacacagagatttatggggtcaaaaggtttatttggagaatcattattatctccatggctattggggtattctcgttgatcgttatgaggagatgattgagaatcaccatccgggttttggcgaccaccgttggccattggtgacccattttgtcggttgcaagccttgtgggaaatttggtgattatccagttgagaggtgtttgagacaaatggacagagctttcaattttggggataatcagattttgcaaatgtatggattcactcacaagactcttgctagtaagaaagttaagagggttaggaacgatactagtaaccctcttgaagtgaaagatgagcttggattgcttcaccctgcattcaaagcggtcaaggtatcatcatcatgatcatgatcattataataatatagatcttttagcttcaatttcaagtataatgttgagatgggaaattccattattattattattgttttcttttttggtcataatttatgatgatacatatatcagtttgtacgttatcagttactcaactatgttctagcaccaccatcattggctgtttctattctctcttcaattttttttttttggatctgtcttgtagctatttaaagttgaaattgtattgatttttgaaagaaaagcatagcatcccttcctctatctcaagacttgtattactgactggtagaatcaaataagatgaaattacaaaatcggatttttatgttggtggtgattgaaactttcttggctttgacctgtacagtttatatattgcctaatgtgaattcttgacactgttgagggataattcttttctttcattttcagcaataaattttggtaagcatagttgggttgtgttatgtactgtcttatgattggattaagtgatagaatcccattttgcttaaagattttaccatatgtttgtttttgtttcttctcgagaactttaaattttccatgtaagcaaacacaatggaggaactaatagtttctaataactagtggcagtggctgtattatgttttcattcagtttttctctgtattagctcaaaggtatattgtactagattaatatagggatctgaactctgaacattgtgaagtgaagaactaagcttagttgatttcacttcatggatatgaactaaactgtagttgattccacttgaagatttattggatggacactacatagatgtgacgcattgcaagtggttagtagttttcatgttatttattcaatcaaaatgttgatagtgaattgtctttgcataatggttattattggcaaaatttctcttgttaaattcttttatagtgtaattatctttgtaaattttcttcaagcatatatccactatgtgatatcttatattggttgtcacttgctacaaaattttctcaatttagactttattttcactttgtcaagtaccatagaggttccttccaaaaaataaaataaaaaataaagtatgaagaatggctttcaaacagaagagagaaagaactatgttagccaatttgagatttataagtgaatggaaagaaagtaattgtcgcttagcttagctaagagccttgatttgttttcatctcacttaaacgatcataacccaacaaagtttacagctaataaatgattttaagtgctcggcatatgcattagtttccaagagcaaagttttttaaagttacataataatttacatatat

SEQ ID NO: 70036 - DNA, 1126 bp, Cannabis sativa
  modified_base (562)..(584): a, c, t, g, unknown or other
ttttgaaatacctttccattttcttcctggatcaatagcaagtgaattgaggaccatagaaagggtagcgagtccacaataggcaggctcagattgcgtttggtagtaagaaataagcttgaaaaacccttccattgttccatctcctaaagcttcgctaaaaagtgtctgcaaatacataatatttataaattcacaaagtgacccaataaagaagatgaatgagaaaatcaatgaatgaataatcgcgaaagagtaaagttagggtttgttggtacctttccttgaggggaagcgaattcaatcgcgggaggagagggaaggactcttctgtagagacctgcaactgccattgatatgagaattgagaaatgaagaatctttactcaaattgttctatggaatttgatatgtttgtatatatacatatagtcatatacaactatatgacttgacagttgacagtttttttctgaagggtaccgttgacagtttaactggcggatttattcatgtccagatttctttttccattttcaaattaaataataataataataannnnnnnnnnnnnnnnnnnnnnnataataataataataataaatggccaaagagccttggaaaaatcttcaactcaattggaagattctattttttttctttttcgacaaaaatatgtgtttttagctaattaaaatctttcttcctaaacttttacatatactaccttataatctctaaaacttttaaatttttatccatgactttttttaataaaattacataaaaattcttaaatttaacaattttaatgtaaaatttttaatagtataacaaaaatttaaattaacatttttttagatatataaaatttatgtcatattcaattgatttattaattttcttttagatagtaatcagaatcacttctaatatattaaactttaaaacaagattataatagaaatattactttttttatggtagatggataaattataatctatatatttatatgaggatgtataaaaattctgaaaaaaaattacagttcaatgaatcaattgcaggcatgctaacttttttatttcaaacagcaaactattttaaaatgagcttactaatt

SEQ ID NO: 70037 - DNA, 2406 bp, Cannabis sativa
aatactcacattatttggtgtttttaaaattcctccaacaacaataactttgtaacatcagattttttaccaatgaaaagttgaagatttttcaatttatttattttagaaaaaaaaaaaaaggactaaataatgtatgcaaattggtaattcttttttatttatttatttatatgatacaaaacatgtgcttgtactccgacagtaccccgaatatatatctctcatctattaatataaatacgtactcatcagttcttcaagatagtcaaagataggattaacgacttagtgatgactactatatatggagtaggtggaattcgattgtgagtgatatatgcatatatatagtatatggaaagaagttatatattaacttatggtttcaacagaaaatcaaggattgggtgaagggtatcaaagacgtagctgtatgtcttctctgttgggtgtattgaatcccaaaacatgtacttatttgcatcagggcacacatacgaaagtgggttacacaaaaacgtaacttcaaggtatccagttccacaacatcccttaaagatttccttcaaacctgtacaacaaccaaaaaaaaaaaacatatatatatataaatatattagaaatccccatacgttcgataacttaattacaatctttttttttttcatttaaatcaattcacatcattttcttcatagaacttaaatagagtaacagtactctacatacaatttgtaaaatatttaccaaattttgtaggttctcggatcaattccatcaccggtccatataaatccacataggctatccttgcaccaaaatttgccaagctactctgcatggaaaccaattgattttggagaagtttattgtaatctcttgctgcggaattatacttgtcgatgcatccacgtggctgaaattcattgggtgagtttaatgttataacacctggcaagcagcccattggaggaagcccacctactacgatccttcgagctccttcgccccataaatcctttcgtttaaaataatatttaaaataaatattgggtataaattaaaaataaaaaatcacaatatttatagattataattaaaataaataaataaataaaaggtttcaatacatgtgtgtcgtccattcgtccattactagcatctgcttccacggggcacctcagctatcctaatttttttttattaagcaaagtgagtgttataggtgtataaaacaaactatatgaacttacttttgagtaaatatattattaacaaaaggcccactttcttaattaagaactcttattttaatatgattattaaggagtctgttcctgttaatttactgtacttacttttgaaggacctttaattaatggaagcaactttttcttttcaaaaaaaatatatattattaacaatggagtaaaatgcggcataattttgaagattttcatctcactaataattaatatttaaatttatttttagcagtaaaagttttcaaatctgcgatctatcatcaattaatcatttttatttatttttagcagttaaatgctagattaatatctatctctatatatagaaaattgtccacataaacacacctatattattagctcacctaaataaatattaaaaagcaaaatttaaagtaagttaatttaaaacaaaaaaaatcatttaaaaaaaatattttttttctttcttttttctcagcttttgttttttttgttttttacaattacagtccacactctctgtgtcctctctctctaattctctctcaatatctctttttctacacgtggacccatttgtgggttagatgtggatgggcttcagggttgacagggatggggatggggtttgtggttcgatggtgatgaggtttgtgggtttgcggtttcgacaagtttgtgggtttgacgaagattgggacaggttcgtgtggttcgaacggggatggggacgggttcgtggtttgacgaagatgaggttttggctttgtgggtgtggagatctcgcaggttgatagtcggggccacgcttcgaagttgcagtggagatctcaaatctggtttaatgttggagaaacacatatgagatcttgggggtgtagatctagaatttttgtatatatgaatgtgtgttttgtttgatctagctttgtttaaatttagttttatttttaattaatttttttagtgcgattattttgatatgaaaagtagagtgaagtggtggtggttgttgcagtagtggtgatggtatatataaagaatgaagaagataaatagaaaaaaaataatgaagactatctctaacaaagaaaaagaaagaaaatatattaaaaaatacggtttttttatttttacacttaaaaacagttttttt

SEQ ID NO: 70038 - DNA, 2302 bp, Cannabis sativa
agagagagagagagagaggcatgatacattcatgtaataaaatatataagatatatatgaatagtcgaccaccaacagatatgcatgtctttgaaatgagaataaaaaattggatttcttgtttatttgggtcataaattatgatttatgctatgtttggaagtgaatatgcccagaatcttcattatgacatttttgtcattaagaccatagtgcatcgacatcttcatacatatatttatacaatatttttatatatacatattaatgcaaaatataaatgcgaatggggtttttcaaaagagttggaagagtcgtttggccttagattcactcgaagagacactttcattcttaaatttctctttttgtctttcctttagaggcaggtagctcaagtccaactccatcttctatggatccatgttttctttcttctaaattaaacattaataatataataattttaattttccaataaattcatttcttctattgatcattttctatgttttttttttcttcctttgacccaactattgaaaaattcgacctaactataaaaaagattaataatttttatatatctgttggatcacggtgtgcctcatgatgatctaacggtatttgtttcaggtaataataatccatcaagatatatctactcctataattattaccgataaataattatttattttacaacaaatgaaatccctcaaatcacattgaatttaattaatcctcgatttatttgttgagatttcaaatagtactacatataattaatacatgtactattcaagcaagataatacaatatacgtactactttgtaggcccggccattattaatataattaaaactatagctatactatatataatcacttttaattaattaatctgataattacgtttatatataaattaataaatagaatcttggacgaggtaagattcttgggtatcggaatatatatcttctatatatactctttcgttaccaaaaaagataagttaaacaaatggagaatatactattataggctttaattaacacacattggatgtcatgatataaatatatattacttttatgtgctcgtcctacttatagtactcaattatgttgattaattaattaagttttaaaatatattgttgaatggcataattagaagaatataataacattaggaggggtgccatatggggatgctagttttgcacttggacatatataacatgagtttgttttcttctacacaagccgaaatggaaaacactcagcattgtcttattattatatatattaataatataattatatataatatgttggcaccaaatttatgataatatattttgtttagcttagttgtactaagattctcactctcatattaattatgctgccacgttacatacataacgtttcatgattattcagatccaccgccatgcagccatattattcatttgtagctctctctcctcatttcttactctttatccttttggttaaatagtagtaagtagtacacatttacttaatgtattttatattactatatttagtgttaacttatatttatatataacatatttagtattaacttatgtctcgatcactaagcacactgctaatacttttgcttataaactcgctaaactggctttagggttagatgaagttacaatttaaattggagatgatccttgtaattttacgctcttctctctctttaagggcatccttcctctctcaaaaaaaaaaaaaaatatttacatataactatataatattaaaatataaatttaggaatttttttaatataggagtataaaaaaaactccatgtataagggtatcattcaatgaataaaagagtaccacgcggtattattttttattttgagaaacatgtgatttttctactttatcatatttttctctccgtctcttcaatcccttcttcttcttcttctttatctttttttttactgcaaatgtgtaacagcaagtttgaatgatgtttatatattctacccactcatttcttaaaacgcagacgaaactcaagtaattgacattcatatattcaatttaattagggatttggggattttatcccaatgtttattttggaatttttcttccatttttattttcactactagggaaatgacttttggaaacacttttttttaacttaagagaattaaaagacaacacttgtaaaagtgttgcctcttagaccgttgccaaaagatagagtataagacaacacttgtataagt

SEQ ID NO: 70039 - DNA, 1873 bp, Cannabis sativa
atcattgctttcttcttgttatattttgtacttttttttcttttgagatgagattaaagcttgattttaaaaacacttgtttttgttatcttatacgatcccttattaattctgaatgtcgttttgttttcatactttaagaccatttgtggacacacataacttcttttttgtgcttcatttatggttaattttttattttccagaacaaatatcggtgttgcttgaaaaacaagagagactatatcagagacaatcagaactaaagaccctgctggaagcagcgaaagggtccacgaacaatgttaatgatagtactccaactgttgtagaaaattggtctgggccttttgagtgggattctgaagctgatgatattagattcaatatctttggcatatcctcttatcgtgccaatcaacgagaggtgactacattgtagatacactcatgaaaaggaaaaaccaactctgtgaatacattgtgagtaaaaactccagagagttaaacattatgaaagaacaacagtgcatgataagtttgtgtgcaaatgtttaatgctctggagtcattattcgcatgtgtttttgtgaaatttactgattttgtcaactaatatcagatcataaatgctgtcatgagtggaagagatgttctagtgattatggctgctggtggtgggaagagcctctgttatcagcttccagcacttcttcgcaatggagttgcccttgttgtcagtcccctactttcactaatccaggatcaggtagcttgtttaaactcagtcaaaccctttgtaaggatgacatatgcaaacttcatcttagaaatctaaatcagcttctttgacaataaacatgggtttaggtgatgggcttggctgctttaggaatttcggcaaatatgttgacgtcaactactagtaaggaggaggagaaatttatttacaaggcccttgaaaagggtgaaggagacttgaaaatattgtacgtgacaccagagaaggtatcaaagagcaagagatttatgtcaaagcttgaaaagtgccaccatgctggtcgtctcgctttgatttcaattgatgtaaggattttgctttcaatcaaatttgatttgagatcatgtgcattattgaagtaaattaatatttttttgttgaattttcttattcaacctaatggtatttaggatttagttatttgaaataaagatttagtctttggtcgaatagctgggttttattgtgcatccctttatctaagattgttattttgatttgattcattcctttatttaaaaatatatgtatgatacgcctgtgtacaaagaaatcaatctaaaataatgattaagcctttccctataatgtagttaaaatgttttatcaattcttggaatctagacatgtttcctagtgtgtctgtgtgtttctttaacgacatagccttgtataattgataatggtattaagacataaccataccatcaatattttgattagggattagttcaaaatgtttcttgaaggttgagttttatgggcttaaggtagcttaagctcttggtatggattgtttatctaacaaaatctctaattggaattgctatgaagtgtagcttcctatgaggctcttctaaataacatattaagctattcaaatttgtaaccctccttaaagtggatggaaggcttaaaaggctaaagaaagctatttctaactggcccaaagttcattgcttgttcgtcttctaaattcgtaatcatgatattttctgatgggtctttaatttatctcaatatttagagcaggaggtcttgaatttaaaattttgcaagtgccctcttcaattgtcaccacacgataagttt

SEQ ID NO: 70040 - DNA, 2265 bp, Cannabis sativa
ttgtataatttgtacatatagtttaaacttcaatatctaaaaattagtgataagtgatattttaaaattattattttgtaatgttgattctttttattttattttggtctaaaaaaatattttaataataatattaataatatattttccttcaaaataattaattttttgaaaaaaataaatatatttcacgcatagcacgagtatcctaactaagtatatatataaaaactcaattgtacttttgactggtttcaaataattaagatcaagaacaatatgatttgaatcaactcatattgctttcattcattgaagaagaccaccgatcaaaaaagattgtcccagtttcccataaagaatggtaatgatgatgagtgtttgaattaactttcaagagtcatgaacattaaggattatatgtgtcgtttattattatgtttgatatattcaagtgtatatgtgtctctagtgtctagtatgtgtattcaaaaattgactgagaattgacccatttaaacatgtgataataataattattgataagtctcttttctgaaaatcttttgacagcctcccgattttcacgcgagtgtgttaaaggccaaattaagtcttaactttcaatttgctaattatgtataattaaattaattattggaaccaatggctgcgcatttacaaggatttaggattgtatttaaggacaaacaagaacaagtggattaatttttgttcatggtgtttttgaaataattcatcttcatctaaattatctctttaattgtctctgttctatttatactataataaataataaacaaatatatagtcattctagaatgaaaactatataatacaactaaagttaaatacacatattccatatacattaatattggaaagacttcgtaatagtgtacgtagtaagtttgacttaaccaaaatttgattatttttttttcagtgcttgtatgaaaattgctcttcaaatatatatttccttaaaaggtttacaagttaacaaaggttgaagaatattggtaagtgttttttaacttgcatgacaacttttcctcgatattgcataggtttgtttattattttatttacttttatcattgtgtttaaagattcaaataaaagtagtaattgttttatttacttttcatgaaatacaatttacttttataagaaaacacaattttatttttctcattaaggcaaagtacgtagcttttagtgttcaagtttattagttgtggatgtggtatagtacttcgtttttactttatcaataggattgaattaatctccataaacacattaaagtgttttgattgttatgttaaatattatttttcgtcattaatagcgtaaattttgaatcttatggtttgattaaattatataattattttttatcaaaatgaattgaaaaaaataaattttttattgtctataccttttactttagaacatctcacaataaaaacaaagctatttatatttttcaatttaacactcttatactagataataaatattaagtatcaccccattaaatattagaatattttgaatagatgcctaaaataaatccgtgagcttaaatttaaggtagacaataacatactaatgtggggtgagcttgtagctcaacaagttggatgaacgggacccaacaagtgatatcaaagccaaatatttaggagttggaattgtgggctaagctcttagtgtaatgacttcgcaattgaaaattgcatggtgtcttgtattaaaagtctttgatattatggtagtcaagcagcatgttgagatggagatatgtgtttagagtcttatgtcaaaagtcttcatcacaatgtaaaaggtcgcttcttatgtcaaaagtcttcatcacaatgtaaaaggtcaagcgacgagttctattagtgatagtggcaatacaaagatgattttgccaaaagagaagctaccgtccttaatttgataagattgattgggtattgattgaagtctgataagttgtggcgaggcatctgcgtgttgtttagctcttgaaacggcaaagctcaagaggcacaagttcatcatcgtagaaagtgactcaagagtggtgatcgatgctcttaatcaagtgtccttggtttgggggattgagaactattcttctttgtgttggaaactctccagatgttttgatggatgcgtgtttacttgtatacccagattttgtaatgtgaaaattacatgaaatat

SEQ ID NO: 70041 - DNA, 2929 bp, Cannabis sativa
  modified_base (554)..(556): a, c, t, g, unknown or other
agggaataaaacccaacagttatggtgtcagtgatagtgtttttggtgacgcccatgattcttttatttagggaataaaacccaacagttatgcactatattctctgagaattctagtgagtaataaaatataagtgttcaaataatctttgaataagggcagatttgggttcatacttctaaattggattttgctgacgcgccatgtggtaaagcagtgacttgcagcactgcgctggacgttgcgaagacttatggctttaagtttattattgttgaaagtgattcaagggtagttatcaacgctattaaccggattgagtccatgtgagagcttgagaactatgtctcatcttgtattagatcctccctttctttttacttgtattttctctaatattagtaagaattgtaattttgctgtccagggcgtttacctaccagaggttgggatgcattcctattccctcgatccctgaacatcttgtttgtaatgaccgcgaggtctaattcgttttatctaatatatgaacgcttttcttcaaaaaaaaaannnaaattaaataaataaataaaaatcctccaacaatatatttcataatgcattttgtattatatttaaaatttagtattaaactaattaaagcaatataaaacatcaaccgaacatattttctttgttttgtttttgaaagtgctccaaacatagtattactagcacacccacaatttaatagagaaggccttctacagagtggcaatgcgaggaccttatgatgatcatatgaagaaaagacgcaaacttatagaaagattatcctagtgtaaacaatatatatataattaataatatgaaagcagcttattatgattaatactataataataacttaggtagatgaaatattgttgagaggctgaaagccatgtcgaagggctgcttcccaaactttgtgaaaatgagagaaatctgcattattattattattattattattattattagtggtaggaataacaccacattcatgctcattccaatcttctaagccatgtactatcccagctacacgccatgcactcatcacccttcttggcaaccaattctgttcatatattaattaattattaatactgttatttatatatatttaacaaactaattaatacgaataataaataaataaataaaatgttattatatattatacctcacaagagtggacattctcgagagatttaggagttaacattgcaggagtgtagtggtagaaacagtctttgcgtaatttcttaggttggaattgagagaaaggaataaatacggttccttttgaagctttcaattgttcttcttcacttaatccatctcccactaaccaaacctatataaatttatataaatatataattaccattaattctgaccatatatatcatttctcatatttattaagtcaatattatccagctttaatatcattaatacctggtaagaagtacttttggtgagaaccaaattactcttagagtcaacattgagtaaaaagtttttaagtttggtatactcatcctctcgcaatgttgccacctgaagaaaataagtaatgtaattattattaaaaaatcatcaacttaatttaataaataatattatattattaataataaaattacctgaatacccttgcggcacaaagccaaggcaaccaaagaagcaactttggtaattttgcctctaagcaggacttgggttgtgggtttgggtatggtgttgagtattactgccactgcaaggctactgccatccacaactttagtcttcaactcaggatgccttttcacatagagtgcaccatatgcattcagctcttcactctgcagtagtttacattttctaatttcaatcattctatttctcacaatctactattacatgttccatagtactgtataatcttaataattaatcatatattggtagaggtattgggtatttgatattagctatggtgggagtagagttacaatcctaataattatacattggtcaagattgaccgtattgtctaaataaatggtaaaaattatgcactgacactgacagtatacatatattacttacttgatttaagagaccaagactcaaaactttaactcctttctcttcagcttcaagtatggcttcctcaaccaagctgttgattgatgcattttgccattgcaaagagtactacaaaaaaaaacattataacttttatatacaagtacgaatactgtaaggctagtattacatatgattattaaatatatattatattaattgcgtacgtacttggagcttgtattttggtatagcccaagtttgtacgttgagtcgattaaaacgatgcctttccacaacaaatggacggccataaatccaagttatcatgatggaccagagagtgaggggccacataaacatcatgatgtaccatttgggtgacacgtagggctttgatgacacgtgggcaaatcctacttgtaagtggaaaatagactccggtgttgtgagatgcgttaagtacaccacttgagctgattcttctcctcttttcaacgacgtttcataaagactatcagtactcttgtccattgttccatatagatagtcataaagtggcataaataatgaatagttggttcgaaattgagtgtggtgcaatgaatggaacctgaaaatgtaccacagatatgcatatcacaacaatgaagaattaattgtacaactacgtttacatatatacaaggaaaagagaaacttacgaaggagtatacatgaagtacttaagaggtggaaatatagagaagagtgatttaggaacgagctcaaaattgcaatgacccaaattgttcatgaaatcaatgtaagtcatataaccagcaa

SEQ ID NO: 70042 - DNA, 1698 bp, Cannabis sativa
aatggagttgatgagacagaaatttctggaagaatccaccatggagctggtggacttggtttctgaactggagatctctgaggaaatggggaggaaaggagcactggccaaatgttttggcaaacttcctctgccaaagaacagagttaagcaaatcttgaatggaatatgggttctccgagggaaatggtggatgaaaacacttgaactgggtctatggggtattttctttgaacttgaggaggatttgaagcaggtgtttgaagggagaccgtggatcttgggaggccaagtcttaaaccttaaagaatggccggagtgtggaaggtggcaaggagtgatatgaacttggcgagggtatgggttgagattcatggccttccaacgccctatctcgcggtgcagaatgctccggtgattggagccaaagtgggaacatatgttaagtttgacaaagctgatcctagagttatagccaggcgggggtatctgaaactaatggtggagattgacttaacccaaaaaataccggcgggattccatctaagtatcaacaggggaagaaaggagtgggtgcagttcaagtattgtaaaattcccctactctgcttcaactgtggatatttgtttcatgaagaaaaggaatgttggaggcagaaggaatttgcttttcctcccattggggaggctgtccaactctatggtgtatggatcaaggcaggctcatcggttcggagctgtttcgatacgagaaatatggcgacggggaatagaagaggtgtttgccctgaaacaatgactactaaactcaagaatttgtctctgaacggggaaaacgacggcagagctagaaattctggtggggctgagaaagatacacgggggccggagaaaggacaatgcttaggtggggaggattccactcagaaccgtacatttcgtacgaggaatcgtggtgacagtatggaatgtcagacggcaaggagaatggtgcaacggtcttgtacgaataatggggaccacccaatggccaacgtggagaaacaccctggagatgatggagtgattttatcccttatgcccaatgttgggccatcctcggcccaaacgttggaacaccctcaccaaaaaacttgcaaatcaagaacaccacatcagcacccagaacccacgccagtggaggtggaaaagaatatgggccttgaaacgtctgtggccctcttactgggcaatgaactggacctacagagaggtgaaacaatatctattgttagtgatgaggatgggctccaagcccaaatcattgctgggcctggccaaaaaaagaggaaggcctcaataccaattattcctattgatacctcagggaaggtgattaacgacccaggaccggtaatccaaagtaataccagtctccctttctcacctgctaactcaccaatttttgcagtgggaaggtatgacgaaaacttgtcctccggaaaaaggacgaagacggggagctcccacggcaagaggaagggcgggccaaggaaagatagtagaacaaaagagaatccaacgacaggtgaaaccggtgtgggaaataaaactcaagtggcacgaggggatgaaggggagagacttactttggtggatattgaagtgcaacaggattttcatgtgggcgaggaggcggcccttaccatgcccccccat

SEQ ID NO: 70043 - DNA, 1822 bp, Cannabis sativa
agttcgacccgaacctgaacaacccacccgaactcgaacccatgaacccgcaatttttttttttttttaaaaaaggttcaggtaggtcgggttcaacccggtacccttcgagcgggttcgcgggttgagtttttaagggtaccgggtttcgggttgaacccgagaacccgcctgccaacccataatttaaatatattatatatattttttattttttttttattacagtttatatatattaaattattaattaaaaaataaaaaatcctaaaacatttttacatttcagcagccctaacctaacataattaacactaacatttcacacacacacggatggtgggaacttgaagttaataatggatggtgagaaagaaagcaaattggaaaagtatgagcctcgtacaccaaaggcagctgtaatggtttcacttgggaggaaagaggcagtggctcatttcacattcacaaccgtttctggaaatgttcctggaatggtcaaatccaaagacctctttgtagggaggacaaggaagaagttgggtctacaagttgtttgtttgttggttgaattgattaatgcttcttttcttcaatagtagatttgatgaataaatttatatattatatatgtttaatttaataaataaaaaaaaaaaggatataattatttgaataaaaaattattttttttaacgagttgaccgggtcaacccgccaacccggccaaccgaaacatgccaacccgtgccctattcgagttcgggttcggttttatttttttgaatccgaaacccgcgaacctaaaacccggtaaactcgcccgatgttcaaccctagttcatatatgaaattaaaagcacaaaaccaaaaaatagcaaatccatggagttaaaaagaacactaaagagtagaagatgatacaaatttaaagaggagagcaaaacaaatgagttagtgagctcaagtcctctctattgtgattgcatttttctccttcttggtcttcttcttcttctcttcattgtatctttttttttctctgtactttgctgaaaatggtactactacttaaagcttcaaagtgcagccattatcttccatttttctatatttttggttgccccaatgagggtactaaagtttaccctaattgggaatccaagtcatttgtccacttgtttttttttttccacacatcagctgactcattgtacaacattctcaccacctaagcaccctttattcctcatttaatctagctggaacactgtcacgattttcttactgggcttgccgattgctacatgataattgctacaacaataatagtcagcatcatgcatgcatttccctgcttctttttcttctgttcccaaaatttcccaccacctacttccgcctttttcttgcttaacacacacaaaattagtaacataagttactctaacaattaatagcacaaacacatttttatttactacaaagacacaacaaactaaacacaattacataaaatagacactaatttctctactatttggtttaaaactcaagtttaaagatatcaaaataactctaaatcttagagttatcacagacgttctccaattttgatttcttcaaaagaagagaagatcgtgtttgcaagagagatagatgttctttgatttcacgattattgtttgatttctttgatttcttgagacgttcttttttttagtttttttacataagaataataggttaacgacattattgaaaacgttaaaaaaaaaaaaaaaaaaaaaatcgttaaaaaagttaaaaattaaaaatactt

SEQ ID NO: 70044 - DNA, 1734 bp, Cannabis sativa
catcttgtttatcaaaaactaatggcggggagttgttaaccctcaagggcatttttgtaagagcactgtttcaaaaggagatcaagagaagagtaagcaaaacagtctaactatacttatataattgttgttgagctaattatctaacccaagagaaagaataaaatagttatatataacttaataaaaaatatttttctaagaagaaaagtatgaaattactagattatatctatacttcaattattgtgttttacatattaaattattacactatttatatttgaaagattcttgagtgtgaaatattaaagactagcattacatacatgatattgttaatcatgtaattttgttatttagatattcttattccacaaaaatctaaaacacattacaaattaatgaagcattatttatggtactcatcaccttattctactactttattaatgttgaaagtataaattatattacgcgttcaagcaaaacaaacagattaattgcgtatcctgaatcatagattaaggacgattgttcttcaagtttcttctgaaacaaatcaaagatttcgtctaaaagttcttcttcaacaccgaaatgtttcttaaacattcctcccatgccccctcttattgtggaggataacacattgggttgaggtttttcttggtcttggctctccattatctctatgctaaaacgtccattttgtttcaccacttttttgaattcttgtggagatgtaaaatatactggaatgtttaatgcgtcaagttttccgtgactaatttttccctgtaaattttaatatatacgtttaaataaatgagaaactagctatggtaatactcatcgaataataatatgtacaattaaatcatacacttaaatattatatgtatagtgacatgtattgatattttctgaagacaaaaacaataaatctaatttaaataattatacattattgtttgtgatgttttgatgcataattagagtgcacagatcattactcattcatctcgatcaatcgtaaatgaaagaaaagtctaattaaaatgactagcatgagaatatgtttttaaattatgggacaatttttaatctatagtttgcaaaaatatggaaggctaattaaaatttttactctaaattttaatatgtaccaaattttgttgttaaaatttttcttgaactattgaaattattagatttaaagattttttttttctaattttagtaaagaaagtttaacatagatgaaagttcaggtgacttaatttggtaatattaaagttcgagtggcataatttggtaaatatcaatttttagggagtataatttagtacatgaaggatcacagaattagtaaattgaataaaattggacaaatgtcctcaatagcttaaggagaatttttaatagagaaaaaagttcaaggatataatttggtacatatcaaagttaggggacaaaaatcctaattagccaatataaaattatacctttataacatgatgattaagtcctaaatagcaagcttttagaaagtacatattaataattatatgaggcctattatatatttagttatattataaatagtttaatattgttacatatttttgttgtgagacactactaaattttatgcaaattaacataacgtttataaaataataatgatgtaaaacactattataaagggtgatcatgataccataccttgtt

SEQ ID NO: 70045 - DNA, 1398 bp, Cannabis sativa
atatatactacctaactaccttaatacaatgacccatttacccttattatttaatacctcaaggcctaaaagcatcattggacaacaccacttctattgattctaagcaccttaaaattttcaaattcaatccatttttttacttttagcaagcatgtcatcgtttcatttgattcacataataaaaatattatgtatttaatctaaaaatttagtatcactttcattttagtatctataccttacccaccaaaactaatgcgcaagtagaaagcactatccattaaaaaaagaagtccaactagaaccaatcataggaagcaggacacaaaagaagaaagactgttcagtgtttacttacatttcagtttttaatataagcataacaaaaaaaaatgatctgtagtgtagataaatcaacataacaaatttctttctataatactgtcttatttggttatccttcaacgatagccaatataacaaacaaacaaaataatttagtcgtccaaattacattcaaaaaccaaccagaaaatcccaatttgtactccctttcttttggagataggatcacctggaacagcaagaatagttctggtttttctttgatccatttgcgccctcgtcgactaggcttaccctgtttacagataattctgctttgtaagtgtctgagtttaggactttgcggctgacattgttgtaaatttctcgaatgacaagctcgaaagcctttctaacatttgtggaatctagtgctgatgtctccatgaagaacagtccttcggcttctgcaaggcttttcccttcctcgacactcacatccctaatattctccaaatcacttttgttcccaactagcatcctagccacagttgtatctgaatgagctgcaagattgttcccagaaaaaaggggtcaattactaagatctcacatgtatttaataaatgtcaatcaataataattcacattccccgaaatcaagagtatgtgccgcttaataattcatattctccgaattctgtgatttccaataatcagagatactcaaagaacccaatttggttaggtatcattaatgatatttgagaagctttataatacgaacttaaatgagacacacacaaaaatttattcatttttcataaatgcaaaatatgctttgttgtatacggcaaagaaactgagaaaaattataaaacaaaagaaatataagagttttgaaggagttcccatactactgagtttgcttgttataactctttggtatgaagtttagacttatgggaataaaaatgtcaaatttaaattaaatttaaatggtgggtttgtgtttacaagtaggtcttactttttaaattaaaatggtgttaatcccctctaacacttggg

SEQ ID NO: 70046 - DNA, 1814 bp, Cannabis sativa
  modified_base (1609)..(1616): a, c, t, g, unknown or other
tatccctaaaaatacatttttccaaaaaaaacttgcttcctaacattttgattagggaaaaactttgcttttaccttaaatagtttaaaaaaattatttttagtacaatagagagatcaattctatcaagttgcaggtttactaaaaagatatacccttacttttatatggatatagactcaccattggataccaaaaatttacttcctttgcaaatccaaaggctcacatccatatgaggtattaaattcctcaaatattattgaggttttacataatttgccaaaaaaaaaatacaaagagatataaggaagaaaaaaaaactttataaaagaataaataaaagagtaaaaaacaaaaaaaataaaaaagtaataaaagtataaatgtaaattttagaaaaaacttagtatatggtataaatatatatttttttttttgcaagtgctaggggtttctacaccacatactaaaatttctaacttttttacttttctactgtggggtggaattttttcaaaaatactatgtaagttttatattgtgcactgtgttaagttttcacggttgttctacgattattgtttagttgttccactgttgtttttataaaatttgttttgttgttttatggttgttttataaaaagatagtttttttgtaaaaaaatttgtgtgacaataaaattgtaaacttttgacaaaattccaatatttttgttaaagccccaaaaaacagaatcatgaaaaagtaatcagcaggtccgttaagtagaagcccacgatacaatccttatgcataggcacaaatgggtcaaacccattgggcctataatgcattataagttgtgaaccacacattatctattgccaattaagaggaaatacacgagcaaaaatatgattgttttcttaaacagttattttattggaaaaagaaataaatggaaaaacaattaagggtgcaaaggttaactaattacctccttaaggtaactagttatcttattgcttttacatttttttttttgaattttcccatattcttttttaagaagtcatatttttcataaacttgtgccttaagaaccataaaatgaaaattgccctttattcaaaatgtccacttaattatttatactaaaacttttttttagttaaattgctactcattttttatacttcactagtaaaatacaacattcattctatatagtttagtgttgaataattccataaaaatagtatttgtcatacaataaattataccaagaggtgtttgtgaagttcacctcaactattttttgtggaatatatataagctgccaaattgtggaggtgttgcatgttacttgaatttgtaaacattggagtatatatccaaattattaattggaaattttggaaatatatgttcatatagagaagtaactatatttactacaaagttcaaggaagtataaattataatgtttctaatggaaaatgtcaactataagaggaggtttttttttttttttttttggggaaatttactaaaatactgaaatttgggttaatttttacataaatactgtcacacgatttttttctttcaaaaatactgtgtnnnnnnnnaacactagtaaaacacaaaacagaacaactcaaaacagcagtagaacactaataaaacatcagtagaacactaatgaaaacttgacacagtatactccagtatgaaacttataaaaaaacacagtataaaagtaaaaaataccgccttgcaatatttttgtaaaaaaatagcggaagttagtataccatgtaattttt

SEQ ID NO: 70047 - DNA, 2775 bp, Cannabis sativa
  modified_base (2583)..(2594): a, c, t, g, unknown or other
aaaagaaacagattttcttccgttttcttttcgtaaaaatataaactagcatttttttaagaaaaattatctttatatttctatttttatttaggcagtcattgttaaaaattagaccttaaaataataattttattctttgaatgaaaaattattaacattttaaaattaaaattagtttaatgttattattaataaattataataatatattaatagattaaaaaacattataaatctaaaaattagtttaaggtaattacaaataaaatattggcaccaatcaaatatttttctatgaaaagaggacttttacagattgttgtatagtttgagaaatcattaaaaataattttataatttggggaatatataatggaatatattcatttcgtaaaaaataaaaaatgaatattttactaattgtgactcacatttccggtctttttatgggataacttagaagaagctggatttaagcataagtggaaagattgcttggctaatgtatcttagattcttatcttaatgtatcttttttacatgtctttagaaatagaaatgtaatagctcataatttagatagagaaataaaattagaaagcaaaaatttaattagaaaccagtgaatctctcgaaagaacacatataattattatcctttcctgtgctgaaaggatgctcatataattgatctttgatttatttatttatcatttatcatttatcatctataattcatgtttatcgtttggtactctaacaatcctgtatgaatataataaattgtcaacatcaacataatttgtctaacaaaaggatgacatatatgatcaattattatgtctatcacttcaccagttcgccacaaaactagctagaacaacataaatattattaggttaatcctttgattaaccgttatctttgacacgttggcttcttctaaaataaagtcacggagagagaacaaaagttttcacaagaagacaattcctacaattaacaaatataaaatataattagaaatcatactttattaatctaatacctaaaaaatgtttttgtagatgagaaactataaccattgattcgatttggaattggatcatatgaacaactatttgtaaattaataatatttaataaatcaagacttattgcaacaaatcaggtgaaagttgtactaaataatatattgttaataataaaaacaatatacaaactttttttaacatatgtatgaaaaatgtaaaaagtatcaactatttgaaagcgaacttttgtcgtatctccacgtgatacaagctacgtgttaaaaggtgttgtttattttaatagtagcactattaaaggtgttcaaaaggaatatgcaactcacaacattggttggtgtaaaaagagttgctactttttattttgttttcacattattagttcggtaagaacattggagttaatctgttggtaaaaaatgaattggactactaatgtaaattttttattataatattttagttaatctttatgcgagaaaatatatattaaaattattttttttaattttttttatgtcggtgttcattataattttaatattattcctataatcgagcatggaggatgactaagagatagtaataggaaattgtaattagtactcgtcaaaaataaaataaaaatagacttaaattttgccttttctgccacctctatataatttatagtacataaaattaatttctcataaaaaaatcatatatatataaatatcaatatatatagttgttaactaggaaattttttttagtgatgcgaacatcattatttgacatgtggcaatgaagaataacgtcaagaagtggagtagacccaagtcatagcagtcgacctgggaggggaccctagccctgcacccaggttgactttcggaatctttgggatggaagttcaaacttcaataacttgaatccaactcactatatttcaatattttgtaccatagctgaaattacacgaacttgtaacccggaagccaacctaggcacctagggtttcacgcgacgcccatgtttacatatccaactagggtattggtattctggattgtcttagtgcaaaagggttaaaacttgcattagaacatcaactagacataccgctgacatatttgaggcatcgtaatcagaatcgtaacaagtttatttttgagcaccaggggccctgagcacacagtgcccaggttgacaatctatcgatttgggttccttacacgtatcagatcagagatctgacttttgcatcttcttcttcttcatcaaaaatagggaaatgggccattttgaagaagaaacaacacttcttgagtgcaaaaaaaatagggcccagcgcccatgttgacctagtgagctggggccctgtgcctacgctggcatttttcaacctgggccattttaagtggagtttttcaagaaaacttcttagcaacttctttgtttttagaaaatattaagatttaactatttcaggggactaaatggaatttttaaaggggcaaaactaggacccaacgcccaggttgacnnnnnnnnnnnngcccaacgctcaggttaacatattgtcaacctgggttgattccgatcaagttcatcagaaagtattcatgacatttttttcgtcatcaaaattcatgaagattcaagtaaatatggggagaaaaccacaaattcgagcacttggaagcgcggcacaacgcccaggttgataatcaacatgg

SEQ ID NO: 70048 - DNA, 1586 bp, Cannabis sativa
  modified_base (121)..(136): a, c, t, g, unknown or other
tcctgaacttttaaagtcgttaaatatgtctcacgaactattgagattgttggatttaagtatttttttccaagtctaacatggatgaaagttcagaggccataatttagtacatgtcaannnnnnnnnnnnnnnntttagtagatatcaaagtctgaggagtatatatagtttagtacataaacaatcactgaaattaaaaaattgaatgaaattagacaaaaatgcttaaatctaacaatctcaatagtttatgggatatttttaatgatcttaaaagtttaggggtatgatttagtacatatcaaagttcaggagcaaaaatcttaattatgctaatgtaaaagtaaaactaattaaagtagcagggtattgcatagtttttgttcttcacgctccataaaaagtgcgtggaagtggacttagagctcatttatataaatatttatatatgtgtgtgaaaatgtgtcttgtgtattgtgtatcatgcacacacataattaaagccactaaagtggacgatatccaatcaagatttagatacgaacgtaagcacttcgtttcagatgacgtaactagttttattcgtatatacatcgtggaagtatgagagtagtatatctatatatatatatatatatttatactatagtaatttttatatttatacaagactagttgtaataacgcggaactaggtttgaagattcttggtctccttccatggcttcatctctgactttcttttcatgcatgtccctcttttcactctctaaatttaattcaataatttttagacagaagactactagcaccaaatattaatcctatagatatagattttaatacttttgtatgtatatatttagtgattgttaaggcagacgtggtcagccatatagatctctctcctattcctacgaccaaagaccagtcttcatgaagaaattccaccaatgattttctcagtcaaactttcaacacatctatatttcttttctctgattcaaatatatacaagctagctactcctcattccaccatgttctcaaaatcccataccaatattttttccccactctctcctaatcaaggtaactgaaatcgatcgatatggatcggaataagaagatgatgggagagtgggagcaaaagagtttgttgaatgagttgttaagagggaaagaactggcaggacaactccaactcaccatagccacgtcaccaccaccaccatcatcatcatcatcgtcaacttcttcttcttatgaaagtcgtcagaatttggtacaaaatatcttggtttctttcgaaaaggcactctcaatgctcaactggcctggtggtagtagtggtactagtaatcaatctctactaccagctgtaccagtaatgattgggatgtctgaatccccaccttctcttactggaagtccatttagtgacgactctgatcgtgaccaggacaacaaagattacattggctctagaaagaggtatatatgtttagattaataataaatatgcaccaaaacattatataatatatatatgtgaattaaaattaacagaaagagtttgccaag

SEQ ID NO: 70049 - DNA, 3255 bp, Cannabis sativa
ctgacagatatgaaatttcaaatgctcaatatttaaaagtattttattaataattgtttacttgaatattaaatatttttgatatgatttaagtgcctcttttttcttctctttattctttaaagttattgaattttgattatttatttttacttaataaaccatatgaaaatttctcatctcctcttcaaaaaaaaaaaaaaaaaaaaaaattatcatctcaaaattcttcacatgtattatagtcacaatactaaaatattcgtggttaaaagttgtgatttttgtgactaaatatgtttttagtcaccatactatgttttagtcacaatgaattttttgttgtgactaaaagttacatttagtcacaacaaaattatattgtgactaaaaataacttttcttttgtagtgatatttagatgtatgtaccttcaacaaaactacttcagctggaggaacttcaacaaacatgtctccaccaataaaattgactaggttatttgcaccttgtaaatcagctacaacatgtggtaaatccaaaacagagcattgaatttggggaaaactagttgcaatggttgtggccacagttccggtccccccgccaacatcaactaatgactccactccctcaaacacccatctacacttttcgatcaccacactcgtcaccaatcgtgcatcgctagccatggcatcgttgaagaatctcgctagatttggttgatggctaccataatcccaaaacgtcatcccattagccgtgtcaaacggtgtaggatcgtcgttttggaaccagttgctgagaaaatcccagggtttagttatcacaggatcgagcatagctagcaaaaagggtgtgacactcataggattgtccttgagtaataatttggaagcgtcggttataacataaccttcttcttcttcttctccttctcttccttctactttttgtagagcaaaaaagttagaatgggttaaaattcgcatgaggcgatagacacaagaggattttttttggtttatggggagtgcaagtttgagttgagaaatcgtcatgggttttccatagttgttgatgatatctggaatacccaattgaatggcacattttaaggacatggagttgatgaagttgaagatttggttccatatgtggccttgagctcttagcaattctatgctattttcctcatttagaaccaaatctatattattgttaagatgcctaaaactctttagtttctccatgtttacactataaaatatttatttataaaatttgtatgtgaagctttgttgagatatggtacatttatagagctgagttttggttcttaaatcttgataattgtgttgcatatccctaaagaagatctgtgggctgaaccattattattattattatcatcatcattattttattatgtaatgtaaataattgtcttatcaaattaaatatagaaaaataaaagcatgctttactgtttatatatagttctttttttccctcttaaatgattttgttgtattgatataatgtagagatgacaatactagctagctatagtacaatcaatcaattaattgtaacttggttcaaaataaaaaaataaaaaataaaaaaccagttaattgtaactaatttattctattgaaataaataataaaattcatgaattacacactataattgtttttttggaagagaataatactagctacaattctttattttttattattatttttttttatttttacatatatatttgtgcttagttttttttttttttttcaacactatttgtgcttagtttagacacaatcaactaatcaattataacttatttattatatcacttcaatttaaattttaaaataaaataaaaatattcgtgaattattataattattttgatatttaaacctttaaataaattaaaatactttaaaaaatttatcccgaatcataattaaaatataaaatttatttgacccaagtcctacttatctctcatagaatgctaacaatgttaatattatggtcttataaatttagtatatattaaaaattaattaatactaaatttaacacaaaatataaagtgagtcaaattttacaccataataaatattattttgttatttttaatgtaatttaatattttcttttatatctttaatatatatttttatattttttaataaaaaattaatattttttacctttttattaaaataagtttattacactattgttgtagacaaatttaatagttatatttctcaacttggaatttaattataataaagataagataagataaatatgaaaagatgatgggaaatgtataaataataaaacaaaatcaaatagaatttatatcccattatgacttgtctccttgtctacttatggttcaaaaatgttgaaaggttagaattctctattatattatattttaattaattattaaatttcgtataatttaatttaataatttttataaaatatcattaactaatcataagatatcacttttaaataatattaggcaatagcgacagtgtgttataacaattctctttatggttagttcataaaaaatctttattacgagattgattagcactcaaaatatggttttaaattttttttattaggagattgtttagagaattgctaaaggtattattagagcttagcatccttctcgatattatatcactattagtgtaattaaatatcagatcccatataacttaaaaaaatacctttaaaaaatattgataaccataatcgaagaagtaaattcaacaagtatatcgctattagaagattgtttagcactcaaaatattatatttttaaaaatctttagaatactagggattaaattaacaatatatataagtaaagtcaagaagtaaattcaacaagtatatcaactacttcatattttattagagtaaatcacaagacttagttatcacaagatcaagcatagctagcaagaagggtgtaacactcgtaggattgtccttgagtagtaatttggaagcgtcggttataacataatcttcttcttctccttctcttccttcgactttttgtagagcgaaaaagtcagaatggattaaaatttacatgaggcgatagacacaagaggatttttttttttgtttatggggagtgcaagtttgagttgagaaatcatcatgggttttccatagttgttgatgatatc

SEQ ID NO: 70050 - DNA, 764 bp, Cannabis sativa
tttttttttaaatgggggttattttatccctcagtttgaagccattctttgcttaaagaaaggttagcccaggaataaagccaaggacagttccagtaaacacgaagtattaaagttaaaaagcacactacacaaaataatatcaccagtatatgatctctagcagcgtatgagttggccataaatatttggtaataataatgataataagaagaagagaatattgttaagcagtaagcattgtaagtagcagaactgacaaccgacaataaccagtaataactctgcccaagagacacatctcaaacgagtagtcaccggtcacagccggttactttctacccacaaaatgtctagttttcgtactagttttctctgaattgtcccagttgggttttttcattgtactcttatggagaaagactgaataagacccatgccatgactttaaccactactactcacaatgaccacaaatataccattgtttcctctctgagtttgtttacaagtactgaatttgaataattcataagttgtcaaagagagaatcattggattttagatttgagactcggaagggtgttagcataagaaatgccttttggctaatttttcaaattaaacaacacatgcagttttataaagttttcaaaccgcacaagtaccgcatagaactcaaaccacaacacaaaaaatatgatatagtacaatgcgggtggtttacatctataatcaaactaaaaaataacgggtgattctac

SEQ ID NO: 70051 - DNA, 1524 bp, Cannabis sativa
ggttaccctaatgtacataaggatttatattaaaaaatttgtttcaacccatttaattgtataaccagtataaatataaattaaattttccgcgtgatctttaattagctctaaaaataaaatggaatatatctgtcgtgagctaggtacatcttaatctcttttctctttattagtaaaatgcatgaattagatctgtaggaattaaaaactatacaatatataattattgcaaagtgatattaagaatatatttatttttccaaatatataaacagattcataattattttttggtttattattaattgatatattgggatatttgttagaaaaaataatatattaatctagcataatcaataactatatacagtttcttttttgtcactgaaagacatgatcattatatattagaccaatatccaaattaaggggcgcaaagcaattttcactaattttatatagttgatggcctaattgtgtttctttctttttcctttttttttttcttgaaacaacccattgtgctttgaaccatataaatatgagaaatattaaaagatattagtaacctttttatgtgtcattattattattggttcaattaagtaaataatttttttaaagtatcactagctaatcgtaaaattacatatctaaaggtgttaagtattattggtgtctcgtaataatattctataaatatatattatgttggatgtagatagtgtatctaacataattaggatccacttaattgattttgttatataagacagccgtctaaattgaaaagtgagaatcttttttttaattcgggagtcattttcttaaattatccgcgtacttacgtacagatcaaattaatttaattattctaatataaaatgtacatattttaaaagacgaaagagactaaggttttaaagaccataatttcaagtatatcccaacttggaataaaataaataaagatcttaattacaattaataatgaaatttattagtgtggaccaacaacggtaagaatatttataaataaatatatttgtttattacaggaagaaaatattactattggtctcccaaaagctaaatgggtcttcacctcataaagtgagttgtggattgtagacctacctctctccatgcatgataatatgacatatttgtaagtaaattcccttttcctttgacaattaaagctgggataaaaaatagtatatataataatatatttatatagtataataattaaatgaaaccagcaaataatcccatatattcccaattattgaacattgaataaaagaaaaataatagtaaaatatatattacttttggctatatatatatacaaatattccaacacaaattttgaccaaattcgcttaataattattcacgatcacgatatagtggtggcaccaaatcacatttttttaaccttatttaattagtccaaattgaaaacataacaaaaggcgggtttactatataccaatagccttctttatttct

SEQ ID NO: 70052 - DNA, 2069 bp, Cannabis sativa
accgatgtacagccctactataaaatatatgaatatgaaaaacaaaaaaaaatagaaaattttgccgaatgacgaaataagtaaggggtgcatcaatacacgaaggaggacataaaaggatatgtagagtttgttacattttaaaaataattaaaaagaaaatgaatatgtagagaaagatgagataattaaaataccttatccgaagaaaagcgagtcactgaaaatggcgactaaaccatcctcctctctccacctccccaacccattcccactcgctccctcctcttccaagccccgttcccttaacttcttcctttcattcaaacccagagccaccggtaccgataccgattccgattctccaccctccgactcatccaagcccaccacccaatccgatgactttgaggatcgactgagccaggtccgactccgctaccgaagcggaacgggtaagaaagcggagattcgaaagacgaggaagtcgaagaaaagcacgtcgtctccagcctcgatctatctcccgccagttccgttgaaggagccgatggcgggtcgggtcaaggtggatttcgggttcagtccgtacagcgagaggttgaatgggaggttggcgatattgggattgacggcgttgttgctggtggagctggcgacggggaagagcgtgataaattatcatacgccgtcgattgtgttcgttcaggtgtacttcgttgcggcggcgacggcattgtatgttaagtttcagaaagaaagtgttagtgtttggcccaactcttcttccaaagaatgatataaaagtacatatatatatattattattgagttaattatatatcaaatttcaccctttttttttaaattattatttgtctgaagaaaattgaaattttcagtaattgtttgttctttgaagtttgagcaatgatagtagaaatggtaaataaatgtgatatatcaatggctttgattgcaaataacattttatgttttttgttttctttttctattttagcagttattaaagttaattatttcatgaagggaagcttttgtgattttctgtcatggcacctagagcactcttctctattatattatttaaaatatatcattaaacatcaggttatttacaattacaacctatccgccatgaacaacactaattttctctttttttcttaagaaaatctatcaataacaactcttttgatgttgtttacaacgatataaatcatatgtacatttggtttcataggactttattcttagctgcccaaatgtgatacacatcaacatttattactgctatgtacacctgccttcaaaacctgaaatggttgtcttagttttttttgatgcaggggttgtcttagttgatgagaaccaagaccaatctaatgtaagcatcttcatcgttatttctttattgtaatagtaatagcagttaaaaaatataggtgtgagtgagatttaatacctgcattacaaatcaagcaagagtcctccaaagttactccaatcctgaacagccttttctttagtctgaagttctaggttcgaacttgatttttaggccaaagtttattgtacaaattcgagacaacatacggctctcgaatcaaatcatccttatccatcttagactttatcaaatctttcactattactacttgtcgccaataccaactaagaatttttttggagctacatagcttaaccaatcactatttttgtaattatatgagtagtataatggtaattgtataaatataaaattgtaataaagagtgtaatatatagtaatttaattatataatagtgattttattaagattatgtaaaccaaacatagaatgtggaaggggatggccgaatgtgaatattgttggcacaatataagccacaaccataccacttcatccaaatgcatctctcagtctttaccctccattgctctttccaacaagaatatgattgttgattcaattgtggaggatattagaacttggtattatttattggtattggagccatcattagtgtttttaatgctaagattt

SEQ ID NO: 70053 - DNA, 2475 bp, Cannabis sativa
aaataaaataagtggtgggtcccagcacttaatatataatatatgaaaaagataaataaatattttttttttcctactaggtattacatcgaatatttttaatggtgaatgggaaacagttcctttcaattgtgttatgctccttggtgtttggggagcacattaagataagtttcctttcacggtttgagagtatagaccttgccatcaatttgtgccaaaatatggcgcatgtcagccatgccttaaggaatgactttcttatgccattttgactttatgttcaagttttagccttattatgtctaactgaatctagtcctagctggtttccttgtcagattgtggtgtatagaatgaaaacccttggacggtcccgtaaaccctcggttgggcattcttgggtgtgagtcatgactctaaatggttggttagtgttttcttgagtctcctagatgtgtcatgggtccctcaaataagataccttaactcatttggccttgctatgtctttgtaaaataccagagttgacttttttgaattctcaaaaattaagtataactcccacgtaccgatccaacagtcctagaataccaatagttgtgtttaatggaaggatcaaaatctaaggcctctaattataatgacgaatttttcctcggtaagggcactaatctattcctactactagttcactatcttaggcaccacgcactcgtgggtgtcgcgtaaccgcaacacgtcgaccgtatatcaccacatgtgtagtaacattagaatacgtaaggaccaaccagattgatatattcagattccatgttacctagatcgaggcatcaagtctctaaaactcccaaatagtgaaggcttggggtgtaaatgtccattataaaaaatttaactttgctcacaacaaaaacaatttctaactaaatgtacttttttgacacaacttatgacaattagtattttaatcaaaataaattatttgtaacaatattttaactggattagtataaaacttatgatttactaggttgaaatggagcttactgtacgaaaactgtaaaagcaaatttctcactttcaaatgtggataagttatgttttaggtagatttagctcgattggaaactatagcaatcttcactgttgatgattattgtttgatcctaaaaaaaaaaatttcgcataaacacttttttaaaaagtagtttggttcaaatactaattgtccgaagggatcaaatattggtaagtaattctaaccttcaaatcgttgtacaattatctcgttaattaatcttacttttcaattttcaaagctcacgaaaagtactttgttgctttgtttgatatatatatatatttatatatatatatatgtatatatgtccaaaagtattgtttttcttagagggttattgaattagtttatttgattttcttatttatttatgtatataatcctttcatctgctactcttcaaaatttgggaaagttggtttgattcctagtcttacttatttatgtatataatcttacttatttatttatcaatttttttatgaattttaaattttattccatttgattcctattcatattctcattcgcatttttatttttatgttttcattcctctgaactaaacgttacttaagtgtaaccatgagaggcactgtttaccaatgttaaattgttgggagtagatacttttaactttttgttttatttttatgttggtcctttcggtttccaaactcctcttgaatattgataatgataagtggggaagaaatgagtagtatatctttttctatttttattattcttttcttctttaactgagatatgaaaaagaaaatttcaagaaatatgagggctttttttttttttgaggaaaagaaatacgagggctttgtgttaggtcattgtttacatttctcttgtcatggttattttggtgctttgattttatttacatactacttggagtatatatttacttgttttttgtgtatttacttagattaggttttgagaaatgctttgatctttctgttgttttgctaagaaaaacaaactttgatatctatagattttaagaaggaattgaacaaaggtattgttcaattgttttgctttaaatatacaccaatgatcaattatgtaaggacattggttgtaacctagaaggaaaaactgggtcttggctgatcttttctctgcgtatggccacacagattagaaaaaacctaacccactgaccactgtctagtccattttttttatgaataaagatcatttgcattgcttaacaatcatataaacaacaattacaactcaataaaaacaaagctatacaactatacccctcaaatcaattattacaaatttttgtacaaatttctcagactcaattcttatcccccatagacattttactaggtaacacccctatcaccctattc

SEQ ID NO: 70054 - DNA, 1507 bp, Cannabis sativa
aaaaatatggctaatgaattatgaggggatacctataaacaatgctctttctcaagacataaccccctatcgtttctctttggcatttctaaagactaacaatgtcactatccatttagctttaggacaatagaaagtcaagtcaagaagactactaaagggttgtacggacacacatttatatattaaacaacttcttcgtatgtaagtaattgccttttttccttgacgtttcattttctttcccatggaaatagtacacactactatgcatagtctccttttcctttgagataatactttacttaaaggataaaggttcgttccaatgtaaataaatgatctctttctttgagtgattgattttcattgtactatattcaaatactttttctcacacttgattgatttcttaacacagacccattttttttttgttctctgttttcctcactaagcttcggacccaagaaaccttttttttttttaaatgggttggaaatgatgttctaagtttttcaatgcagagaaaataagtgaaaaaaagctaaggagataataatgatgatgatggaagatggggaaagttcagataggaggaagaaagagtctattgaacagtttactcaaactttgttctcttggactcttgatgacatttctaatgaaaatctctacaaagataaggtcatactctacatatgtaactttgttaatcctttttcatatttctcttggaattttgtcaaatgggttttgtttttctttctcttgtttgaatatattataaaaaaactgtacggaaattcttcatttggaatgtttttttttcttgttttaaagctattaatgtgtaatttgtggattattttgcgaactggtaggtgtcctgtaatatttaaggatttttttttttgaaatagggaaaacccattttagtaagaaattatagagattgataaaggagtttttcattctatagtgttattttcaagtggaaataattctcatagcttcttacttattgtaaatgttgttgcattgcatgttttaatcaattggcttgttaggattcgtttgtggtaacgaagttgtgattgtgtttgttgtaagttcttctgtcatgatttttttttaggaaatttaaaaaatgtagcttgaaaagtgattatgtgatatgggttctacatgctttacatttattaagtgttgttaagggaattcagtttctgagtctgttatttttctgttaagttggttatcaactgttttagcttttggttgttagtctccttttcagttgtaacagattctgtttcagtctttactcatccttgttgagtatatattgtactgaactctcccagtaatgaattgcctttttgactcatctttctcaatctttctctgcatcttttctctttgttttctctctgttctttgctctttgttcatgttatgttcttcacctaaagtgtaatggccaggagattcaactctcctaaca

SEQ ID NO: 70055 - DNA, 1433 bp, Cannabis sativa
atatgtgtctgtatatataaatatatacctgaagttattgaccaaatggtggagcataattagtatttccagctttgctagttcatttccagggcaagcatgtgtaccagtgccaaatggcataaatgtattgggttttggggacacctatatagttgaaaaaacatattataattacagtacaaatgattttttataaataaaaatttaagtatatattaataatgccataataaagtagtggtgcatatataaatatacctcaaatctagagggatcaaatttttgaggttgagtgaaaaattcaggattatgatgaatgttcctgaacaagggcattaccttccaacctttaggaatcaagtagcctgtcacgagagggttccaaataaactaggtcaattttttctgtcatcaaaatgatgatcttcccaaacaacaaattatttacgtcaaactaataatcaaacaaatattacataaatatatatcaattaagtttccacgttttcacctctttttaattagtctctcgactgttactcacagtcacagttctcacctgttttatttatcttttgggtgtatttttataatttgggtgttaataatattagtactgtatcctaattccgatatgtataatcttgttgtgtataagtatattacagatttttcatacgtacccttgtattcaacatcagccacagcttctctgaaagtgaaagatataatgctcgcaatcctcaagctctctaatacaacctgatccatcaaatcatcatcaattaatgtcctttcagctactctctctctctctctaaaacatatatcaatgtttgcccttctcctcttctttttttaacggtactatatgtatacataaaaatatctaattcatatatttatataaatatatatataccttgtaagtaaggggcatatttctagtctgcgtccaagtcaaccgctgtttattttcttcattgagtctgcgaatttctttctgttcagcctgcataatatgtataggaatttacacattcaatgtgtagctaggactaactatactaacttaattacattgcatatatatattggtctgagataaaaaaatatatatattatgaattgccctagtaacgattttcgtatattttatatttttatattatattaatatattaaaatatatatatgtatatataccaagaagtactgtaccatatgtctgttgacttttaaaatgtcatttaatattatttctctagaaacatatatgtatattagtttgttttttcaactttgaactttgaaatttgaacttttgggagagagcgcagacaagctatactgtttaaatatttttctccagaactacgtagacgttggagtaataattgagctagctagcctaaagaattaaaattgat

SEQ ID NO: 70056 - DNA, 1270 bp, Cannabis sativa
tctcattaaattagtacctgtccagtgatttggttaattagttcatctttatttgtgctcaatctcatgtgtccagtttcagatgtatgttgactctcgtgaaaaggtcactgctcgttatcaggtactaaacattctgtgatcgatcaatcgaatccatgtaacacaacttaatccagaatcttgtgtttatgatcccttgttctgctataatccatcttacagttaatttgtccgtcgaagagagaagttatgtttttcggaagtttcaagcaagcagggactcttttacccaaagctcccaagggatggggctggagaacagcgctgttgttcgacgagctgtccgatcttctccaaaatggggtcctaagaatagctgctgttgtgcagcttgtgtgaaaatagcaagaagaaacacaagatatgattcttttaattttatagaatgtaaacagtttctattttattattacacgacagataataatggctttctgttagttgatttgtgcatatatatctatagtggtcagcatgtaataataaggtctctatttacaaatgaactcacattattattacattatattatacaatacatggctatttgggtagttaggttctatttacaaatgaactcacattattattatattacattatacaatacatccgatagtgaaaacagtattactctataagtggatatatattatttgtatcaatcactttcattttttcaccttcaaatcctaatcctaataatcgtttacttgttgtcatctctcttgtgttttttttccttattattattctttttttatttccatgtttgctagttcataagtaaatctgcaacacatgaaaaagagccacacttggaaggaaatctaatatctacaaaaactaaaatctcagtttcaatattacaattctatagaactatatataatggaatggtatctaacatcctctaccaaatctaaatatattaagcaaaatatatactaataatataataaaaatcacataaaaaaatagtgttcccaataagaatggtatctattaacattttattttatacttttttacccaaaaaaaaattaaagcaatactgtattcaattccatcatcatttccaaaataaactaaacatcaaagtataaggcagtaaaagagaaaaaaaaaaaaaaaaaacaaatggtggaatggaagatctgatctagtgttaataaaaacaatatgggaaacctagggtggcaactgg

SEQ ID NO: 70057 - DNA, 1886 bp, Cannabis sativa
attagatccacctttagatggtcaatgtaaaatctctagattctatttcccacatttcttctaaatttgttattcattctttagatttcaatttctcattgaacattaagattacgtttggttgtattaataaaatggagttgaaagaaattaatctttacttattttattattttgttgcattctaataagtcttccactattttctaaagaatgaaaaaacctttgtattagagtaatgtataaatcaatatcattcatagataactcgttggttgtatgtatttatgtcccaaaatcaaattgaactaatttgaataaaatcaaacgattaacagaaacaaaatcaaaggtttccatttcattgaacaaaaataaaaatcattaaaagatagaatgattttgttctaataattctaaaatctaagtagaagatggagaagggtgattaagaggaaatatttgagttggccaccatggatggataataggattaacacgtaatttggctagggatatcttaggtggaatatgaacaagagtttcaatgcgattctcattttggctaagtattttacattgaaaaatctttatctcctccttagctttagcaaatttatttgagtgcgagaaaaagaacacatctccgtcatctggatgaagagcatgtatagcaagaagcgacgacgagcttatgcaacactcaaacctcatcatcatttcatcatgatgatgcaccaaattccaactacacatctcaccatcatcaaacaattcccatgccttgaaaacaaacaattgcttcttcttacaccaatagaattgtgctactcgtactcttccccgaaccactccaacatgtaccctagaatttgaataacgacctaactccttaggcaaaccaatcaaacggtgttgttttgaacaaacatctaatgcaaatgcaacaatgccttcagttttgcgtagaccatatggccaatatattactccattgcttcccacgatggctgttcgatcttcgctttcattaaaaatggtcagcatctctggaaaatttaaagttgaatgactccattgtcccgtctcagaagaaaatattgttaaatgaagtaaatgtggtggtatacttattgaatcaactgtccccatactaattttaactactttatattgggtcttactataatcagataccactaatgcatatctacgttgtaaataaaaagatctactatactcatattcatgaaaaggatctggaggtttaggaagcacaacaagctgccttgtaaaaggattgcaaatgcagaatcgttgaccaggaaataattcaaccaacaacaaatcctcaaacgatgaccataaatatgctctgttcttggaggacaataaaaattgtaatgccggtatctgaccatagtcaagaatctttgatctctcagagaaatattccattgacaaattaaattcaggcaagtaagagtgtgtaaatagtagggtaaaaggaagagatggagatgacgactgtgatgagttactaagccttttatgacgatgataataattaaatctgccgactgaaatatgctttggaatgagaaataattgaaaaccaacgcttgcagacataagcacactccactatacatttaaaatcaggaagtcggagtaatatttccaaaagtatgtcatcattgagattagagcatccttgttgattaggaattttgtgtcttttcctacacaactgatcataataaacaatggtttgagagagaataagcagaataaaatgaagagctacttactgtaaatatttttatatatatatatatgaattacctgaacatcatcattcatgggtgtttggtccattaatagtt

SEQ ID NO: 70058 - DNA, 1972 bp, Cannabis sativa
tgtggagtcggattcttctgtggtttgttcttgggttaattctccagattctattcttatgtttaaaccaattgttgaggagattatttctatgctagctgctgttggtggtggttcttgctgtgccatttcgcgtgatgcgaatggtgagacccacgcactagctaagtctgttactagttctgtagaggttaatgtttggactgatacttgtcctagatttcttagtgctcctgtaacagctgatttgatttgatttgcataacatactttctttcaaaaaaaaaaaacatatctcctagtcaatttaaattctcgttcaacactctccaatgataaaaaggaatgttttgaggttagaatatttttcgtaattatttttatatgatattcattcattcataaatcataattgtgtaagaaaaaaattctattaaattttttataatcttattattggtattgagatatgggctaattctagtagtagtggtgccaccaaattgtacgaaatggggtcacaaatgtataatcataaaatctaattggtaaaaactcataagtaaaatggggtcacaaatgcataatcataaaaaagaaagatttagtcattaataaaagaaaaaaccaaccattaagttccaacagaccaggattaggtggtatcgttgggacacatttggatttttaatgcaaattgttattgactttatccattatctttttccctacttttttccttgattgcctccttccttacaattatttacttatttatatttaaacgaagattcaagtttcaaaaaaaaattacatcaaatgtttaaaaaaaaagaaaaaaaattactcaattattattagttatatccttttgttttttgtcattgtttttcaaacgcagcactagtatttgctcttctaattataaagtcactactacaagtctacaatagtatgaaggggttattttagtcaattagcaaggttatgtggtttaaaatattccctccattaataagtggccacgttcatcaaccttttgactttaaatttttaatggctatccgacattttcaagtcatattcattcttctaaccaaaaaataaaaataaaatgagtcacattcattcattaattttaataatattttaaaatattgagaacgttgtattcctaaatcctcaaatttaaattcaattttgtggctccaacaaatataaaaatattagacgaagtacttcctccaaatttttgtttcccatcattttccacgtatattcttcaaactcaataaatacccctaattttgggttattttcaaatttgccatcaaaggtaaagttgaaagaagtgctttcttatttttcagctgtaagtattgcgctaagtgggccatttcaacattttggattttttttttttttttttaatcatttttaaagtagtcttttttttttttttttttaggaaattttatatagcaatctacatatcaattaatgaaacaatttaaattgccattcaaattcatatagcaactcacataaaaactagggaaatttacatctagagtcttaaaatatatctcatttacacaaataacgtgacttttaaaataatgaaagttacccttatatttataccgttttcattaatattagttttgtgtttgattcatacgttattggtttatctttgtagtatagcttttttatttttttgcaatatatctcaatgtttgtatgaattatcttgtcctataccaataatttttttttgttgttgtaactgtacatatattttttttgaatgggaataactgtacatataatttgatatatctagatttaaatattttctctttcttctctctttttttatatttaattttttttttttttgctacactaataattatttgatctcaaaaattgtactattatgatttactctttaagataattattttaa

SEQ ID NO: 70059 - DNA, 1543 bp, Cannabis sativa
aactcttttcacgttgttacaaacagcaatccacaagccaagctccagcccccgaatacacaaataaacacaaagcctgctccattcatggcttctttctcttccagaggccccaacactatcactcctgagattctcaaggtttgatttaaatgaactccataaacccatatcaaaatttgatcaatttttactaatggttgtacttaaacatatttcatcttcatgcttcagcctgatgtaactgcccctggagtaaacatcatagctgcatacagtgaagacacaagcccaacgggtctagattttgacaacagaagaatcccattcaacacagaatcaggcacatccatggcttgccctcacgtctccggagtcgctggccttctcaaaagcctcaaccccttttggagcccagccgctattcgatcagccatcttcacaactggtataaattattactaattctcatttttcaaagatacccttttcccatttctttctctgattttcagtcttaatattccatagcaagaaccagagacaacacagttaatcccatgcaagaagcttcgaaagagaaaggaaccccattcagctacggcggaggtcatatcagaccaaacagagccatggacccggggttggtgtacgacttgagaaccgaagactacctagattttctctgcgctagcgggtacaaccagactcagcttaagcttttcacccagcaaccgtacaggtgtcccaaaaacgtcagcgttttgaatttcaactccccatccataacggtgccggagctttccgattcagtgaccgtgacacggcgagtaaagaacgtggggtccataggaacatactcggcccttgtgctggaaccggtgggagtgtcagtgacggttgagcccaaaagtttggtattcaggcgtcgttctgaggagaaaagcttcagagttacccttaaaaacaagggataccatttgaaaggttatgtctttggaaagttgacttggtctgatggaaaccaccgcgttagaagtcccattgtagtttctacggctcacccttcttagaagccttttcaaattttaggatgaaggtttaggaaattcagattttagattcaattctttcaagttttttttttttaattgaatttgaaataaatacatgttttgttattattattagatttgcagatctctattaataaaaaataaaattaatagctgtattcagtaactattttatgtacatttgctctaaataacatttctaatttttacttaagatccttagcaacaaaaatatttaacattttcaatattaggttggatacattttaatttaataaaaacataaaaattactaatcaattatagagttagagtgttatgtggttatagtgtttgatgccataagttttattagtaatacctgcattttcctctacaaacttccacatatttgtccacaatgttgctactacatttttctcttttgtaattacgtggacgatcacatcatagccaatttttttttt

SEQ ID NO: 70060 - DNA, 1434 bp, Cannabis sativa
tttttcattacataattatctgaatggtatggaatgtcgactatgtatttgttaatatgcctcagttcaaccaagatagaacttcaaatttgatatctttttcagaaagtaaccattctttgttcaatttagcttagtaagttatggaatgtcgactgtgtatttgttaatatgcctcagattctaatgatagttgcttgtgacatcttttggtgagtcaatttctaactgtaattgtcagctgatgatgatgacatggttgcatttcagtacctttaatttagttagtgattcacataaattgaagtatacacatggaaattgtgcatgagaagttcatgcaaaactcactagtgattgtagttaccagaatttgtacaaattcctgaccatatttataaattcacctctcaagatattctccctttcacaatcataatttctgcactaaattcacataaaccttaagaaattttcagtctagatttcagagtttagcaaggttaacagtttaatcgcagacaagaatgaggtgaacaaaagagacaaacccaaccggtatgttaatcagatcatcgtgccagttattgctttcaaatatggattcaaaggtaggaatacaaggaagagcagaaagcagagcactacattgttttagccatatgccagtgaagaagatgaaatattataggaccaaatatttagttttgtttagtgtacttatattagttttgtttagtgtacttatatttaaacgatgtgctgttagtttttttgaaggatctgcaaacaaattaagtagttcactatttgtgatcctattattagagtcagtgacgcggccccctttgagtttcaagttgtgatgttgtctaatataatttcaataaaatgataaataactaagaaggataagataatctcatatgttatatgtatcatctgattaatttaagtttaagtaaatacaaaatacaaatgaacaatatttgtaggtgtttctggtacccttctataaaattgtattcattttcttttatttttaaacaaattcatcaatcactcttcttttccttctttaatttatgtgcttaagaaattttactaatcttttgtcatcttatctcattgaaagtctaatatgcacctacaaactaatcgctctgtgaatatattgtttaatattgttactgcatcttataagggtaatgataaactaaatgaggctaacctcaagtagttgttaaatattctattaaaggctggtttagtattgtaatgtattgtgttagattgtattagtaatatttaatacaatacaatatttagtattgacttgtgtaaattgattatataaaattataatatattttcaatacactggatctcaataccaattgcaagtagttgttaaattgtttttgaaagctcagc

SEQ ID NO: 70061 - DNA, 3073 bp, Cannabis sativa
atgaaaaagttagactaactaactttgataacaaacttaaatatttatactaacacctcccctcaaactaaatggtgtagacaccatttgaagtttgaattttaaatatagaaacctctcagtagatagtgccttagtcaagatgtctgcagcttgatctaaggatgggacataactaactgaaacttgtttgtccaacatttgatctctcataaaataaagatctatctctatatgtttagaacgagcatgaaacaatagatttgcagctaaggctgtggcgctttgattatcgacccaaagtataggaacttgaactagagagacttgcagctcttgcaatagataatgaatccacttcagttcagctgtaacatttgctaatgctctaaactcacttttagtactggatcgagcaaccacacttgctattttttcccagaccagctgatcaaattatccccaaggaacaccaaatatcctcccgtatgataatcgatacaacttgcccagtcaacattagagtaagcttgaagagtcattgtagatgttggtcgcagacataagccatctttaatggagccttttagatatttgagtaatttttgtaggcttcccaatgcactgtcgttgggacatgaagaaattgattgagtttgttgataataaaggccagatcaggacaagtaagagataagtactacaaatcccgtagggtacttctgtacagagtaatgtcatgaaatgattcaccttcatttaatgacaacttaacactggtacttgttggattgggacataattttgcaccttccatatccagtttcccaagcaaaacaatgatatatttcgtttaaaataagtacattccagtattgtctatgtagatctctactcctacaaagcaatgaacttgtcccaagtcctttaagaaaaaagaacttgttaagattaaaaattaactttgaaattaaagtagaatttagtcttgttataagtatgtcatcgacatacactaagagaatgactagatttgtaccagttccatgtatgaacaaagagctatctgcatgagaaccgtgaaacccccaagagactatataaagtttgtcttaacttgtcattccaagtctgtggtgcttgcttgaggccataaatagctttttgtagcttgtagacataagttgggtgagttgtatcttcaaaaccaaggggttggcacatgtaaacaatttcatccagaggcccatttagaaacacattggtcacattgagttttgagacattccacttgttagaaacaaccaacaaaagaacagttcgaactgttgttggcttcacaacaggactaaatattttgtcaaagtaaattccagcttcttggatgtatctttttgccattaggtttcacaacaaaagaggtagttgctataggaggtatggttgtattgacagtagtatttggtgcctggaaagtggtttctacaacatgtattgatgtttggatattagtgttttgtgcctgaggtgaagtgatgatggtatttggttgatgtatgtctaaaggagctttagtttggacatttgtgtcagttgtgagttgggcagtagggtgagtgggagtcacaggtaattgtgtctcattgacattgaaattggggagatcatgaataaaaagacattgattagtatggcctgtggtaacttaagatgcatgtggaaagcaaaattgaagcaaaactaagtaaatgagatgaatttacctattcttttaaagatgttgttgatgcatgaaataattgttcattgaagaccacattccttgctataaacaaccttccttcagagttttcacacaattagcctttgtgagatgaggagtaccctataaagatgcattgctgagttttgaactccatgttatctctgttatatggccttacatgaggataacacgcacaactaaagggctttagaatcgagtaattagccacttgtccaaggaggaattcaatgggggacatgtggtttagaactggtgtgggcatcctattggtgagaaaaacagtagtgtgaaatgcatgtcaccaatatgtgtgaagtctaaacccaattgagctagtatagtgagtcccatttctgtaatatgcatgtgaatactcactggtcttgggacaaggatgcttatgtatcccttgatcactcaggaatttggaaaatgttcgatactcccctctccaattttcctaaactttcttgatgggtaggtaaaattatttttccaccattcctttgaactttatgaacatttcaaaggcttgtgacttttgaacgagtgggtaaatcaaggtgtaacgtctgtagtcgtcaagaaatgtggacatagtagaagtaaccatctttggaattaatgtgggaaggaccccacaagtttgtgtgtataagctcaaggggttgagtggctcttgaatcagtgctggggaatggttttttgtggcttttgcctagttggcaagcatggcaaaattctagttgttgtgtggtgctagtgtggggaaagaggtagaatttttcttaaaacaacaggagatgggtgtcctaacttgtgatgccaaacattaatgtcatgtttggtactggtttgtaaagcaatgggattatagagagacatgtcagtaacagtgtctttattgatatgagaaaaattataaggagtgtattttataacattggaaaattgaaaatggctggtacaactcatagcaataagactacaaccattggacacacatttatttgagtatttctgtcttgatagtcttgagcattcctctagcatacattagccatttttaagagttcctttgagcatcaccttccttgtttgtttgtccttgacaaagcaacatgctttgtaaaatttaagaaacacaaagttatcattagtgagttgagatacactaaccaattctttaatatagaaggaacatgaagtatagattttagtttaagaggagatgaattaatgggaggtaatgtgggtaagccaatattagagatgatcagatgacaa

SEQ ID NO: 70062 - DNA, 2641 bp, Cannabis sativa
  modified_base (2116)..(2128): a, c, t, g, unknown or other
gcttgttaatacttacgattttccctttatatacgattatcattgtaatgcatcatgttcatgtatgtatgctgcactatgtaaattttaactctgtttcctaaactcattataatttataaatgcggattgctgtattgggatgaaatgatgtttgtataagccttcaaattcttttgatttggaaaataggttatcacttatgacataccactctattgggatgggttttgtataagccttcaaattacagtgattggctggcccctttttgtttgggattgttttttattaaatatatattcctatttaagaaacgaaaatatatcaaaggtatcactttcacacatttgatttgataaagtataatgagctcatggatgataaaaaatcatttgtgactgagatcagggtgtgaatagctgagtagaagatgaactcatccattggagcttcttcaaagcagaaagctggagtcccacagcctcctgaaacttcgtctaaacgcaaacgaggagtctttcagaaagaatgtaagttatgaatgagagatataatcgctgcagatttccggaaccaatatctgattaatttggtgttgtttgtggatctgcagtgcagcatatgatgtatggttttggagattgttctaacgtgagtttcatcattagacttttttttttcttgatttaatatcagaagctgactgaactttataacttcatcagacctgcctgcaatgtataacattgtttatctttagttgagagctataacagtaatagtgaatttaatgttaccaattttgaaatgtctgctggctgaatctgttttgtgctgacagcctcttccagaaagcgtggcacttatggaggacatagttatggagtatattatagatttggtaagctatttctctgattataatttgtaccaactgcaaagatagatccttagagagagtactttactattgtcttaattttactgcaggtacataaagcacaagataatggttcaaagcagggaaagctatcagttgaggactttctttacttaatgcgaaaggtgtgtcttattaagtagtagttatatctggttttaaacttttaaggcacatcctatgttatgttgaaaatgatgccctaccccattttttagtgttattgtttgtccttggattttttattagagcgtgtgtggtagcatcttctctaaaagtgtttcaagctataaatttatcttgattctttggttcttcagttagtttttcttttttgttgctagagaagtcatagtaaaatggccatttttaaccctgcaggactttcgaaagcttaaccgatgtacagaattgctatcgatgaacgaagagctcaaacaagcaaggaaagctttcgaaacagatgaagagaagctaaggaaggctttcgaggctgatgaagataataagttggtgggaccaacggagtaatgaaagagggctgtgtttttgcaggttcacaatagcgattgatgaatgatgaagagtcatgtttatctgtttgatgctctgtgcctcctatttgttaaggatctgaagaacaagtgacattttgttgtggaggtagaaaaggcacaaacaaagcatggttaagagtctacatttgaatatgtgaggaactgtaatttaattggtagtcttgtcttgtgtgggcttggttggtaatattgttaagttattgtgtaatgttatgttaatgggcatggatgatgtcccttatttagttctctatggtcatccgacctattccctctcaatcttaattttttcatctaatggtttatatgattgcctaaaaagaaatgtatacaaagtgatgtgatatattggtttacaatacataaaaaaattgtttaaataaacaggaaaagatttatttgtgctgcaagtccttaaattatacatattttgataatttggtcgctaaattttagtttttgacaaattgttcttcaaattatataagttttgacaagttgatctttaaattttattttttgacaaattgttcaccaaacttttattttttaggaacataggtgacgtttggtaatacttttatttttaaatttnnnnnnnnnnnnnataaaagtaaaattttgtttttgaaaaacaaaaatatgttctataatcacttttgcttttcaattttaaaaacaaaaaataaaagtgtgttttgtaaatttcatttttattttgatctgttgattttatttaattcgggtttgaggccgggtccgatgtcaagactgggagcgggtccaagtctagagctgggtccggtttctaaggtctaagttaggatcacagtctaaaatattgattgaaaaagattgtttaaaaaaaattgaaagtaatttttttatttttaaaatttagattcttaattaaaaaattgaaaaagtaaaaacagttttacagaacataattttggaaagtattttcacttttcttattttgaaaaccaaaaactgattaaaaaagtgttaccaaatgcacccataaaatttttgtcttaaatgatggtattttattgtatagggttatttgcggcaaaaccccctaaagtagggaggtttttgcaactaacccccaatt

SEQ ID NO: 70063 - DNA, 898 bp, Cannabis sativa
aaagaaaactttatcaaactaaattgaaacccagccaaaataattaggaaaatgatattaaaaatcaataatttgaatggtcagaaaatggaggcaaaaagggtaagaaaagagaggctaaagacgatgcgagaaattgaaccaagggttccaaggcaagagctgatagatacatttatatatataggattatgggatctgtcatcggaaaccaggacccaccaccacaaaagccagtaccagagtcggcggcttctcttttctgctattttccttatctccaatccaactcgctctgttctctgctatatatatatatatatataaatattaatgcattgtagagatcaaggcagtgatgtagggtggggatggagacctgggctgggattgaattgagataccaaccagccaatcggggtatggccctgttccactactcttgcaccgttaaacgtgttgggttggattcagctttttttttttattaaaatatagaattttttgaaagtaaatattgaatttttattaatttcttaaatcagcctcacgataagattactcagaagtagtctctttttatacactattttttattttattatttaaatttataatttccggtaatttttatataagttgctatataaattttggttaaattttaaattgttctgtcaattgctatgtaaattactaaatttttgtaaaaataataataataaaaaaattcattaaagatgtaaaagtgaaaaaattcctataaatttttaaagtataaataaaactcggcatagttgaattgagcactattattatacaccttaaagtacctaaaaggttaaaaccatatcgagatacgttgtaagcagttagtaatttttatattatttattaa

SEQ ID NO: 70064 - DNA, 1403 bp, Cannabis sativa
tgaaatttcatttcttaaaacaaaataaccatagaacctacattgaagatcaagggagcttacattttgaaaagtttccctggaacccaccattgacctgtattgaaaatgagaatatctgaatcaatccagtggttactgatatcatccaatttgtccaacttcagtgtagacttgacccttttaggagcatgttttggcatagaaccttgttgcaccaggaaaaccgagcgatagaactcaatagtaaaattaaaagaaccaaaccgaacacctaaatatctaatttgtttggtgatctcattcccattgacttcatacacactcttcttgtcttgtacaccagtcataagcaagcatataagagactcccattgtgttctactcatagaatcaccaacaaaaacaacttttttacctcgaaaccgttccaacaatctttgcacattaaatgctgcaaaattacagttcctaggcttccaactccacttaagataatcatcatcttccctaccattacgcaagcaatcgaatcctcgttctgcaaagggacattctgttgcattgtacaatggataacgattgtctaagacccaatttccatcaagcacattgcaactacttccactttcagaattattaaaagtggaaatattaccatacacatttaaggctgggagcaaataatggtaaccacaaagaaaggctataatgaatgaaagcaatgaacctatcactacaagtagcttgaataaacgagagactgaattcaaccgattgatccttgggcttcctacattcaatgcctttcgattgaatgaaacattcctattatatgacacatttctattcaatgaaatactcctgttgaaagtaaccatcttaatcgaccagaccaccaccaaggtttttggaaactattcatagtgagcatgataataccaaatcaagattcaaaccattgcatctctccacaaacagtattatcaatcccataactaccaaaccccaaaactatcatatcaaaatgattaaaacttcccaaaacacaaaacccacctgctcaaattttgtgaatctcaaagaagaacaaacgcatttcacattcaatctctaaacacaaaactcaagcattccaatctaaaaaatccgacccactacaggaattattaagaaaaaaatgaaatgggcaagcttcaaatcggaagaagaaaaatacccagatgccagaaaccatacaaagcaaagcagagatattgaataacaacataagcaagtgaataagctaaagcttcttctttttttcccccctttcaaagagatggacagagatgaaaacctaccatttctttttacagatcttttgagatgattccaaaatgggttagctggtaaaaatagtt

SEQ ID NO: 70065 - DNA, 1676 bp, Cannabis sativa
aagaaaatggttcttatcttatttcgggaatcccatgaactctaatccgctggcctttggtgtcaaaccaaactgagacaaatattcagcattgtaaaacttgctcaaatgcctcatcccattgtcacataatatggttacaatagtgtgaccaggaccaatagactttgccactttaacagctccgacacagttcatggccgaagaactccccaagaagagcccatcattcttcaacaggaacctgatcaaagttcaagagaaaccgttcaatatcaatggaaaatatcggtacttttacatgagaaaatatcaatgacaagtatggactttaccttgacatctcaacagcttccatatcggtgccacgaaaagccccatcaagtttcgccatcataaaattcttagttattctattgattccaatgccttcagttactgtatcgaatggattctttagcctttttccttcagcctcttctttagtgtacatcactccccgagttaccttgttgaacaaaccagaaccaggtggatctaccagaaagcacttcacatttgggttcttttcctgttgaaaaaatcatatgattcgcatatcaaacttcaccaaaacacgtctcaatatcaataaaactacgattcttatacctgaagaaacttggaaactccagcgacagtgccacccgttccagctgcagccacaaacgcgtctaagttcccttctgtctgctcccaaatttcaggtccagtaccttcatagtgagcacgaaagtttgccaaattctcaaattgatccgcaaaaaaacctcctttagaattcatcgacagaaatgaactcttgttctctccatcaatttcttctgattttgtaagcttcaacgctcgttcattagcttcggaagctcgtcgtcttgcaatattaacataatggtctcggtgagtaatcgacactggccttactctttccacagtggctcccaatgcttcaataatttgagactataaagatattaacacataaaggaaagttccacaacaatgtaaagtgaggagttaattaaacttgttatatgaaataccttctcaatagcagcatcatctggaataaccacatggcatttacaaccataagcaggagcaaccgtagcaagactaatggcggtgcttccggcactcccctcagttactacccccccaggagcaagctttccagtttctaaagcctgcacattccaaaatgaacaaaagatatgatacacacttgtgcacaatgcagtttttgaaagaactatgaaaagcaagatgagatacaaaatccccgagtaatattttactctaaataactcatacaaaattcaccaccccccaacaagacttaactctcagaatttatagactagactaataaataatcctaactagccaaccaaaaagagtcttaagtatcagacacaaacttaaaaacattgaacacagccactaaggacttgacaactcagcctccataaaatctaatgagttatactattaagactaataagaagtaacaagatatgatctcaactataccaaaaccaacatagtgaaaggtcatctctttaaattcaagtttgaattcagtaagtcattgcagatgtcatttagattctaatttctatggaacaaagcaatga

SEQ ID NO: 70066 - DNA, 1327 bp, Cannabis sativa
gcaaaaaaaaaaaaaaaaaaggggctcaaaatcctccaacgaaccttttcaaaaaagattaaaaaaaaaaaatcctttgattgaatttatatttttttgcatgttgtgggggagttttgtggtaggtagtttcatttttcatatatagtttcaaaattttgatgatggtgttagttgcattcaataaatcttcaaattgaataaaaattagagattcaaaattattgccatttcttattttattccaaagtgtttaaaaagctacgtggcagtttgttatgtttttcgttttaattatttatagcactttctaactttttctttcaagttcctttacttttcttctctttaatagctttttctaacatgatcactgtctttcttagtataattctagaaaaaaaaatttatgttctttcaagctttaacccctttgatggttcatcctcactagatgatactttgtttgcccttgtcctttcctctagagaaataaattccaagacctttagaattaagatgagggacttttgaaaagagaaatatcaagtaactataactcacagctgtattgggttatttaccactatctttggatgtttaaggggtaaaagaaaagttcttttgctggaactttcgtactttcagaatcaccatattgtattaggcacatcatctaaaatatgtatgtagaatccttgcatttctctcatttttgggtaaagctccatcgactttcctttctcagtaaatctagagccatggcaatttgggtcggcaatatggttggcaagtatcttgaagttgatgaggctcactgagtgagggttggagccttttcttaaggtttcaagtaatgattgatgtgtcaaaaccgttatcaagaggcacaatggccaagcttagagatactcgtgatgagttctggttggagtttcgttacgagaggctcctggagttttggtttgagtgtagtactatttgctatccttttgataactataaaatttttcttaaaaaaagtctacaatggtatagaacccactctcaattatggaccaactatggttggggctccattccctactttgtgctatgatcagtataggactgatttccataatggaagtgtttggcctctcatgacacgcttagccataaagtctttcactattgctattccacaccttgctataagacctttacccccataacctttgacagatggggaatcctcctctgctcctgttatgcagtcaccataccagtccgcttatggtatattcatcaacatgcttctatagtatttaacgtgaatggttctatt

SEQ ID NO: 70067 - DNA, 1342 bp, Cannabis sativa
tgattaattacatatttaaacaatgactgttattaattttatttataacgtgcgttttttctctggccggcctgtacgagattcgtactactttcctctgaccacgtctgcacgtgttgaagctatgtggaaaattacatttaacctatctgatatttttgtcaatttgaatacatcttgggcggttgattcatgaagctcttttatccacccacgtcttgtggtagagatacgtgtcacccaaaggaacctgccacgtcatctgactaatatttgggataacatttgcccccaactctgcgtaggaacctcctggttggcgcggggacttgctcggcccacgatctaggtgagtaaggcgatacgtggtgatataggcaatcatgaaatcctaggttgtcgttttaaatcccttcaattatgtagggtatttaatgctacaacaagggtttcgtgccctaggtaattgcgctggcaataatgcttctatagagcacttattaccaactttttgtgggaaatgaaaggttggtttgagtgcccaaattaccattgtacccctggaaggttttatatttaaaagtgaaataagaacttcattcatcatttttcatccttcaaagaattagatagctctattccacttctttgaattgcaagaacatgttggcgattttcaagcattcgacccagagaacttcaaggccctatccccagtgagtaagtgccttgaatttgaatacatttacctcttttttcttgcatttgaggttatgcatttttctttttcttttttctgcaaaaatctaggcttgccttatgaatgttcattatttaagacaacgtctctgatacactcaacccagctactccaatggacttttaatctatcttcttttgtgcggctcacggacctttgtttttagacatatgctggccaagaggcttttatccttgaattacttttaagacaaatggttggccgggaagccattaagccctgactttaagccattaagcccctcaagtcattgagcagacttatgactctcagtcacttgcgatttaacttttcttttgttttgtctgtttgacttttttttacattgggcggaccttcctgtgcgcgtcttaagaattttttttgtgtttgttgtaatttagcacaattcatattttttgtaccaaacaaaactttaataatcaaatcatatttcatttattcgtcaatatatgcgatcacttatcagtaacttacatttattaaatatcaaagctaaaataatatgtatacttgggtgttgaatttatcacaacactcctcaaggtggtaaaattaaaa

SEQ ID NO: 70068 - DNA, 1492 bp, Cannabis sativa
aacattcttgataaggcacgcctttcccgcataggataagaacttggatttccaaccttgtactctagacaacacacagtcaactaggaattttgtatcttcggtacgcttcagagacctaaacaaaggtatgcccaggtatgtagcctttttggacattcgcttcatccccagcagatgagaaattgattgtgcagtccgtgctggaacctttttagagaagaagaccgaggatttatcaagatttacggtttgtccagagtacttataatattcatttaaactgtccatgaattgacttgcttcacgtactgttgcctgtccaaagaggacgatattgtcagcaaagagaaggtggcttacggtcaggccatcttttctcattttaaaatcttttattagacccttctcgaccttatcgataaccaatttggataaaacatcagctcatcaactccaaggatgaatagagccggggagagcgggtctccttgtctcaaccctcgctgcggtgtgaattttccagccactgtaccattaagaaggagcttgatctcctccaccatgatgcaagagctagtccacttaacaaaacgatttggaaaaaagctcatcatatctatcctaagagcatacttaaccaatccatgagccgcaaggttgaaattgccgctaacatgagaagagatacccaaaaaaattagataataaagccacaagaaatatgaaaaaattaattaaatcaactaataatgatgaaaaatgaatttcattaatttgaatcacacacaacttatttaatttcactacgtgtggtagcatggattatggatctaattgatgattaaggataagattaaatattaattatttgagtcatatattttaatattcgttcatatcatttattagatccaaagtcatacaataatttaatattggcaaggggctattctatgtatataataagatgaagcccacaacttcttaattacacaattattaagttcatcaaagaaaaatttgaagatggggagtattgtaaagaagcataaacaagttataagatctttagctgtactattgctgataacattatttgtgcttaataatgtttcatttgccctagccactccgccgggcacggtatccaaagtggtttccgatcatcgtggcttggctatgatgggacgaaaactattagaaaacgattgtagagattgggaagatgcatattgcgacgaaagtgtgggagagtattgctgtcctcctttggtttgttattattatggacattctcttgggaagtgcataaacccatgatgtaaatatatataaatatatgtatgatacattcaaggatatttttattctgtttatgtcatcatttatcttattgtcaagttatttttttttaattaatgatcaaaatctacaatagtttagatcttactacgtaccactctgtaataatatgatacatccatggatt

SEQ ID NO: 70069 - DNA, 2568 bp, Cannabis sativa
cttcaaacatccgccctactttggcaacttccgtgttaaagtgttggatgtatctttgcaagctttcttgttccctttgcttcacattggtgacactcgttataagcatatcataatcactcattacctaatggtgttgaaggaattcctcaaataattgcttccagtatgtgattgttcttaatcctagcctatttaaccacttatatgcagccccttttagtgtgattgcaaagtattgacaccttaccttgcatgacacctttttcatcttcattagctcattaaaagctctgagatggtgttttggatctgttgtaccatcgtaaggtgtcatgtgtggctcctcaaaatctagtggaagtgtctcaacttggatctccctcgagaaaggggattcttcaccaaactcatcatcctccaaatttccctttgataagatagccatcttttgacatagatcttgcattttttcttccagctccttcattcttttgttcatcctttcttagcagctattgagtgggactcgagtttgccttgtagtgtgcattaggccactgagtaatattcctcgtgtcccatcattgtgtggcttcccaccatggttggaggataatgcctttcatttgcttttctcatgaaagggggcacaggcacagtgcccccaggatgggactctttggttgaagtctttttataagatcacgatatgtttctctcattgcaatcttactacagtgggtaggttcaagtttccttgaatgacctatagggaacttgtctcgcgatggactcctcccactctcatcctttgaggtgctatctatcgatgacatggagttccctccaccaacatgtgcaattgggatcgtgcactcttgttggtgttttttgtataaaaggtttgacgcttgggctttgcctttgagtatgctgctcaacaccttttgcatggccgccacgacattttcaagcatttagttccttcggtagtaattgtttattttatcttcaaagtggcgagtatggcatttgagctcacagagtatgctcgcttctcttttctagggcaatgtcgcaaggtaccaagatcttgcggtgttggtggtggagggtgcatcatcggtgatgggacaatttttcttggcaaattattttcaccaacttgggtgatggatgcgttactctatcgtggcatgtgttccccatattctcatcatgatggtttctctctcccctttgcctgaggtatttggctattctggccaacttcttcaaccatggatgttggaagctttcttcagaaggcaatcaactgagtgttatctaggtgaatatcgatgtcctttagacggagggagtgtctaggaatcttgcagcaacactaagtgaggaaataacaaagcttgagcatatagttctcacaaacttaaggcttgaaaattgaaactcaaatggaagacttataatggagatgaaattatgaaaatacaaaaaacttgaaaaaatgttcaaagcaaaaatggagggagacaaatgtatgtacttcttagagtgaagtgttacaataattttcctaccccttttcacattttagaatggggtatttataggctctaatggcctgtgatataattaaagtcccaagggacaagatgacattcatgagttgcaagttgcaggtgtggtcgtatgccttgtacctctctcttgtctcaggtggtctcgagtggcaagggtagtggttgtgtgcacccttagttggaatgtcgagacttgcacatgtgatgtctccacaacttctactatctaggcaccagaacatccaggaggtgtggttgtactcccgtcgcatgcaccccttgtcttttcgatcatacctatgctgcatacatcctcaatacttgggaaaactttgctaagaatacttgtgtagttgaggagataattttttagtaacattcatacaagtcttgcccgagtgacttccatactatcttggataagcgacatgcatgcaggtcttggccgagtgacttgcataattatcttggtcgagtgactttcatggtgcatggccaagtgacttgcaagcttggtgcatggccgagtgacttgcatggtgcatggttgagtgacttacaagcttggtgcatggtcgagtgacttgcatggtgcatggatgagtgacttgcatggttcatcatcgagtgacttgcgagcttggtgcatggccgagggacttgcaagcttggtgcatggttgagtgactttcctcatgtcatggtcgagtgacattcctcaagccatagccggtgggcttcctgatgacatggccgagtgacttgcttgctatgttggccgagtgatatgcatccaagtcatggtcgagtgacttgcatgcttatcttggtcgagtgacttgcatggtacatggccgagtgacttgcaagcttggtgcatggtcaagtgacttgcatggtgcaaggccgagtgaattacaagcttggtgctgttgggaatattttaccaggatctagatcatgttggaatatattttaccag

SEQ ID NO: 70070 - DNA, 3768 bp, Cannabis sativa
tggaggcttgaagcggggacgttacaaaataaaatgtatgatttaatttaaactttactaattaatttaaaatataaaattcatggcattacaaacttttagattcctttaaaatttttacaaaaagatttccacactatattatatcaaaatacacagtgtaatctaaaagtgctataaaatcaaatcccggcaatttagcactgctagttggatgagtcgatatgtatattttttggaaaagacctctaactcatggctgccctaacttgtcatttctcttacttgcaccataaaatacatgtaagtcacaaaaacttagcaagaaaaacaaaaacacaaacattcataacaatatgtagatataatcaaatatacacaactaaacataagcaggtaatcacatgctttatccaataagcaggaaatcgtactaagaatacaatccatcattacaacctttattgaagagaatgaccagatcgtagatgattatccaagagtaatcactcattttctctctcacttcaagggttttatggggtcttcaagtgttactacagaagctatactgccacaaattattagagaagggccttttctttccttagatcttcaaatcaatctcatcaagcctttcactcaacaagatgtgaagaaagctctattctctattccttacttaaagagtccagggtcggatggttttgggtcaaaattctacaagagtacgtagaaagaattgggaaatgaaatcttctctgttgttattcagttttttcaaaatgggaaattaccaaatcaggtgaatgaaactcttctcatgctcattccaaatatagaaacgccttcacaagctgtggactacagaccaatagcatgttgtaacaccttgtacaaatgcatataaaaaatgctttgctcgagattgtcaaaagttctaccgaagattgttgatgagaatcaaagtgcatttattaagaatcactctcttgctcataatgttctcattttacaagatttgttgaagggttatcaaagaaaaaacatctctcctcaatgtttgatgaaaattggtctaagcaaagcttacgatacaattgattgggagttcttggagctattactaaaagcttactgcttttcgaggcagttattttgtggttgatggtctgtgttaggaattcaaaatatgtattggtactgaatgggaaagttcaaaataatttcaaggtgcaaaaggattaagacaaggggaccctgtttcaccccttatctttgttcttgtaatggactattttactcggaccttaaaatgaaagactagagaaaagtattttgcttatcatcccttatgtagaagcttgaagctaattaacttatactttgatgatgatctaattgttttctgcaaaagaagtgctaattcagtcaagggcattgctaaagctttctctcatttcagcaattgttcggagctaaaagcaaatcaccaaaaaatcaaatatttacattataggtgttaatgaaaatgctagacaagagattcagcagctggtttcttttaacacatggagtcttccgttgaattatcttgagattttccttagagttaccaaatggagacaggagaattgtgagaccatcatcaagaagctcaaaatgagactacatacttgggctagtcgacatatctcatttacaggtagagctctcctcattaacacaatcttgattggaattagatgctactggatgagtatatttcagcttcctcaaaaaggtggctaaagagatagattggatttgcaggaattttttatggggagaaaaatggaacacaagtaagttgcacatggcttcttgggagcttgtttgtaaaccaaaacaacttggaggagtgggtttccgagagggacccaaatggaacaaggcggctttagcaaagtacctttgggcgatcacttcaaaacggaatatgctttgggttaaatgggtggataacatttatctgaaggacaaagacatctggtcactagagctaaaaattgatgtaagttggtactggagaaagctcttgagacttagagatgtcttcatcaaggaggatattgattaagcagggatcactggtaaatttaagattggacagatgtataataagctcgtatgtggggatcaatatgagttcttggcagctgtaagctatcggctatgaagcacagattcattatgcggcaagctctccacaacaatctcctaactagagacaatctagtaaagaaacacataccaatagatacaagattttgccttgtatgtgagtgggaatttgaatcacatagtcatttattttttgactactcttgtagagtcttacgaaagattaagagttagcttagaagtcatctttggtctaactcttttaagaatctttgaatttgactcaaggcaaagagattgagaagacttattttggatgtgttctttgctatcctcgcaagtacaatttattgtatatggttaaatcgaaatgcatgtatgtatgagaacaaatgtttaagtccaagatgtataaatgagagtattaagaaaaatctaaagagtagacttaatcgtgtaaattaaaggagatttctagtatagataggtatgttctcaatctcaatatagtaaaagggttgtaaatttgtactgtgaggggcttccttgagttgtcaattcaagttgattaatagaaaatatttttcttgattgaaaaaaacattaaataaaatttagacttggaatattaaatatattatatgccaaataggtattattaaaaatataaatactatgaaatttgtatttcgataaaaacacataataccaaatagttattcgcccacaacaagagaataacagaagacaccaatatccaaatatatcataaaagagtgtgaacaaagtccagctttactttttctgaggcgaaacatactacactactagacactagtgcatctttcaattcgtggggcgaaaaaggctgacgttggtaataacttaaacttgtattatacaataagtaaaacgcccaccattggtacaaaagggtgagagctgtgctgctggtttaggagatgttgtaaactgttaagaggagctcaaggaaaacaaaaaagagcaggaactccataatcagttagcaccgggaatgcctctctcagattagcgtttgaccttcttatttatcgacttgtaagatttaagattggattttttacccttcgagttctttttcttggagctgaatgtgtcaccatcagaattatcgctttcatccccatgaccaccaccgcgcttcatgtctttaccacaaactacaatctttccttcatctttcggttccacactctcagactcctttggccgccagacaaaaagagacctggaagtgtgtagcaagagtatgttaacacttagcattaacaaataagaaccaacaagaaaaagtgaagacgggccagcgagcaacaaagtttcattaattcctttcgaacatatatgactccaaacttcaaattaaacagcttttataatggcagttaaaagcgcattcatgttatctatgtataagaagtcagtacaaaccacctaatactaaccaaaaccaggttgaccaatctatcaaatgctaattgacttgaattctgaattacaaatcatcagaaaccatgcagggatgtcaaatacttgaacgtgcaagtgttcataacaacagac

SEQ ID NO: 70071 - DNA, 1665 bp, Cannabis sativa
atatatatgtcaggactaagtatatatatgtattaatttctatatttatttaatcaaaatgttttcactacattgggtaagataaaatcctaagtaatgatagatttacacatttaaattgcacatttattaaacgatgattgcattaaatatttttgaatgggatcaaattattactaagttgttcagagtaattaaatgtcatcgtatgtaataagtccgtccaatttgagtaactcaatgattattcttaaatttaaaatagaaatttaatattaaattttgataattacgaatacacacgtatcagaatatatattacttcaaagcaatgctctaagcaccagtgatgcttagcacccttctatgtgtcagtatcgttattggtccaattaactatcgggtcctacataatttaatataatagtttttaactaattatcgctcgtcaatcgcaacataacatgtcgagaaagtactagacaacactgatatttaatggcaatgctcatataaatatatttttggaaaggaaagccgaagcatatatatatattattggattatctcacaaatatatgacccggtcttgggttcgagtcccgattatacattctaatatataaacggttaattaaaaaaaaaaaaaaaagccttaaacactctttaactctaagtttgaagctatatatacctagttatattaccaataaaaatgtagatggtcaaaatgggtcaattattgggactgagtcaattgcagttcaatgtggcagtgaaaaagcatatatatataatggataataataaaacttagctagatgacaacaaattaatcttagatagatggcttattttatataaatgtgtaggactgggaataaagtaaaaagtaacccctagcttcttaacaccctaaaagtgatggggagccccatcttcttttttgagctgaaagatatgtagacataataatataattctagatcagaaaaaacagtacataagtatcattataattttcagtaagatattctttatatattattatatatacgatgaatggtacttttgtcttattacaaaaaaaggcattaagagatggtagctaataacactcaagagatctaacactagtacaagcaacgaatatgcaacaaatttattctttttaatttttttatcatttaaacatgatgtttatattaacttagagaattaatgtattcttaaattaaatgacagtagtgacaaatggaaacagaatcctaattattcacacctaattaattgcatacaaagcttttaatcagaaaacatatcaacttttttccctaattaataattatttgataccattcttgaatgtatatatatgtctatagtttagctaattaaataataattctaacctatattaaaattttattataaacaatagaaaatgattatgaaaaattgaaaagggtcacattccaatctccattgttctgtgtgcatatatatatatataatatgtaatcaacaaaatatacataaaggaaaaaaaaataatatgatttaattggatttagtgtgcaatgaagggtgatagtcgtgcgtagtgcatctttattaattagacttttttttccttctttcttctatatgattgaaaagattata

SEQ ID NO: 70072 - DNA, 1326 bp, Cannabis sativa
  modified_base (1222)..(1242): a, c, t, g, unknown or other
tacaatgtcaagaagccaatctgcataatagtatgatcctttgtgcagataaagctcctgcattctgtgcacttattcatgagaagctattgagaccaaaacatcttatttgatgtgcagagttcaaaaaacgaagagtagtatcatcagccaacaggccagcaacccatgaaaacgaatcttcaggccttgatgcattggccaatgcagcaatgctcggagacaatgcaacagcaaccgaaccaggtaccacaacagttgctgccactacaacaaaacaccccaggcaccgacccggctgctcgtgcattgtttgcatccagccccctagcggcaaaggcaagcacaaaccttcatgtacttgtaacgtatgcatgacagttaaacgccggttcaaaaccctcatgctgaacaagaagaaacgccaatcagaacgcgaagctgagctagccaatagaaatcatcagaaaacattatgggacccgagagacgaaacagaagtagacagcactacatctagacatttgtcatcacaacttgatccatcagacaacgaaactagatcagctaacgaatcagaatccaagaaccactgcaccctggctgataccgccaaggaagcactggacttgaactcccatcctgggattcgggaagaagattcgcaagcagggtcaagccgcgtcagcatgatgagccttcttcaaaacgcaagccgtcctctcgacacgtatctaaagcaaaacggtctaacgagcttgactcaagaacagcaacagcaacagcagacgagttcggcttctcatgcttttccacaagccacaaatgagagtgaggaacaggttaataatgaagatcaagaacagtgtcctaatcccattgttgaagaagaacatgaaagtgatggtaatgagcaatgtggtgataatgatgatgatgatgatgatgatgatgatcaaagcttaaaagatccactttgatattaaaaatatacatatatgtgtttcttgaacttttcttcctttttttttttatatacatatatgtgtttcttggttttcatttttgctttttattttctcttttgatgatttgatcactgactgatatgatataggtctcttactgtaattttggctctctcatattttttttaaactaaaaagaagaatgaaaaagaaaaagaaaagcatatgcatggtttattattattattattatnnnnnnnnnnnnnnnnnnnnntattattattattattattgtgatatgtatacaaataacaactcttactaaagaagaaaaaaaaaatgaaacttcttataatga

SEQ ID NO: 70073 - DNA, 1616 bp, Cannabis sativa
  modified_base (1035)..(1054): a, c, t, g, unknown or other
tttcaatggaggactccggcaacggtatggatggcagatgaaatccccttcggagaatgccgtgtggtcgacgttgaagaaaacttcgtgcaactggtttgccccagtcgtagtcgggagggttgggtgggtggtggacgccttcggtcgtcttgcaattaagtcgagagagaatgatggcattgattgtgttatgatgagggcattttagggatattagtatattttttaagatatatacattttagttacactcctatagaaactcaaattttgcaaagaaaacgctgaaactcaaaatcaagtaagataaaaccttcagttccagttcaaaccgtccactttactcaaaagttcactaccagcaactgcactaaccccacttaaatccctgcaaacataataatacgcaaattttgagatattgagctaaagggtagtgtagctaaatttttagaaatgaaggttacttgtcatttagctaattatccccaaatttttagtcaaaaaaattcctgaaaacagaaagtcatttagcgtgaaaagaaataaacaacatctttgtttgattatagagaaaatgaaacttaaaaatggaagattaaaaaacaaaaaccattttaccattggtttcactattaattttgtttcattttcattttgtcgacaaccaaacaaagaaaaattcagttctagtcgtccaaccacattcttaaacgggaaatttgataaattacttttggtaatgttggtttattttttaggacaacaaattttaggttaattaggatttttaccccctaaattttgatatgtaccaaatcactctctatgaacttttaaggtcgttaaaaatacctcctcagattgttggttttaaggacttttatctaattttagcaaaaaaaagtctaacgtggatgatttagtacatattaaaatttgagggccacaatttggtaaatatcaaagtctgtggagcatgatttaatacacaaacaatcactgaaatagtaaaattaaatgaaattagannnnnnnnnnnnnnnnnnnnaatctcaatagttcatggaaaatttttagtggccagaaaagtttagggagcatgatttggtacatgtcaaagttcgggggccaaaaatcctaattagtctaaattttaaggatttattgaaccatatcgtgttttctatcaattattgtattattatcagactactatcggatctttattcctaccaccatacctatcatcgtaccatattggaccactattaaatcatatacaaaaaaaaattacagaaaacacaaatttcacattctaggaaacaaaataaaaatttctatttggaatctaaaattaaaagtcaaaaacttaaatttataccaaatatacatgagtaattattctttcttggagcaccactaataatctaactctaagtctaatttgcctaaagtaaacatatacaagtaggagatttaaagatcgaagatttatatcatttcgggatagaatatcgagaatatagtcatttgcgtcatccatttcataagaaaaattaaagtgacatcataagcaaatgatttacaaactattcatctaatgatatact

SEQ ID NO: 70074 - DNA, 1153 bp, Cannabis sativa
cttgaagaacccatttctaaagctcccattaaatataacaactcaacaagttatctactttcattttagtaactgaaaatatcaatcaaacgagttcaaatggataatttcatagacatcatatatgaaaactttcattatgtatatataatttttttgttaatgcaaattcattaaaggaacaaaaaacagaagcttctctagcaagaaatggagaaaacaaaattgaaaattacataatctaaacaaaagaaatataggtaaggaatgaagaaaattactagttcttgttcttgttcttattggctagcaaatcatcaggaacaaccttgagtaacttcctctgtttagacttagcaagtttcttaagcgttttgggattagtgatcttctgaagcttagtaccagatctcaatatgttctccttcttcctcttctccctctcttctctttgcttcctcttatcaactttattcttcctaatctcttccttaagctcttctttcctttctctgtaagctttctttatctccttctccttcgctctctcttcgaagttcgttccctttctaaccatagtcgccgaagccctatgcttcctcggctgcttccacttacgaccggagactcttccggctattacgccgtcgtaagtcgcgtttccgaagatcggtttgtcaggattctccgacgaagctatagctgatctctttgctgagggaggagctgagtcgtcgacatccatggctgcatcgacatcttcgccgttgccgatgttgttttctgcttcttgtcttttacgtttgtaggttttgccgccaaacccttcatctaagcaacggaaatcgattgtacatgccatgactgagactgttattttctctaaccctagggcttagctcaatggagagctgccaatatatactcttcgtgctagcatgggctgggttgggcctcaattgcgtttcatcaatgggctccgtcaaggcccaattgtttcgcttcgtttttaataaaagatgtggttcctcgagactatccaagaatattgtcgtttcttctacttatggtcattttcacaaaaaagaattaaaagaaattaatatatatcatgaatgacattttatacctataattttattaatttgggtat

SEQ ID NO: 70075 - DNA, 1090 bp, Cannabis sativa
gccgccgccactgctgggggcgttaaggggaagaagaagactggtggagccaggctatggatgagattcgatcgctcggggcaatcggaactcgtcgaatgcgacaagaatactataattcgccgcgcttccattccccctcgcgacttgaggattcttggacctatcttctctcactcttctaatatccttggtaattttctttctgttccttctaatttcaatatcagattattgtaaatttgctttagggatataatgcttttttttttgctatagcttcaaggtccacttagtcaaaattagccaaagaactgttaaaccgtattctctgcttctttgtttgttgtatattatctatgtgtgttagttagttatgatgaattgtgtatttgctatatatgttttgcagcaagggagaaggccatggtggttaatttagaatttattaaggcaattgttacagctgaagaggtgttgttgcttgaccctcttcgtcaggaagtccttccatttgtggatcaacttaggcaacaacttcctaagcaagggccatctcagatcaatggagcagcaggtacttttggggaccaagaaaatgaaatgaatgatttaacaagtagacattggttacctgttccagaggccgttgaaggtctgcaatgtgagcttccatttgagtttcaagttcttgagattgcattggaggttttttgtactttcctggattctagtgtggcagaccttgagagagaagcttaccctgttttggatgaactagcaaggaatgtaagcactaagaatcttgaacttgtcaggagtttaaagagcaatcttactcgtctgcttgcacgagttcaaaaggtatgttagatgacttcattttgtgtgtcattgaatgttattgttactgcctttatcttatactcatgctagttgataacatatagcacatctggattatgttatagtttcatgaggagtagatcatgtaagttatcttccctttgctttagaaaattttattctaaaggggaaggagaaaacttatagtcacaataaatggtgcctcaacgttaatatattttta

SEQ ID NO: 70076 - DNA, 2369 bp, Cannabis sativa
cagaatgtaacagaatgaagatatttacaacagtttttatcgttaaggggggatttttgcagcagaaaaaagttgaggggcaaaactctaccgtaatcatagttcgaaggaaaaaaatcctagttatttatttattaataaaggatggctttaaaaccatgtgtttcattagttgaaaagttggcggaatatgagattgcgatgattcgtattctgtatagtgctaactattcacaagttacatttcatctgtaatatattttgttctgttttattgccacaggagagggacattgattcagcagagttaatttcatttcttcttgagcttagttttcatgccacaggcgaggtacgagtttatatttcttttttacatttgattttttcgttacttgtagagtcattgaatcggttttgtttagctaactaatattttatcggttagtagctatctttcacattttgttgcattaattttcaggcgtataacctcaactcattgagtgacgttcagagggagacggtcaaagatcttgcagacttgggattagtgaaacttcaacaggttttttcgctttttatttttgttagataatgggcttatagtctctcagacgatcaatatgctttaccgaagttctaattagttttgggaatctttctagggtaggaaggatagctggtttatacctactaaactagctacaaatctttctattagcttaacagattcatcatcacgaaaacaggtttgaacttttcattttccgtaaagataactgctatcaattggtgaccgtttgcaatataaattttgttgatctcacctttttcgtcttcataatttttaggggttcgtggttgtggaaacgaattttaggttgtatgcctattcaacttctaaattacattgtgagatcttacgccttttctcacggtatgccagcgaatgttagcttatgcaatttgaaaaatcttgtgtttgttagcatcaaagatatgctttgttttttattttttcggtgttgctaaattctgagattggtcgatgtattcttattttttaacgttgtgcagggtagaatatcaacttccgaatcttatagttggagcaattacgaaagaaagcttgtataatgctttcgataatggcattagtgcagatcaggcaagtcgtacttcattgttatattcttctttcttttcttcgtatgtactcgcttcatatgcctaatttgttaatgtggacgggaaatcgtgttggtttgagaaatgttcattgttataaggggctataaagtgtttggatcttcttcggtttgcttgaattattcgttttaacaagaatagggtgctacagttgtctcgtcacatgaacaaaatcaaaccgaaactggctcatatgtcataactaacatgtcttcgattatcgagaatgtgatattcctctttgtaccctttatcttacgttgttggatcatcgatttctgaacctttccatctacagataatttcatttctgcagcagaatgcacaccctcgtgttgcagaaaaactaccatctgtacccgagaatgtcaccgatcaggtttcctatactctttatcattatgctctacatagtccttctcaggtgaacgtattgcatactaagaaaatgtactctttatgtttcagatcagattatgggaagcagatttgaataggatcgaagcgacccctgcatattattacgacgaatttccttcaagggtgacaaattcaacacttttctcaaactaaaacaaatacatattcgcttatactgtatcactaagattatgtctcgggttcttttttcgttttgtataacaacaggaagtctttgaggctgcttgcgactttgcacgagaatggaatggtttattgtgggaagatatgaagaagatgcgtctgttggtcaaggcagaaatccacatgaacatgcgagagcaccttcgtcgtgcaaagcagtaagaaaaagaaactcgggtttaatgtcttgtgccatattcagtgccatcacagcttgtgcttgggaataatctcgtcggaagagtaaagcccgaaaaggggtggtatttcaacactgagagaatgatgaaatttgacaattttggttttaagccttcgaattcgtctggagaaggcgatgatgatgatgatgatggtgatgattttacgggtaatgtaaaactactatagatgaaaggaacattgttgtgtaactaatgaacagatttgaaaatccaatatttttgtttggaaatgactaataatagagttggttgatgatgatgggagtgattttgataagaactttcttgttttgttcttgtattgtttat

SEQ ID NO: 70077 - DNA, 2182 bp, Cannabis sativa
aaactagtctacattgttaggcaaatgtattgtgttgtagtctacaatttcggttagcaatgaattaatgattgatgatatggaggagatataatgatgatgtaaggattatattgatattcaaaactttgagaaaaatataggtggggcttaaaaccttaccaataaggttcctgtgattcttaggataatttctgtcccagttgtgaagtttcggttacatttttttaaaaaaaaaaatagcttgatttttctgttttattgttaaaaggttgattacaaaattttttaggttggttgacattgggagtgcattagaagctagtttggagatcatttttagtggttgaatttgaaaatctgcatgagctcctcctttcttttcttttcttcttagtggttataaatagtagtggaagggaaggtgcagctggttttgttaaagaggttacttggctttgaatcataggacttgtactaatccaccaaaagggagaatgcagttttagttctcatatatttgcaaggttcctgttcctttacaatgaactgatcatctatagtatgcccttgatggtaagattgggaatataatctagggactggctagtgtgtttgatggctaattggaggatgcgtgattaaaatcttctattcaatgcaataattcatatactttagcagtagctatggtacttatatcattgctaatgtgaagatgtcttaatttggattcttcaaagaaacaaatgctgaatccgtgaaatgcaacaatgctcaatgaaattaaagaaatgtggaaactacagatttgcatctattatataacattttatctagtctgtgaaatccactaccaggcagagagatgtgctgctttatgatggcaaagtttacaataatatggtgcttcaggctttcattttaattaattttaaagccgtcatatctatatggattggtgagtagtatgtacagaacttgatattagccatgaagtgatgcaatttattactttgattggacagtcacttctacaataataatatatctgcaaacttggattgtgtccctaaaattgtccttggtttcatctctgcacacttaaatcgacctcagttattcattgtttatcatcctctattcaaaggtgaaaaatttgtcagtcattactgatagtgtttcatacaccttggagctttccaaaggaaatgatacatgtttttttgttgttcatctttttaatccctttacattaatttatgtgtcctctcctcgctttgatcatgaggtttttaatgcacttggaacttttgtgttcctttttcctaaattttattgttgtttttcacctaattactttcaagctcattcatttgcatagagagtagcacatagcctattgtagataaaatctactttttatttttaattttttgctgggtgatgtgtttcatagatgctgttgcctatttttgtaaacagataatggctctttcggctatgaaatgggttggtggaaagaagagcattttaatgcatcagatgcagatggtgatggtcttttaaatattacagagttcaatgagtgagttaacttttggcttttttccgtttatagaaagtggttttcaattttgttcttcgtgacttatattttttatttcttccctaccttaataatacagctttctgcacccagctgacagcaagaattcaaagttacttcaatggttgtgcaaggaggaagtaaggtgatatgtgaatttcatttgcatttcttgtttacactttatggtaacttttacaaaaggaatttcatattcatttaatgaatcggactcatttataactaaaaggaatagaaaaaggatgagtataactcaactactagtgtgtttcaacctaaaagtttttaaatttagatgaattctacttttataattatggtttgtcttgtgttcctatgtccgttgttaaacccccatcttttattagatcatctaagctacaataaccgataactttataatatgtggaggaggttacatttattgtccatgcgcttggatctcatgtgtatatattgcttatgttgtgatatagtatccggatagagggtagatttgaaaataaccttgagtggtaagacttgaaattttctttttcatgttgattgttg

SEQ ID NO: 70078 - DNA, 930 bp, Cannabis sativa
tgtctattactactttgcagatttaaagacttccccgaggtaatgaagcagatgccaccacttcctgtgaaactgaacgaagagctagctaacaccatcctcccccgaacaaacaattcaatgcaatcatgatccagctgctcgatctttgtcggggcacttctaattagtttcgtaaaacagacatctggtgggtacccccaatttaaatcacaacgtcgatcagataattacgaagtaactctcaacagagttgacccaaaattgcttttaccatacagatgtctcttcctttttcaatgtgtttctgcgtttaatgtttggtttcttttctttctttagtttcatagtgggcatatgactcagttgtactgtgtagaaagtagggaaggatatattttttttttcttctttttagctattcatggtaataaatagggaatggagaagtgaaatagtttaataaggcatttcatttcaattggttctgttctatagattgtgctttctattctctcatgtggatactaagcagtaatgcaataaggtttcccaagtgtgaatagttctttgacactaattttattattctctattttgaagcattgaacaatttgtgcacaaaggagtattgattactattccacaaaatgaccttaatgatactcatattagtaaatatatgagcacatttgtatgtgctcattacaatgtacttggggactataagtcccttttagaaattgcaatgaggtttcgctataatatctctagtcttttttcttttagtatggaaactcatattctttaaaaaaggatatttacagcataaatactatatgttttaagttttatacatttaaatatcatatgttttcttttaacggattaaatactttatgttatatttgtattactttcgttactact

SEQ ID NO: 70079 - DNA, 2742 bp, Cannabis sativa
cccaaatactttaacttttgatggcacgcaacttttccatagtatctttgtccaagccaggtcctcgattgatgggtttgatgtcaaccaagagaatttggaaaccccaattttcttttttaaaccatacaagaatgaactttctgattaagaatatagtgaaattcccacttcagtgctttgattatgtctcacttggatggagtgagatagaaatattgccaagacttgtcttacaacttatgttatcctttctactgagacaactttatctgttacatataagaagtgtgactctttgagttctgaacagttgcaaaaatattcctttggataatctgggggaaaatgaagatcattaattaaattaatttgttgctttctttcaggtcgatctctcataattcattttatggaactcttcctaaggagcttgggaacctcaaggatctttttatgctgtaagaaatcaagccacactatatttaacatcttatctttatggaacggaaaagtattttttagaatgcagtttgagaatatcaaaattctcattataaggcaggcataagtagatgggttataggaacataacttatgaatctctgttatggtattctgtaatctgatatttagattttagaataatcaatctatgtttttaaactctttgcataatattttttccttaacccacttaaccatgttcatgcaaagaaataatgttaaacagactttgttgcaaactataatcactattcacaataggtctaattctactaatatcttaatatattaggtctataacttgtacatgattggttaactatactacaaatttaatcacaggaattcagtactattgtaatgtcaataataacagacctatgttaaaagatgttttacagagtaatcttttgtatggttgtgtgtagttttgagtgtggtcaagtgtggtgtcaagcatgcttgattgtggttgagaaatactatactgaaaaatagaaaaattggcttttttactaataaacgcttataaaatggcatattttgccaagaaccctaataattagattattttgtcatgacaacacttttcaatacaacatatagtatcatctatgtttatgcatacaaacttatttcagtgccaattagtcttttccaatatttgtatggttctttgaaatgtatattgcagttcaatcggttcaaataacttttctggtactcttcctccagagctaggcaatttgatcaatcttgagcaaatgtaagtttcttcacatatttaagactttacccagttcattaagaacaaataatgctattgctatggtttctatttggtctgcatgtagtttcttatcgtttattttggcattttttatccttaaattgagttttagatatggtgtttgttggagatttaatccaacactaatctcaaatccttgcacacaaacaataataaaccaaaaagtgcaacacaaatacaataacaaagcaattcacaatttgaaccaataaaagaaagtaaaatcaaagaaataatacaatgttcaaaaaaaatgcaattgagccttaaggcgttttttttttctgtaaggcgaggcgtaagcgtcaaaaactaatgtaatcaatacttttagagcacttaagaatgaataaactgtcacataaatttcacacaccataagaatatcttcgaaaaataataaccataaaatgtctcataaatttcaaacatacaaaaagatatgtctcataaaactcaaactaaaataaagataattatatttttagaattagaatcctaaattctactatcctagaacacagctgcacaaagcgagcaacaagtttttgttttttttttttcgttgtttgaagaaataagcagctgcacaactgctgtgaagaagagagggagataggaagaagatagaattaggggtttttatttttaaattttatttgggctcacttaaatatttcattggacttttttattttttttttttttggaaaaaagggaggagggaccactcactaagattggcccccacccttgagataaataacaaccctcgcttatggcggaggaaaaccgtggttacaaagtgccctaaattctaaggcttaaacaaagtctcaaagatatgattacaacgagcatattctcttgttaattctttacagcagtgctctccattctctcattaaatctgagaaagaaacattttcaaagagcttagtcttgtacacccaagaagcagtccaaaatttaattttatcccatagggcttctgaagagctctccggaccttcaaagattctgttattacgttctaaccaaaccacccatagaactgccaagactgctgttctccataaacatttgcttcttttactgccccccaccttgctcactatcatttgagagaccacacaaggcataacccattgagtctcaaattcgttaaacaactttgtccagagattacatgcaaggcgacaccttaaaaacaaatatgttgcatcttccccacttgacttacaacaaacacaccaccccggtgacaagcacataaatggtcgcttcttttgcagtctgtcatgtacgttcaacttatctagagatgccaaccacccgaacactttaactttagaaggtcctctgcttttccatagagtcttcgtccaaaacacctcaccaaactccttggacgaagaaaacca

SEQ ID NO: 70080 - DNA, 2206 bp, Cannabis sativa
  modified_base (27)..(32): a, c, t, g, unknown or other
aaaatagattacattgaaatggagttnnnnnnagggcataaaacctaacaggttcagtatttggaggtattcaatttagatttcaagaaaaatccttttaacagggggataattataatgatcgcttagttttattttgataactagcagataattagggattatttttcaaaaataggtttttaattattattcttccaattatggatagatatttgaattctaagtgtataaattatgttatatatgaaattttatatttttcatattttatgtccaataatagtagaatgtgacgattggcatatagagtcactttgatatagtttagtactttacaaatagtgggacaatatagttaaatatttaaaatgtcaagattacttgaggttatagtttgaaccattttacccctagttaactagtttacttattggtaaagttatgaagtcattgttatgttgactttagttattgatgtgggaattattattttaattatttagtttattaagtttgattattaagttaaacattaagtttcacttattcaaaaatcattaaaccaaactctctctctctcttggtgtttggccaagaccatcccaaggaaaactaaagctattccataattttctaatctttaggaagggatttcaacaaggtttgttagtagtgttgaggaggaatcctaaggtaaacccaaaccctaaattctctttgttttttaagtaggaaaattgggttttatgcatatttttttagaattctgtttctgtttaggttaagttgagttaaaagtgtttcttatgttgattttgagttgtttatgttacaaattgctggttttgctagttgttgttgtgaaaggtcaaggctggagcttttaagctcaaacttaggtctttaatggtggattgtgtttcgggggttttccttgcttttatcggttgggttgtgttctttatgacctagttaggtgttctgaaagttttggtacaatttagggtagatttgacatagaattagaagtttggtctattctgcaaaagaaaaacagttcaccattttcagaatcagtgaaccaatttttctggcaggacccaagaaaatggtaaaccattttggggttttggttaatcatatttttttaaatattgggacttagttattatcgttttatcaatatttagggtatttacatgctatctataaataggaaaacttttaattttgagtttaagtcctctaaaagtgatttagcatatcacttaacagttttacatatgttgtggcttaggggcatgtaaatcgttgaacaatagtttcgacttaggtggaccggcatacctgaattcagaatcaaggtaagattagtataatattttcatttatgaatacatgtttagcgtgcatgttagttgccattataatatcatgtcagggtattggtgatgtgtacatagagatacaccgagatactaacaaatatatgttaggcatattattggccattagattagaatattaggatattggtgtgtacatagagttacactgagatatcaatagatatatgctaggctcactcgtacaaatgttccagactctgtatgcttgggacgcgtgataggattgtaattgggtgtatgggtgctttagttataatgcgatttatttttatgttatgacaatgattttcttactgcgtctatcgacttatacattgtttatatgtgtaggtaaagacaaagtaaaaactaagtagtattgagctcgagctaataaagattatatatattggggtaatagacctggagtgttcaatcttcaggacagcaggcttattttaatagttgctaggtgacaacttttgttattataatattttgtaaaatggttgtaactttaaagtgagatatgatattatgtaaattattatatatatttaatattgaactttaattattcacatttttcaataaactcattgattagcaatagagtgcacagtaaaattaaaatcacaataacatgcctaatctagtagggtgttatattaattttcttaatttacccacaagagttaggataattaatttaatagtgttatcacaaatttaaataagatagataacaaacctttatttttcctaaactaaatgtttaattaaatctaacgtaaagttcatttgattttatgaaa

SEQ ID NO: 70081 - DNA, 1037 bp, Cannabis sativa
tttttacttgccattattgcttttttagacttattctttgtttggtttagcaattcttagaacagcaaaagatactaattttttcaaaatcgtatttaaaggatcgaaaaaacatcttctaatggccatttttatagtagtttctaattagctatgctttacagtgaaattattcatttaataatatggtgtgacactcatgagatttattttctatgttttagtctaatagtgaaaagagatgatgaacataaacatgccaagtcttttaataacaaatagatattctaaaaaaaaattgctcaaactctaattataaatccaatattaatattagatctaaataatttaatccacaaaatatttttctttaaacacctcgaatttaaatcataattaactatttatttagatggatggattaatgtaaatggacacacttggacgtttctctctatgttggctaagaaaaactatgttaaattacaaagtcactttaatttatcaattaatcatgtctttattgtttaatttttataatttatttttattttacaaatttaaatatttaattattattaaataactcacacaaaaagatcaaacttagagctatttgcattttagctaaaaatagatttgctgaagtggtggatttatgtccaagtttgaaggttatgaaattgaaatgtgatattggaggctttaaacttagtggataggatagtgaagagtgtagagtagacctcgtagaatttggggtccgattggattgtgttatatctcgtaactcggttggataaaggcacccccactcttgcatttgtacgacaccaaatgagtatatatattagctaattaatttataatttttgtgcttaaaaatatatgtcaaaatattttttttaattttttttcatgagagtgtttattatacttataatatcattcctgtaaatttttaaaaaatttcaaataatttacagtatcaaaaataagtttgaagttttttaaacacacgtgataaactgaaatat

SEQ ID NO: 70082 - DNA, 1379 bp, Cannabis sativa
  modified_base (42)..(54): a, c, t, g, unknown or other
aaaaaaaaaaaaaaaaattagacccttactataaagataaannnnnnnnnnnnnaattattaaaaaaaatatatattatttaagctctaggtctagcctaccttagcttagtgccaactttgatccaggtgaaacctgctcaaaatgtttagtcttaggttgtactagtttagtcaattagtctttctactatttctgttagtcttgacagctcatagctagtgagttcgagagtcggttagttagaggcggttactgattatacttcttgtgcattacattttttaataatcaatatactgagattgtccagctgatcaagaactctataacaacatacagttacaaattattatttatatatactgttgttgctggtgtggtgtcgtgaagaagcaggagaaaacccgtccccaccggaaactttttcttaaaataaagttcaccaatgacaccaaaagctaataataataaatgataattaacaacattatactgtaataaataatacaagtacctttcattaatcccaaagataaaagtgattgattatgttcaagaatcaaagtggcttagcaataaatccaatcttcatattaattaaacaaactataggacaatatatatgtgttggtttgcttttgtaatctgaaatgatcggcatataactattttctttttttttttttttaagggatggacatataactaattggttatatgtatgttgtaataatcttttcttatgccattactatcatgcttttttttttggaacaaccattattatcatgctttgctcgcagtaaataacacagttctatatacacacacgacaattagctgtcaaaatcgacacaactttaattgcaatcataataatcaacaataaatatgataaatttcaaaatgccaaaaacattcagaaaaattattacaaataaacataatatcacaattatgttccaaaaaaaaaaaaacataatatcatatataattaatcacacatgcttccaaagtacggtttcatatataaatatacatttatattaaagcctagttataatcgccccccactgtagatgagttacttaatagcaacgacaatagttaatccatgatcaattatgctagcaagaaatccatgcagtaatctctcacagctcagattgttaaacctgcatgcatgcgcacaagagagaaatattatgaataattaaagtacatctcaacaaatcaggatcaatataaatatatacatatatattctcaactttctttcttttttaaaggttggattttacatttacattatttatttaagatgaaagcagtttttatcctagtgaataatatgaactcttatggctgatatatct

SEQ ID NO: 70083 - DNA, 1635 bp, Cannabis sativa
ggaaactaccagttatataaatatttttttaaaaaataaataaaaaggaaatatttcaaattaataattaataattactttttcaataaactttgctttggtggttttctcactaaaataaaataataaataaactttgttggtgatccttttaattaaaatcaaatacaaaaaatttattttccaaatgcacaaaacaaaagcacaacatccaatccttttcaaataaaacatattaattaattttttttgttaataatgtcacaaatttttattaatttatttatgtatttaactttaattcaatattctatgttgcatatatatttttttaatttccttaaatgatgtttgacttctaataattattatgtagaataataaataatatatattctttagtgctctttcctttgtcttacaaattgtataagattctaagatttatttatttatttattttctttttctttcttaattctgaatatttttattaattttatattttaagtcactagtttttgtgcctaactaaaaaagctaaaaaactaataataataatataaaaattaattaaagtgtttggtactggaaacggtgtcgtataaagaagcagcggaatttgaggaatcttaaagcttcaccgacacacacttttcctaacattatgccacgtgtactctaaattctcaattctttacctaaaacaattcatctttattgttatatttaatattatatttatttctttttatccaatctctcagtaataaataacaactaacaatattaaatttatatataaatatttatagatatggttgtggaaatagtgggaattaaacggccagaacccagaattgatattatcaacaacttttttttaatttatttaattaatttttaatattttggctgtttcttctccatagctaaaaaggtgttgtgtggtccttcaacatatatttgtgtgaatgatataaacatatttttagtgagaaaaaaatggaataaaaagaattattattttttaaataagacagaaaaaatattattatatggcaaacaaacaaaggcctcgaaaatataatttttgatgagaaaattgtgtgcttagctggatgagtatgggaataatggatatactctgtgactgtcacttcatacaacgaaagaaaactatgtaaatcaaatttctttttttttaaaaaaataaaatataaaattaccaataaataaagatagtgaagtgagatttgagagtgtgttgtagtgtataggtgtaggcccaacccaaaagtctttgaagattttaaagatcacttttaattcaacaaaagggcctatgatgttatgtaggtggggagcttcattaggcccacatatatttcccctaattaattatcataatattacatgcaaataattttttttataaaaatctaaaaaatacatcttttgtttaagagcactcataatagcttttttaaaattaatttttctttaaaataaataagagaagaggtggaaaagtgcaaaaataatgctccatcaagtgatgtattttaaaaaatcatataaagaatgtaataggtaaagaaggactattcctcctttaaacatattttaataata

SEQ ID NO: 70084 - DNA, 7309 bp, Cannabis sativa
atcggttatgaatgcacaagaatcttaccataaaagaaaaaatattttgtcaactaacttgccaaaaaaaagactttacagattcgttcatattcataaacagtttttagtcacaaaatttatattttcatttgagaacaacaattttcgaattaccaactaaccaagtcttaaaattttcactttcaactttttgcttaatttttctagttttgatttgaaattaattttccaaaatagttagcaatatgggtgcacaaaatatgggccaaattatacaacctggccaacccaacttattttttgtaataaagagttatatgaagagtaggtcatagctcattggactaaaaagtgataggtcatataattatggattattgtgggttggacacactctaactctatataatccaacccaactcattttttgaaagacgttccaaatttgaaataactttcatatataaagtatattttacattcccaaaatatacgtagttcatagttaccctactacttctacaaacaagtctaacatgagaatcaattactattattaattttactacccacacaataatataaccaccaccttagattttttatagcattatatttacatacacacacatatatatacatatatccttttttgtgtatacactaggttaaattattttatcattctcttgagtatctacaaagctcgtatactcggagtgtctagactcttgagtctttcctatttccgcagaatcattctgacttggacccttagaactcctcttgctccggaattggcttacattagactctagagcttctattttttggttcgtttgtctgagagcggcactaaattcggtttgtatcgctctgaattctgtttgtaccgctctgcatccgatttgtactgctctaaatttggaaaaactaacctgtgcagctggctgcgcgaaagcacgtagtccataaacagtaggagttgtaaaggcagttttcggaggccaaaattgatggagtagtcatctgtaaagttttagttgctagtatgtttgtggaaggtactagaagtactctatagccttgagcataagcttcttctaagtttatgaatccttgaactcttgttaagacatcagtcaaagtatttacctttttgtgttggagatctccccatagcaaggaccctctggctaatcttgatgtcaaagccaccatcttcatgtcatcagttaccttggttttagcagcaacatccatcataggttggatgtacttcttcaggctttcccctaatttttgtttgatactggtcagggaactagcttccaggtcgaaggcctttactgctacaaattgcttttaaaaattgcttgtagatccttccagttgtggatcgatcccgaagataacttcttccaccagtcttttgcagggtttcttaaagttagttaaaagtaaagacattttgcatcatcactagatttagcgacttgtatcatgcaattgtacttggacaagtggtccctcggatccgtcctgcctttgtaaaattctatttgtggcattctaaagcacttcggcaatgttacatctgtgattcttttcacaccttattctatgtcttcttcttcagaatccgatacagtacaattttactttctggagatcttctctatgagctttatcaagtcttcgaattttcattctaagcattgagttttgtcacttgaagattcccttccatgaacatgatcgttgatatgatttctcatatcgttcccgtggggtctggccttttccattcttgctttctcttttttctagtttaatcttcttcgaacatcatttgtggagaggcttccactattgctgtctgagaccagatatacctcatcaacacccgcattttgacttgtggagttgttgcgatgatgcttgtccttcctggaaacagacttctttgctctggtatcagtcttatctttctatgcgactctgcctctagaatcacgctagtcaccctgccctgaagcatggtttcctttattttttttattgaggttggttgatagttttagacttcttttgctgcttagtcgaaggattcttcttcaaagtgtcacctgctattcctttccctttatccttgcaaggatttgaggttccaagatcttttggatcaactctttcaggagcatcagttgttggaggcatttgcacattagagattcctttggtcagggttgtgatcacgaccttcattcttatcatctttccaagcagtatctcgttgaactgatcctgatgagatagcctacttttagttaactagagcttttggccatgaagaccacgagatctaactcgtcgggagtgttttttcctccaacaatgccttcagtaggtttgccttgatgatcgtcctttggcgtgtcttaacgatcatcttttgaggtctcttgaagatcgtcatcagcatcatcagaaatgttctctttcgaatcatcatctccgaatacaggagcatctaggtttgtatctttgcgaacttgatctttatgacggctagtcacctcgttctgatcttctgcatctccctggcattaggatcagtgaagtgaagaccagacttattacgagtgagtaccatgattgctgacgcaacctctagatggtatcactgcttccttcaactctcaatgaaagtaccaaaatatttaccgagtaaaagagaaagaataagaataacacaaatattttttacgtgattggggctttaacgaaacttaatccacgagtcaatattattatgtaactttaagctagaaaagccttagaaatacaatgataataagttctcaagtttgactgagcaaatattgcaagagatttcaacccttaatccgaagtattcattaggtatttatagtttttcagagaatcatacttagttttcattttccctctactagggagtttacattgaattacataacttgagttgaggttcagcccacaaaagagtgatctgctgactaggcaatttagatacaactgaattggtcaaaatcatgtcctataattgtgggcaattaatcgtgaattaattgcttgatcattgtttaggaagtttccccttttatcttgatccgatcttgtgtcgagatttagagagcatttatttccttatttgtgcacaggaataaaaagggaaaccagactagtcttctaggaacatgctgtctaactcttcggcatcacaatattggagctacttcgagataagagctgtcactggcagaagatcatctaaccacggagctaaggtacgttcttgaaaggtcctatatagcttgggcttagccaaaattgtctttcttgggacccactaatggccttgatggtgacctggattccacgtgttccttaccagaaatacagataacacacccaatccataaggcttcacaacgcaaattaattatttatcaatcgtccaggacccccctaaaaaaactctctgtctgtagttgtcaagacaatatttgttgagacaaaagttgtcaggataaaagacaccatccttgtcctaaacaagacatggtacgcacatgtccttatgaaatttgtcttgttgggttaattaattcaatcagataaatatttaaatttgaaaagtagttaaagatatttcaaagtagttgagatattctctcaagtagttgagagatttcttcataaatatgagtaaccgaattcggttatagatatttatttatttaaataattaaatatgatttaatttataagaatttaactactataaataaaagtctaatttgaaaaatcagaagagctttttacattcttattttcgaaatacataggagaaaaagaaaataattttctctctcaaattgtttttcctcatgttatgaatcaacaagaacacattatatattttatcctaataggacacactatttcttgtgtattgtggatcgatttggaaaatactggtgtgagttcaattgcatcatcctcatcatatggaataaaggatacatcatacgagaaattttgtggataccctgatagtcatcaagaggtatatgtttaaacttatattttatgctttgatttagtgtacatacatctggagatccattgggctatggtacaaaaataatcacacatcctaatttagtaccataaaaaccaacacgcttctcttggagttcctcttagtaggaccccttccttagtttggtctagtttgagtttgtgttccctggggctatttccccagtcgacgcaccgtctcttcttccatgtctggttcatcatgttgagtatcctccatgacaaggcggtctgattataatggggagatgtgttttgagtttttttacaaggactctcaatgaaagtaccaaactattaactccaaatttcgttaacaataaatgaagctttgtaaagaaaaattatatatttatcgttaataatttatatatcacaaaaaaaaaaattatgtgattttgtagttaaaatttacatactccacaagtcaatattatttttaaatttatctttatagtgtttattgattacaagagaatatctctggatattatcttaatctcacaaagtttttctttcccaaaaagatcaatcatttttttcgtaggttctatccctatttataagatttttaggaatgacaattattctcttttaatcttatctaggtaaccatttataaaatatggacaatccccgcattttatatttacagcatgtggataaataaaataactacttataaccgctttttgttcttatcaggaagtagtttgttcatagctgagataacatattccaaatatggcttgcattcttcattgatgatctggaatagttggtcgtatcccgcgagacgctagttaagatgtttgtcctcgctattaccttttacggtaattctcggactagtctttaggaatcctgagataggtttcactttgcttatttcgcttagtctttcaacatactcacgagtatgtagatcaatgggctgcaagctcttaaaaaactcattatctatgtttccacttaactcatcccttcatgctataattctacctaatttatctcagtcaagtttcgagattagcttatgaccttgttattctcgcaaatcactatatttataacataacacatggtcattacatcttttgactgtcgtctatccctaggtggaacattattattttcctcgatcttataaacctacatccacgtattatatctatatttactgctaaaaatatgagcataaatgtaacttcctaacaattagacacgctacgatttttgataatcataacctaatcccgttaaaccgagattattagaaatatgagcagaatttaagctttaaatcatttagggaataaaaatttaacttgtaactatttaaagtttacaaaccattctaaaatattctacatgtttcaggatccaataaaaaattttacaaaatattacaagtcatttttcaacatgtcgacctaagcaacaaaatcgagaatacatcaactggtagacccaattcgtgtggtctagtgtggtccgaacatgtccaattcatcgccaaaccctcgaactcatatatagtcacaaactgatttactctaattccgctaaattgatttaccattttttgaaatattctatattatgtcttacttttgcatgaaatattttgtgagacattatattttatatattaatgtctttcataggacattacatgtgtgggatgtgaagtagaactaaattgtaatttatttatggaaaattcatggttgttatcattatcaaaattaagtttacttttatgtataaaatacttaatattcactacattagttttatttattttatgagtcttgtttttattttctaaacaacatgaaaatccacatacataaatgatatgggactataggaaacacacaacccatattttgtgaagagcttgaaagaccattttatgtctactgcagggcttacattgtggaacataaaatccttgatattgactacattacttttatttatttgataagcctaaacacctcgaaagtctttgtttattattttgaatactttttaaataaaatcaaaaacaatttcaaagttatagtgatattgaaacaataacatgccctcctcttacaagaaaaactgaaatctcaagccaaaatgattgagaagtaaccaagtgagagtcaaaagctcaccacccttgccaagttgtgcatgtacaatgggtttacaaattatgttagtgtcttaaacaaaacacatgtaagacttatattctaaatcaattaatatggacaaaaacataattcatcaattactttgcatcttctttcaacaaattcaaaaactaattctggttacaaatttaagacacaaaatgagagtctgtacttacataatcatactaaaattacaattttcttaacattagatacttttccatacttataaacttaaaactttgaatacttatgcccacaaataccgtattattgtttaaagttatatgttacatttattttaaattattcaattttgtttcaattagaaggagatgacgagtcacaaacgagcattccaattagtatctactgctgaatctagtgcttcttgtaaaggtaatgatgaagcaattggtgaaaaaagagttactgatttatcaggtcaaaaagatttcataaaagatttaaaaggttctcgtaattcatatcgcgattggccgactgtggcccgaattattcgggctcttctcgggcttctggcccggcccggtatatattatttcgagtcgggcacggcccgcccggtttcaaatattaaaaaaaacctaaatccctaaaaaatttcccaaattctaaacctaaatctcaatttcgacttctctctctccgacgacccagtgtgaacttgatccatatcctctaagaatcgcaggacctccagtcttcactgccgctgcactaacagctctaccgactgtaatgggtcttctttagaatgggattggaataggtggagtcgccatttttctgagactgaacaagctgagagctttgctgtcctcaaggtactctctaattcatttgccctcttcttccttcactttttccttacgaaaagaaatggttatgcttagaaacagcatctgggtctttctttctactattgtcttgaagcccaggtc

SEQ ID NO: 70085 - DNA, 1213 bp, Cannabis sativa
ttgtctttcgttttgtgctttcttgaaaagccagtaatcaaaaaaaaaaaaaaaaaaaaactatgatattgttatgatgaaaaacttcaacgaatccttagatgactaaacgacacgatgtaaaactgttttcattttccacatcaattttcatcttcagaatacataaagagttaaatatagttatatgcccattacttaaatatagtaaaagaaatcttcctatcacccaaaaccgtcaaaaatttgaacttctgtctctttaaaatctgaaataaaatatgtgaatgataaaatttgaatcctaaacttttttcaagaagaaaaatagataagtttatcattacacacttatatatgggctctaaaaatataaaaatttagtggagatttttgattgactaaaactgaaataaaaatctagtggagaaagtggtttttattcatataatgatctatcgtcaatgttttctttcttgcaattctttatgcttttaacgtttactattaggtttgacaaattggtatttttcttatatgtatttatatataggggaattctaaggtacgctgtgctctttcttccttatgctatagggaagtctaattgaccaatcataatttaaacaaaaaaaaatacatataaattttatcattgttagtgtagctgattgttatgcaatggagagagtagaaccacatacatatagacgtctgggtgggaggtgatatccaaactaggccaaaaatgggccgtgtaattcacgggcacgtgaaggtcctattttgagcttgtgaaatcccacgttgcagctggatgagtttgtgggctgctatttttgagcatttgttggttacaaaaagaaaaatacattacattaattttataaaaatattaataattgtttacggtaagaattaatcagctcaactttagttaaaaaatcaaaaacaacattaaccgctcaaaccgcctgcaccacaccgtattgcaaaaaaaatatggtttgaaattctttgcggtgcggttgcggtttgaatttttcctaaaccgcgcagtgtggtgcggtttgcggttttgaattatactaatttttatatttatttaggtctaatatataaatgtccaacccaaaccccactaattattgtattatagaaacctatttttttttcatttttttttcaagccttatagtatttttgacaagtg

SEQ ID NO: 70086 - DNA, 1585 bp, Cannabis sativa
ttgtttattactttatttttatgacaggttttgaatgatactatcagtacaatgaagcaggagattaaaacattagatggaaaattaaatagcttaagcagtttcttgcacaattattcaaagtgcaaagaagaaccaagttatgccaattctcttgcatcagttcaagatcatctgaagaggaagcaatgttgcaggcttatacgtcatggattacaggtctttctgttgttttctgttttttctaatttatatattttttctaatttacctgacagaaatctcatctgtaattcttcagttgtggaaagttgatggttttgagagtcagaatggtcattacaatgttcttctcaactatcagggctacctcagccaaaggtgtgtttcttctaattcattcagttttttctttgaaaaaatctaatttatatggtcacatattttcatctctactatcatatatattcatatgtgcaattgggcaattaaagtgctatatttggattctattacttttatatttcatattagtgattttattgttataagatacaggtttacactaaattctggaccagtatcgagaatagttgtctgtaatcaactgaatgacatcaatgttatgaaggtaatgaagtttagtatgtgtctgctttattaattgtctccctgtaaagatgttttttctgattaatttattatctttgattttaataatcccccagcaattcccaaacatggatgctcacattgcatttgcattcgtgttaaatgttgaggctgtcaaaagagttgttgactcaaaatgtatagttcaagaaactcaagtaagttattgcatttcttttatttgttgctcaagttttcagagcgaacaaattactgcattatatacaacatacttttttggattttcctctgatcatggtgtattgtgcagggaacacattctcttctatgtaatttgctaggtgttattgaggaggtacagatggctcagatagagcttacgaatttgattcagactaacttcttctctccatctggtaaaatatattttcataacattccctctcctccctatccttcccctgtttttggacttgggatctagagagatagtattgcattttgttgcctgtctagtaacacaagggaaaagtcaaaaggggaaaactagtcacaatcacattcagcctttgatatcgaggaaccaaatggacatgtgaaaatgattgcatttggaccctgatactctggccgaaatgatttataaacttcctcccttttccatttttgtcacattgaagatggatgagtgttctgtgctctaattatctactttcctttgtcatgttttaattctaatctagtaatttccattatttggatgctttttaatcatatttgtaatttgtctgaaaggatttaaatctgtctctagctcatggtgctgcaagaggttccaaatgtttatttattatcccaattcatgagggaataaataaaaagtcaacttcagtcttggatccgtcaaccgggaaaactaataagtctggcttgctgagtttgtagataagag

SEQ ID NO: 70087 - DNA, 2652 bp, Cannabis sativa
tatttataattgataaattcatatattatcattattattattaataaattataaagttttgtaatatgtcatgtcgtgtttttcgagtttgctgcgtgtcgtgcttttcgggctagtctattcatgtttacgtgttgtgtcatttgtacttctaatgtcatatcctatttaaaaacatatttttcgtgtcgtgcataccaatttatagcatcacgttgtgctcaaacccgtattttttatgtctaatcatgcttttatctttcgggctcatgccaatttcgactcatatcaaaaatttcggtcagcatttacaagactagtttaattggattgattatttagttaatctcaattgtattattacgagaataacatctaaatatatacatacgaatgtttcaagtaattctcaaccactcattacttgtattttgtgcctaggacagtcgatgactagtactaggggtcaccaagacaccacttatttttagtcaaaactgttgtatgagggttaaaagcggctcacttggacttttcgccctaaaagtaaacattattgttagcattatttttattaaacaatgcccccaaaacacaaccttggacactaaatctcctaatttgaccaagtcttttatctctcctctctctctctcttctgtacataataataaataataaaacaaataagacaccacttttgaacctttcacgtgtttagtatgtatttattcagaaaatacataacatataacggctacaagctgacttgttgattcaaagaaagggagaaaaatatggatgtgtttatttcagaggagtttttttctggcgatgctttgtggtatagtgaggccaatattactactactccgatgattccaagcgcttttgaagtgtatagagaagaacccaaaaagggtagttttatgcaaacaagttggattaatagtgataataagatgaacctcaacaaaagaatgattgatttgttgaggagaagaagaagtagtagtagtagtaagtataatattagccatgttgatcatgaacatgagaaagaaaggtgttataggcacatgatcaatgaacgaataagaagagaaaaacaaaaacagagctatttcactctgcattctatgctccctgtgggaactaaggtataccgaaatttaatatatcacaataatttatattaatttactgtcaagaaattctaaatgattttacacaattattgaaattatttattggtgtggatgtgcagaatgataagaattcaattgttcagattgccacaatgaaaattcaggaactggagacgtacaaggaggagttgaagagggaacagatgaagctggaagaggctttaatggagagaaatattaatattaataataagaataagaataataagattaaagtaagagtagctaaacccattaattctggggttgatcttatggtggaggttcttaattgcttgaaaaggttgggattaagagctattaatattcgttctcatttctcttccgatgaattctatgctgaacttgatatacaaactgaggtacgtacttatattacttctctacctctctaactctaattctcttttcttttctacatttctatattgttattttctcatatttttgtttagaaaattacactaaacttttttatgtgtaaaaattatatatgcattgtgaatcctttcactaatattctacttaagattctaagaaaataaagtcacttaagcagccactaattggagcttttattgtattatatagtaatacttaatttggcttaaaataaatagaggaaaataaatgctcttttttaatattgctcgcgctcccatttataaattaataaatgtggaccgcggagagtcaaaaactcaaaaatatgtgattttaagttcaatattttatttctaaaaaaataataatattttattcaaattactttgtatcatttggtacaaagtttcattccaccatacctaaaaactagtgcatatttgatatcataattaaaaaaactttttttaaacaaaaatagaaaattattttaagcatgtttggccatattttttaaaaataatttttagaaaaaaaaaaaaacaaaaaacaaaattttgacaataacaaaatgttattttctattttaaaaaatatttcatttttggtcaatatttttttctctattttatctcacattaatatactcattatttttttcattttattttctctttcattattttctcactcattattttttcacattattttctttctcgttattttctctcgcatcgttttttgacattattttctcacactttttctctcatgactttctctcattattttttcacattattttcacacattattttctctctcctcattttttctctcatcattttctctctcctcattttctctctcattattttctctctcattattttttctcttatcattttctctctcctcattttcggtctgagttcattccggggtctgagatctgggtctaggtctggggacgggattcagggtccaaggttggggacaagattttggggtttggggctaggcccgggtctacgttcgattctggggtcgggattga

SEQ ID NO: 70088 - DNA, 1864 bp, Cannabis sativa
atacatatgttttttttagtttttttagtgtacttagaaattattagtggtctcgctatcagagtataatctatataaactttcaaataacatcaagtcatcatagctaaggtttcttaatggcaattttaattgaaagtttatttggaactttttggttggtaaaaatactaaaacttatgggatttattgggatttacatatgtatgttgtgcttcatatatgatacgtaaacgtcaaaataataattataataataataataagcaaatgtatacttactcttttcctttcaatcttactaataatatgcttaagaatgagagtatgcagcataggagagctcctaaacacgcacgctaatccagaaacgttatcttttttcatatcaacatgcaactccaatgtccttaagtcctcaaacggattaagcctttctcccaaatatatatggtcagacagaatctgcaatgaattaagttatataccaaatcaataacaatatcaattaaaattaaaatttactacacatacgtacctgaagacaattgctttcaccaccaaattttaagcaacggacataagcgagaccagcaaagaaatctgaaaaactcttcattttggccacactcacattttcatcatcaccaaaaccaattaaagttccaattgaaacctcctcaagattcctcaaattaacaagagaagaagaatcagttacagcattctcttcccaaacaaggcttcttagttttggcgcgtcaatcttcacccaactcgcaatttcatcatcatcatcatcacggtagaactcttcgaaacaagtccggactctcaatgtgacgagtttaggacaacaaatctccaaactccgtaagcaatcgcagaatttgagttcgaattcttctagcgctcgacacccaatcctcagatgtttcagtcccaaacaacgatggatgctgagtttggtcaacagagggaaagatgaatgagagaagagatccaacaacatccgatgatcattatcaatcaaaacgacattacttaaagaaaacgacaccaaagatggaaacccggttttcatgacggacaaatcaggaggcaacctaaaagccgccctgcgtgatttcaacgagagaacgcggagagattcgcattgaataacgcttctgggaaacattatgttctcatcggtgatcacatcgagctctaattgctgtacgttgtgcctaaccgcgcggcggatcaagtcattgaggcgtgataatgaaattgagtttgttgtacgcactcgaagggtgcgaatatcggcggagtttgatgaagtattattagtggccgtagtgattttatcacggagattaaagacctgtgagatggggtcggtgaggccatcgtagtaagcttggcgagagtatattgagctctgtgtaaaatgttgtgaaggagaaaagtgatgggaattagtgaaatcgaaatcaaggtctgggaaggtgtaccatagagatctccatctcttggataaaaggcttgtttgggctaccgttttggttgataggagagtgagaatgtggtggattagagcgtctgggagttcgctgattcgatcgatctcgtttgatccattcttgtcgttcccgtaaatgtatctccaatttcctctctttgctgatgatcttgtttccattaatgactaattaaaaagcaaactataattaattgtttgaatttatttattgtactttgcgtctgtgactgactgtaagtaggagttttattatgtgagttgggatctaactataacttcttgatttctgaaactttcaacttgtgaacgacatcaccgcttcatttttaactttta

SEQ ID NO: 70089 - DNA, 1513 bp, Cannabis sativa
aatttaattcaagatattaatgtaatttgaatttgaatagaattagtatctatcttcttgattttacaaagatctatggaacaaaattggagatgaggtctctaatgcagttacatgtttctttgaaaatggcaggcctcctccacacttgaatgaaacactcatttccttaattcctaaggtggcaaacccttccacggaaaaggattactggaccattgcttgttgcaatacagtgtacaaatgcatctctaaattgttatgttcgagacttttagaagtgctccccaacattgttcagaacaaccaaggtgcgttcataaaaaatagtcttctagcccataatatcatgatcttccaagaccttctcaacgggtactccaggaagaatatttcagctagatgcattatgaaaattgatttgagcaaggcttatgacacggttgattggcagtttgtggaagacctgctcaagtctctttgctttcctgcccgattcattaaatggatcatgacttgcctgagaggaaccaattataatctgctaatcaatggtaggattcaagggaattttagatggaaaaaagggctctgtcaaggtgatcctatgtccccgcttctttttgttttgatcatggaatatctaactaggcttttcagttcctatgctgcgaaaaaagggtttggattccatcctctttacaaagagttacgcttaactaacttgtgttttgtagataatcttgtcattttctataaaggcaacgttaactcggtaaaacttgttaatgatgccttcctattattctgcaaatcaacaggtttatttgctaacacttcaaaatcctaattattttttttttttttgaggagttaatgatgagattaaagtgaagatccttgatctggttcaaattgaagaaggaaattttcctccaaaatacttgggggtcaacttgcgtcctaccaaatggaaagcttcagactgttgggtgattctggacaagattaataagaatcttaattgttgggctagtaggaatctttccttagctggtcgtgctcaactcattcactcggtgcttcttgaaataaggaacttttggatgagtattttcataatttcttcaaaagtttcagcagctattgataagagttgtcgtgacttcctttggggttccaatggtattagaagaaagcttcacatagcttcttgggataaggtctgcctccccaaaaagcttggcggagttgggttctgagaaggaaaaagtggaacaaagcccttatggcaaagttcctttgggccttggcgactaagcaagatagcttattggttaaatggattaactccatttatctgaagaacccatatgtctggaactatcaaaaaaagcctgatgttagctggtacttctctaaacttatgaatctccgcaacaaaataaataaaaccatgctgaatcttgctgtaacaggaggaaaatatagggcaaaaaactgttataactgt

SEQ ID NO: 70090 - DNA, 2716 bp, Cannabis sativa
  modified_base (1407)..(1407): a, c, t, g, unknown or other
  modified_base (2183)..(2187): a, c, t, g, unknown or other
gttgaatgtcaacctgggtgctggctaagtgttctggtccccagatgacctcgtttgcttcccaaaagcacttgtatcttcttgttgatgaaaacagagaaaattcccgaaagacatctcatgaaaagtctttggaagtgccctaggttgacaatatgccaacctgggcactagacactaggcctgggtcaacctgggctgggtgggtcttttggccagcaaatagattcgtttattacccgaaagtacttgtatctccgttttggtcaaagacagaaaaaatttcatggaagcatttttagaatagtcattggaagcgccccaagtttactactaggcatcaggtggtgtgaacttggacgctaggtgcctaggtgctttatacgggaagtgttctaaagctgattatggggcctctagcatgcttttggtaggtctttcatgcgtctaagtgacaaggctgagcagtttgaaaaatgactggaactgaaactaaaaacctagggcacagatgtcaatttgggcactgggtgaaaccctaggcaccaggttggcattgggaatgtcatattgacatcctcagcttccagctccgcgacttaaaatctttttgacttgttgactcagattattgaagaatggggacttagaaacaacttggcgggatttgcatacctagtcaagagttccccatgtcaacctgggcactgggctagggacccatcgcaaggttgactgactaggaatacataactccgtaaatatttttctttttgccacgtgttaaaaatgatgtccatgccagtaaggccaatttattgataaacatgtatatatattaataagaaattccccttctataaatacaatttgcagttttttttaatcgaagaaaaacatcattaatcaacacaaaactttacaatcaaaacagagcctgattaaaacaggctccaacacactcaaagctgactcatatacaatctagccagtctatctctctttgtattctccccctattcacaagtgctaatcgcaccttgatacttcctctaatcatttttctatacaatctatttataaaaaacacttttgttcaaaaatacagagattcttattcagccaaagactatatactactccagctaaagccgcaaacttaactctgttgtatgtttcttgtacaaaataataataaaaggtcatattattttgtttttttttactaggggtttgtataaatcgatccaatctaatgataactgaccgatctaattataatcgaccgtcaaacattggatatccaattgtgatcgaatcgaattggatgttatttttgaatatccaattggatcggattgatgttggatggggtgtccaaaaatctaatacatccaacatccaatngaactaattagtattttcatttagcttagatgagtaattatattttatatttctatatgtaaaatatatatctatatgtatatagaaattagcattaaatttttactctttttttcttggattggatggattcaatccaatccaatacatactggacctaaaatattagatggatccaattcaatccaaaaaaatactaggtctaaaatattaaataaacccaaattaaaccaataaatatatatgaaatacatccaacaaatagaaccgatctaatccaacatccaatagatgttgattgattggatggctgaaattaattggaccggatgataaaatctaatatccaatatataattggatcaaatctggataggtctaaaaatattagatgtggtccaattaacacccctacttttgaccacttacaaaaaaaaaaagttgataattaaaaacgttatgtgattttatttaaacttatactggtacttaaaaaaagcctaaacatatctatatatgtataggatttatttttgaggttcattaattaagaagagatgaaatcttttttaaaaaaaaaaagtccacgcatgagatatcttcctcttttttccttttctacttatataatatatttttagtattaaaaattatttttatttatatttattttttaaccttttaagaaaggggctttttcatttttacacttcaaaataattttttttttgtatttttatgaaattctacatgaaacccctattgcaactagcgcnnnnnccactttagaaacccaaaccgtaagtttagaaagaaaaaaagtttaaaaatagtatatggggtaattcccctttaagaaatacttttggcttaatcagtaattatttggtatcaagagttgtacaattatgatctacactttgaagtaatcaatttaatatgtgagaagcatttgtttttagccatcacagaagaatgataagaagtaaaagtatcattttaatttcttttatatttagtaaagcaagtaagtaatttttgaacttaaacaaaatttattatatcaatcaactttataggtttgcttttcaaagaaaaaaaaaaccttataagtcattaaaaagtattttcttagagaaatgctagtaaatagccttatttctaactttagtgataattaatgttccttttttaaaataattaaataaaggtccttttttactttttaatacctaaaatacccttcattatataaaagatattataaaaataccttagagtaatatgaatataacatacaaatactata

SEQ ID NO: 70091 - DNA, 1529 bp, Cannabis sativa
  modified_base (42)..(43): a, c, t, g, unknown or other
  modified_base (75)..(78): a, c, t, g, unknown or other
atccgatccgatcacaattggatatccaatgtttggtggtcnnttgtaattggatcggtcggttctcattggatnnnntcgatttatgcacacccctagtagtgggagtggactagtggaggtagaagacgaaggagaaaaaagaaaaagaaaaacaattatataaatattttttaatttttacttatttttcattaatattattatttggaccaataataactcaacacgtgacaattataaataacttaatggatccgtcgaatttaagactaacagatttacaaaaaacgtgaccttgaggactattaccactattttttgagattggagattaatctacatcataatgaactttttaaaaaattttgccgcaaatttccctaaataataattttgtttgatgattatttataattattaaataaaaaatgaatatttaaattaaaagattagaataaaaatggcaaaaatcaaagccataagatccaatagggaatttgattatgattttggacttactatctttttactagcccatttaatctaatcttagtccaatagcttatgtgtgtgctaaaaatactaaaaccctaatcaagaaaagctttatctctattgaatttgaattccctctactctctcattagaaatcaattttatagtgtattgagtatcagcccactctattcaatgtggtattcagatctctgtaaaagattgtgcagaagccgactttgcaaattcatgaaagggattcaagttcattacttggcaatatctgctaccgaaaagaaatatgaagttagagtaattgaacggaagaggacatttaattttgttacaactaatataaagatttctaatcttctacatgttatttgatcgttttgtaatttttatattttatgatgttagattattatacgataataaattaagatcttgttataataagttcgaacagttacaattatgtcttgtcacaaattcaaaagtgttataattgttataatatgaagcatcatcagttttaatttgctgtaatagttcactttgctctatttgtattttaatttggtcatatatttatagttcacctctttactcttaacttctcagaaagaaaatctctctcatctcaataacccataaaaactcatgaaaaagaataacaataataaattagccaaaaatgggacttagtttagggaggatggacgagctaccaaagttagacattaagaaatctcatagagtcgccaaattaaacatttaatacatcttccctaacttttttacattttgtttttttattaaaaaaatatatattaattacttaattgttgccctagaacaaggccgactcaagcaatttgagaccttgagcgaaaaattaaaaaaaaaattataaattttaaaatagacaagaattttagaatatgtgtattgggatcaaaagattttattaatttttttttgtaagggtatatttattcttatgaacatttattatgtatactaaaaaa

SEQ ID NO: 70092 - DNA, 2525 bp, Cannabis sativa
ttcttatgaaacttgatgcatctttatcccaaattttaatataatattatagctgcttgtgatctgtaatgagctcaaagtaccatcgattcaaaaatacgagctaaactaaaaaatacatgttagttatacccacaaatttttcgacatgtacattcacaaatttcttaggattcttttaaatgtcatgcttgactatgtgatatcttaaaagtcattcgttatactcacatttttcaggttcaaacgtgatgagagtgtattagagttagtctcacattgctaatgtgtgaaaataagatagcatatatgagttgaatgaactatactcctctcattgtctattagttttgagatgagacctcatgcaccttaatcacactttagtcccaaatcctaacaaaaactaattatcaatggaaaaaacataacaaattatttgttcttcttcataaatgcgaataattgttgagagtatctaagtagtaagcccttcctaagataagtaaacaaggtttcaaaaagtaataataataaagcataggataggtgtgaagactcaatggaagttgtttatggaagttgttctgacaaattactcttgatttctttgatgtatgagtgacttgtgagatttatattataccaaatagctactaaatcagaatcatgttatagtaattagacaaatgcacactaattaaatttatcaaaaaaaaattagagcattgttgttgggtacttgtaatacttaacattttctataaatgtcaccttacgattggttagcgatattctctaaaacttattttcttaagttaaatgggacccgctacttaattacactaatagcaatatgataccaagaaagatgttgggcaccagtagtgtcttttagtaattctcacaaaattaagggtattcgtagttccaaatcacaaccaatccagacaaaacaatttgagaccgagcccaatgaatcaagtgtgaatgatttggtcaattcggactgtttgaaattctctagtttagtcacggctttagaaatctcagtagcagttcaaactaaaccaatccgtataattattttatatacttaatatgataggttcaataaacacaattttggacacaatttttaaatccaaattttagacttttagatgaaacttaatccaaccatccatattaaaacacatataagtactaaattaaataaataaaaaaaacattctatttatttatttacattccatttaattctaaatcctatcattaaattaaataagactcattaaattatttttctctctccttgaactctttgtccatggacactatcgcgccgacccgatagtgcgtctaaaaatactaccagaggttagcagatatgtttccattgacttgtcggtatgtcgcttatacgggacgtggcctaaacttctaagagacattgtggtgcgccttggtcacgagtcttaacacgagataacacgaatagtcattcgtggactagtttgcatacgcgcatggacggatgcatcatgctgaaaagagagagaggtctaacatatgctactagtttggtagcttgtctcgagggctgtcaatatgcgtggaggcatggtgccttgaggattggaccatggacgtatggaagtctttgggcgatgaggaagaatgttcggaccgtatcgaatagggcattatcagaagcattggcacgtcagtttggtgttggcatcttgccacacatgttaccttggttacgagtgactaggtgagcgacgatgttggaatttgccttaacatactgggaacctatagacagtgtgagtatcttgactagagagtctcgatgcatgggtgcacttatggatgtttgcgagcatgactcgacgggagttgttcgagagacaaaagtgtgcacgaggcacacggtcgcgcgaaaaataagcttattattactcagatagttggcaggttaaccttggtttaaaaaagtcaaaatgctgcacgggtgttccgctgccaaaaaagacgagcccgtgacactaaacaatgcaataccactcccaattgcatcctgtaataataattttaatttaaaaaatttatattagaattaatttttatctataagtttaactttaactgtaactatattaataattgttggagaatcatgtgaattctctgatttctttctatcgaactaaaggagagagataagtaatgagtagtgatgtgtattgtgtacttaaatatttaatcctacgggtctagaattaaaaaggaaagtaaataaaaaatattttttttttcttaatttagtacttatatgagttttaacatagatggttggattaaaatttatctaaagatttaaaatttgtgttaaaaatttgtgtcaaaagttgtgttaatagaactcatccttgatataattttttttttgacaaaatattgatatttggaaagggaaatttgattttctatacttacatctacctaatattttattt

SEQ ID NO: 70093 - DNA, 1365 bp, Cannabis sativa
tttcattatagtgtagccaccaaaataggcttccacattctaaatttcagtaaactattcatactttctcaatcattatacatttttatgtcaaagattactagaaataagaccacagtgcatgaattcatctctctatattcataattcagtggaaacatagatgttttttgtattgctgaaatcatggttatgtttttagaattattgttgagatgatgatttaatgtcccattccaaatagggattaaaaaaaagtagtgtaatttcttttagccagctatatgatggaaaaatcatataatgagcaggcattcttgcctcagagtatcctgattttaatgtgtataaaccagtactgaaaatattttattagaatgtgtaaaatttatttagatgtgatgtaagtatacacgagcactgatggataggtctacgattttttcttcgctgtatatgtattatagatcactcaccatgcataatgttacattttttttcctgtgaaaagtcatcgttctgaaagtatttctgcagaatgttcatcactcagggcaacctatgcccggtgaagagcaagaggacattgtgatgactggtacacagagcgttcttcgtaatatcacttgtccaataagtggaaagcgtgttactgaattagcagatccagttcgaaggtactataggaattacatgcaccatttttcatacttgttgttctatgatgttttcttttattcttgttagttaactaattgatcatacttgtatttttccttggaactacctagatttcttaaggtattgcctaaaatagttctttttcgcctataatatcatcatatgagaaatagttgctctaaaaatggctgttattacaacaaatcagtttgatcattacaatattctgtgatttgacaaacaatgcaccgggaaagcatggaagacacttagtcgaaaataacaaataaaatacgagtgaagttagtgttattatgatgtctgttatgatccagctttctttcttgaaacaatggctgcaaaatatttaataccgataaggtgcagagaatgaatatagctttaattcttgagacagtaaactttcgtcatcttcattttcgtttttcttttataagtattcatttcttgacatgctgcagtatggaatgcaagcatgtttatgagaaatctgcagtcatggattacataaagagaaaaagacaagccgcccagtgccccgttgcaggtacttatttattttcagtttttcaatgaaagttataatctcgtacccgaactgatcttcttttggcataattttttttgtcagcttgtcctaagatattgaatccaaagaaggtg

SEQ ID NO: 70094 - DNA, 1922 bp, Cannabis sativa
agtggctgttatcttttctgttgggattctgttttggtttgttagcttatttttgtcttctttgatgtatataaagaactgttgtacaagctcaatacaatgaatgagattcattccttctttcactctgtttgctctgtctttcttctctttcttcttcttctttcatttactttctttgatctctgttactctacaactatggtgagaaaggcttcaaacacttacatagtatcagagccattcccaccattggtggcgaatatggctaatgttggaaccaacaattccagctccaacaccactggtcctccaccaggtttctcgaatgcaactcgatctaaatccagggaagatgaatcctcaccggtgtacttcaatcattcgatttcgatcagattgaatgatcacaatttccttttatggaaacaacatatccttgtggctatcagaggcaacagattgatgagatacattcaagatcaggctcctcctccgcagttcttgagtgaagctgatagatcagctcgaaattacaatcctgagttcgtggaatgggaggttcaagatcagctgttggtgtcttggctcctatcctccatgactgaaagcttgttgactcggatggtggggtgtaatacagccaggtagatctggagtgccttggaaaagcacttcactcttcaagtttcatccaagatcttggagttcagaacaaaattacagaatctgaagaaaggatcactatctttgaacgattacatgctgaaggtgaagcaacatgttgatctcttggcatctgttggtgaagtcatgtctgcgcgcgatcacatagcttctatcttcaaaggattgccaagtgaatgatacattcataatctcttcgaatactcgaattgaagggtactcagttgctgaaatagaagctctcctgcttgcctctgaatccaaaattgagaagacagacaaagagtttgatctgaatgcaaatcttgctgcaacaaatgttggatcagatctggacaatcaatggtcatatgaagccttgctagctcactacaatcgtaatttcaggggctctaatgcccctcgaggtcagtttcccttcaatactcctcaatatccttctttttatccaccaggattttattacaataggtgctaattctggttttaactctcgaggtggatcaagcaatgttaatcatgggagaggaaactactccaatcattttggaggaaggcctcaaactactcaaatcaaaccacaatgtcagatctgtcataagacaggacacttggctttggaatatttttacaggttcaataaaagctatactggtgtgcttcctactccagatagcaacaaatctatgcaggctcatgctgctcaggcttctatgccaactccaagtacagatccaaaatggtaccctgattcaggagctaccaatcactgtactccagatgttaccaacctggtgcaaaatgcagattacactggtcaagaaagattgtatgtcgacaatggttcaggtctgacaattcaacatactggtaatgcattttttaaatctcagaattctaccaagactttggttcttaaaaagcttttgcatatactaatcactaagaatttgctaagtgtttccaagtttgctcaagataacaatgttttctttgaatttcatccttttgtttgttatgttaaggctctgaggaccaaagccataatcttgactgggacactccacaatggcctatatatattcttacaactattaaaaaaaatcacatctcttactaatttttgaccattcaaaatttaattattgatgagataaagtcattataaattaaaaaaataaagtatttatgctgaaaatatatgtataaaacttattaagggtgcgtttggaaag

SEQ ID NO: 70095 - DNA, 1954 bp, Cannabis sativa
catccactattcacgatcgacagcgtagcctagctgttgtcaacggtggcacacctctaaagagctcaataatattaactcgtggcttaaaacttactaacgacccaactatataaaagtctcatcgcatttaattattaaatacactttctttagcttaatcttcttttaatttaatttttgaaaaactcggtaaacatttatgatctgaaaagtgtcaatgacaatatcgtctcataagaaatagttgttaaatagagtgaacaaataaatgattaatgatatttaatagtaattggttgttcaacacttagaacactatgtctaagtcatgattgcaaaaatacttacgatttgttgacttaaagcatttggtgtgaagtcaaaaaaagtcctttgtttttcaaaaaactaaaaatgtgcaaaatgaatcgaataaacctcctatttataagaatgggtgattacatatttacaattaaaataataataaataaatcaaataaaaagtatattctagcagtattccttctaggcaaattcggacacttgaaactaaatgtagtattttagtcttaattgtagatctttgagacttgatctcgtctattgatcttgtctcctaataatggttaagattcactcatctcagttggaattatgatggatgattttgagatcaaatgaggtccattgatcgagatttgaagctctaatatccaaattagtaccctcccattgcaacctgaatttcgattagaagaaattcgaattcgaatttcatcgtgaaacatcaatagaaagagaattgaaagcacttttcaatgcaaccaaaatagtgtcaatcagaagtttttatagtgatatatgcccaaaacacagcaaggtgtacaattgcctcctgagcaatctagagcaatcgataaggtaagtggttttgctcacctggacgaggggtcatccaaaatactagttttggcatactttagatggccaatgtgatattggtgcatcactaatttaaatacatgtgttgtgtatcatcttttagagaataaggctattgaacacccgattggtgatggatgccagcacaacctagacaccaggtgatggatgttgcattctgaggttgattcaatgccagacctctccaattctcataagataatgaattggctaattttggtgacaattctaaggatcaaccgaagatgttcacctgttctagtggagaaacgctctgcatgcaccaagtgatgcactgggatcacttagggcctgatgttgattcacttgccatagcttctctaggttgtcattgatgctagtgaaacaatcgatgcacgggaccacatgctccaagtgactgctcacctgggcacccattgggcactaggtgggtacaatagcttcaggcggtattttgagtatccgcaatcccatcttaagttagaattggattttatcattgccttgcacatatgtgtcgagaaataaagcgtatgagcccaggtgttcactaggtgtctacctaggtgttggttgctcaaggcatgagctacctgggagctggatgaatacacttgatatcccaatcgatgttgaaacacttttatttactctggtttgaaggaaattgagtgaaacactgcgaaaccctagcctaggggtgttcattcaatttaattcgtattattttgctcacagtgtatctgatctgtattaagtgcgaatttcatattttagatccaatctaatccacacaatagctcaaatccaacccaatccaatctgcaaaagtgtggatcgaatcagtaattttaaatttgttactttttaatattaaattatttaatatttattaaaaaaaaaatcacataacaccaaattaaaataatttattgttgttttgtgtccaacaacaaattaaagtaaataaaataacaaataa

SEQ ID NO: 70096 - DNA, 1030 bp, Cannabis sativa
gtttgttttcaaaactagtacttggttaagttcttgtggaaactttgtacatctattgcatctaagctcaatttacaacccttttttttgggcttggtatatggattagttattgcttatactgatattgttcccaatttgatgataaattatggttgcaatggaatatctaggatggatagaaagaaactgagtacccaaatatcagttacttaaatgaaattacttatctgtgtttaacatcaacagttgaatgttcgcaagtgcaatgagtgtggacaggctctcccagaaagctttgaaccacctgctgatgaaccatggacaactgggatctttggttgttgcgaagatagagatagttgtaagtggatgtctaactttgttgtacatactcagtttgttggttagatggagatgtagtgatccaacctaacagttatggtttacccttttcaggtttgacaggactattttgcccatgtgttctgtttggtcgcaatgtcgaaagcttaagagatgatacgccttggaccaccccttgcatttgtcatgctgtttgtgttgaaggcgggatggcactggcagtagctactgcaatcttacacggtgctgacccgaggtctgcatttctcatttgcgagggtctattctttgcttggtggatgtgtggcatatatacaggtcttgttcgtcaatcattacagaagaactaccatcttaaggtaggtaactactaacttgagctttttcctttgcactgcaattaagcaaatagccagatgatcatgttcttcttctgtacacttcctctaaatctctctattcaaataatttgatggtttcttctcctagttctatgatgccaaagccagatgaatgtttgactacttaatagacaagttatgccaaaagaacaatctgaaggaaatttaattgtcttatcatttgttttgcgagcgcagaattcgccatgtgacccttgcatggtgcactgctgcttgcactggtgtgccttgtgtcaggagca

SEQ ID NO: 70097 - DNA, 1590 bp, Cannabis sativa
catggttgtccatgaagaaagacagcataatctcaaatctcctcaggtcccctcccttattgctcctgctcaaaatccaactcttgcacaaactccttctgcatcagctgctaatgcgaattaaggatgcaataagaggatgaggccttactgcaccaattgtcacaaacctgaccaccttaaagagaaatgcttctttctcattggatttccaccaggggatggagacaaaaggaaagaaacacaagcatctgccaatcaggcatctgcctcagaagcttcagccaacagcttccaactcagaagcttcactaccttttgcttcaaatatttttgttaatatcacacaatactcaaactctttatagattgttgatagtagtgctactcaccacatttgctgtgacagctcattattttcttaattacatgatgttcccattgccacatccataaaattactaaatggcttgaatattaggattcataaatcaggcaacataataaaattttttaatcaactttatttacacatgttctttatgcctctgattttcactttaatttgcttagtgttcctactttcttccaaacatcaactaacatcgtattctttaccaattcttgctacattctctagggcttacaaaacaaaaggattgagattgataaatgcattggtcatctctactttctggtgcatgattcccctactgtccaaaataatactgtttgtagcatttcttgtaacagtgcaaattcatggcatgctagacttggacatacatttatgtacactacaagttttatcaataaaatgttacattttaaggattctactgtttcttctccttgttctatatgccatttagcaaaacaaaagaaattgccctttaattccaataacaattttactgtttctacatttgatctcatccacgtggatatttggggtcctttccacattcaaagtgttgaaggatttcgatattttctcaccattgtggatgaccacaatagattttgctgggtctacatgttaaaaacaaaaattgaggtgcaacaatatatccctcaattttatacctttgtacacacacaatatgctataaacattaaagcaattcgatgtgataatgcaaaagaactaaacatgacatctttttatactcaaaagggtatccaaatcaataactcttgtgttgaaacacctcaacagtacaaaattcagtagttgagcgcaaacaccaacatatcttaaatgttgcttgggcattttctttccaatcctctcttcccttagtatattagcctcacctcattaacattgttgtttatctcataaataggacccctacccccttattacaccacaaaactgcctttgaactcttgcacaacaagtaacccgcctataatcacctaagaacatttgactgtctagcatatgctttctctctaactagcaagagacataaatttttcccccatgcttatgcctgtatattcattggttatgccaatggtatgaaagcatacacactccttaagcttgacaacaatgctatcttccattctagggatgttata

SEQ ID NO: 70098 - DNA, 4372 bp, Cannabis sativa
ctctctctctctctctccatggagcagaggaagaaggatgttcagaagctagatattaagataatcggtcatgtttcttctaagcaagagctccctccaatccagagcactgagctaatccaagtggagattttccatgatacccaatcggagttaatggctgatttgggtcttgcaaatgaaatggatgaagggttcaggcattagatcctgggctgatgaggcggcgacgatggaccaaataacatgcatctgtgaaccgcactagcaactattaattaaaaattcattatctataatatgttgctgactgtttattcatggcaacatgatcttaattctccgtacaactacaaatcacaacctcatgtatgaataagaaatttttcgatatttatatttaaattattcaacattaaaaattgttagaattttagctatattagttgtaaaaattagggtaacttgtatttagcagtttcctatttgtgttaatatacaattttattcaccctttaccacatggtattagagccatacttagaattgtgattcaaaattcaaaatttgaaattggagttcattagaaaaaagagagattagggtttgagtttagggtttttttttggaaatcctatttggagtgctagtttattctcaccgcccactcaggaggattgcccagctcccgatctgccaaatcctaaagtccggtcaccagactactcgtgcttggggctcacgcgttgcctgaagtttctgcgcatatctccacgcactggcatgtggaagcgcgtgtgatggtgtctttgacgacgttctttttctagttctttactcgattcttctaagcccacttacatctgtctcaggttaaaatttggtattttttgctttcttcgtgtttggctgttcattctttggtattcttttttgtccttttctctttcaattatttttgctttcgagattatgccagagataaaatcagattcaaaatcagttgttatttctgatgtggttcccgtgatgtctaaaatcacagactataaattgattggttcaaattatttgaaatggagtaagacaattcgactgtatctgaggagtatttacaaagatgatcacttgactgacaatcctcctaaagaaaaagacaattcatggaaaatatggctctgtgaggatgctcgcttgttcgttcaaattcaaacccctatcaatcatgaggtaattagtttgattaatctttgtgaattggttaaagaactagcggattacttagagtttttgtattctggcaaagacaatatatttcgcatatatgatgtttgcaaagccttttatcgtacagagaaataagataagtctcttatgagttactttatgacattttaaaaaacatatgaagagcttaatgtgttattaccattaagtcctgatgttaaagttcaatagcgccaataagagaagatggcaattatgagttttcttgcaggactctcatttgaatttgactctagaaagtcacatattctctttggttttgatgtctcctctttatgagatgtgtttactcgtgttcttcacacaaaaactacctctctagctcctcttaatagggccttggtgagttgtaacaattctgcaccaggaaaaaactcttctccaagtggatacaaaggaagtaattcacaaggaccagataatcgaacaccagattctgagagcatcatgtggaactattataagaaaccaggtcacatcaagtttgagtgtaggaagttatagttcaaaaatcaacaacaacactctactactattactagcactagtgatgcatctgataaatcgatccttatttctactgatgaattttccaagttcttaaggtatcaagaaacacttaagtcttcatctccttctgttattgtcattgccaattcaggtaactctaatgcatgccttctttccaaatcctcaaaatgggtcattgattctggtgccatagatcatatgacaagtaattccagtttcttttcaactttttagtcgcatagccccaattctattattaccttagctgatggatcaccataaactgctcttagatctggcaatgtggatcctacgcctctgcactctttgtcatcagtctgacatttacctaatttgtcctttaatttgctttctatttgtcaactcactcataatctaaattgttgcatctcattctttctcaatcattgtttattttaggatcttatgacgaagaagattattggtaaaggacatgaatctggtggcttgtatgttcttgacccacttcgaccaatctttattgcttgtctgagtgttgcttccacttttgaggctcattaccgtttgggccatccatcccttcctttgatcaagaaactttgtccctaatatagtaagatgtctttattagattgtgagtcatgtcagtttgccatgctgtgcatctcacacgtgacggggaaccatttgaagatcctgagaaatatcacaaattggttggaaagttgaattatctaactgtgacacatccagatattgcattcccagttagtgtcattcattagtttatgtcatctccaacaatttatcattgggcgacactaaagcaaattttatgttacttgaaaggaacaccaggagaggtatagtttacaaggtatatttgtttagatctagatacccccagcctattgataatatcatctcaagtggtccgcattccaagctcatggaatcttcgatccatccagtctttttaattgatatgttctgttacccactttattctggatctcgtagggtccctctagtttgctcataagattcccactcctaagtcttgagaagttgggaatacctttcttaagacgagatctccaacctcaaatattcggctcttaactttggaattaaagtgcctaacgatcttgttttgatacattattagttggacatgagactgttcctggagctcttcgattaactccaaataatcttggagcagagcgtgattctgacttgggtcataggtttctcgtctgtgtgaagggatggtgtttttaaccgagatgatcgcttcgcatccataagccattgagtaaggcgtgtgccctgctgaagttctttttgatgtttggcctgcccagagaactctgggaagctccaaggtagatagacaatctacttcaggatattgtatatttgttgtgggaaatctgatctcttggaagagtaagaaataaaatgttgtgtctagatctagtgttgaatcagaatatagagctatgacacagtctatgagtgaggtaatgtagatttatcagcttttgactgaatttgggtttaagacttctattccagcaaaattaaggtgtgacaatcaagctgcttttcatatttcctcaaatcccatgttccacgagtgaactaagcacattgcgaatgattgtcattttgttcgagagaaaattcaacaaggtttgatctccacatgatatgtgaagactggagaataactaggagatatttttacaaaggttttgaatggggtgcgggttgattatttttgtaacaagtaggacatgattaacatctatgctccagcttgagggggagagtcagaatattagctatattagttgtaaaaattagagtagcttgtatttagtagttttctatttgtatttagtagctttccatttagtctcctagctttgtatataaatatatactattcaatggaataaaatatacaattctattcaccattctttacaaatattaataatttaacattcatgcatatatcaaaatgttcaactcttattaataattagaaatgtatttacatgcctttcagggcataaaccctaacaaatatcatggtgatgtagggcacactaccaatgagtgtgactacttgaaagatgaaattgaaacgtgggttggaagctgcacattaacattccatttgtggaggccttggagcaaatgccaacttacctgaagttcatgaaagaaattttagctaagaaaaggaagttggaagaattcgagatagtggcactcactgaggagtgcagtgcaattttgcagaagaaactaccgcccaagcttaaagatccgggtagtttcaatattccatgttctatagggggttcggtggaaactaaagctctatgtgatttgggagcaaacattaatctaatgcccttgtctatcttcgaaaggctaggattaggaaaagcaaagcccacaacactgaatttaaaactggctgatcgttctttgactcatcctcgtgggataattgaagatgtactggtgaagg

SEQ ID NO: 70099 - DNA, 904 bp, Cannabis sativa
tatatatatatgagtctagtctttgttatgaatttgatacttggaataattctgttttgagtacataacttttatgtgggaatttgagaaatccattatcagactctaatagcttttacttggctatgatgaggatggtttttatggtggcattttgttgggacctccaaacaaatatggacagtaagagtgtagataaatttttgtaaaccgtctaacctgaacaactcgctcaaactaaattgagataacctgatgaaaaatgtaaaccgaaaaatccgaccaaaatataacttgctaaatctttatatggggtgtttaaaaataatattaacctgtccaattaactcgaattaattcgaccaatctgattaaaagagttttttatattgggctcctatgatgactattttattatttagggaaaaacttgattatttaattgtttatttatgtacccgaactaattttttgttaaaaataaaacttaataataactcaatttaaaagtatttatgacaaaactaattgcattttttcgcatatattcgtgttaagaattatcttctagtcggttatattaaaaaaattataaaaaattaagttaaaagttctatttgtattattctaaaaaaatataaaatctattttataatttaacaaaaaaaaataataatttaattgataatttttacgaaaacataaatccaaaatattattaactcataaataaatacataaaaaatttgaagaatagttgtagaagtagtagtgacatggcaagcaagcaaagcacgtgaccaattattattattatttatttttattttgaaaataacgtctttctccaattcaatttcaaattcagaaaaaaaaaaaaaaaaaaaaatcagattcgatctca

SEQ ID NO: 70100 - DNA, 2778 bp, Cannabis sativa
  modified_base (2642)..(2645): a, c, t, g, unknown or other
gtacattgttggtatctctgtggccgtatgtttctcttcagttcctgttgtgttccgctctgactttgatttcctggatgtggttcatagctttgtgaagttgcttttttgcattgatgaaattaagagactgatataatcacctaacccatgttgatgtttattattattgtagtctttagtcaggcaaactaactcttttttatgttgacagtctcgtatcatctctaagattttaaggatcattacaattaattcaggaccacacggacgtcacactggtctaagcttgatttatgagaaattataattagaaatgacatattatatgtattagaagtaattgaagaagctttgctttttaccgtggttttgggaaaattgacgtattgggtttatggagttctaaaagttctattttttttttatttttgaaggatttgggtatggtgtcagctatatgatcaatatgcttattattcaatgtggaaacctactacagtagtttcttatgttttctgggcagtcggtagcttaggagacaaggttttaaggttacattgtcgagttttttgttttcttaactggtatgtatatgtaactcttgtgtctgatgacttgctttgttaccacgttacttatgacatattctccttcctttcttttcactcctactcttgaaatatttgagtgaaaatttattttttgtttcttatatgcaaatatgggggcattacaatctgtgaactcatcgtttatttttagtgattgagagttcgccttaaagagaagctcctccagttcatctttacgggagctgaaaataaactggggtgtttgcaccttgcgcggactttctcttatatctaattccatgttcattaatattcacaacatcagtttatctttgcaggaactgaaaataaattggggtgtttgtaccatgtgcagactttctcttatatctaattcccatgttaattaatattcacaacatcagttatgtcattataacatttggcatatttgcaggcaaggctgaacaaagttaaactcttgcaagccatggaaattttctttgagaggtgattttatattattgtttgcaagtggtgtaacataacctttgtattcctaagcttgacacatacattttatctttcacacagatctaatagacctgctggagaggagcagcatacatctagagaagttatccgaccgtgtggactttgccaggaatcaaacatggtgcttaaacaaaaccgggtaatgtgttttgatgtgactttctttaaatcgagtttctagcttgtgattgtgttttatttctgcccaagagcttgcattattccacatctcaaaacgttgtcagagttcgcttgtgattgttccctcctttaactatccagtcttcttttgctctcatgattgtatgatttggtgtgaagcataggtccttttttttcgctaaaatataattaagctcctcaccactggccaattgaacagtgaatattttttgaaaaaagagaaagaggtcacttgtctaagactgaccccacccccgaaagttattgaaaccctcacttgaggcggaggaataccacgcatacaaaagctttagctcaaaacgaactaaaacaaaacagcaccagaacagtacaaataatatactgaagttcaaatgccccactaagatttaaattacaacaaagatctccattctctacttaagtctaagaaggaaaaatgctcaaaaagcttagtcttatacaccgagctgtccacagtcttatcttatccgaaagatcatagtcttcagcattgttaggatcttacttgaatttaaggatattccttgtttctttacactttacactttttaaactaatttggttcttatactctattaattaaaatattgcaaatttccaatgtttaagccaaagtatcaaaattttcaccactgaagtgtaaaactttttttttttttttttagaattttggagaaatattgaggatatattgataaatgtcaatggcttattgatttcagtatagtattggttgaactgtgatattcttctaaaatttcttcatatattaaatgtgtctatttaatagaaattattggtttaacgggttttttttattatttattttttcattaaagttaacggttaaaactaacattgttaatcaatcaattaattatttgtttttcttttaaaaaatagttgtaaatatttaaatttaatttaaaattatctatataattagataattattttttatgtaaattttaatttaaatttgaattagacgttaattcaattaattaatcatactttataacaaatttataaattatattatttaattaattaattatatttcataacaaatttattagttatattatttaattaattaacaaatttataagttatattatttaaaatatctaaacttatttatttattttattgtttaataaaatggtaaatactattttgtacactatgttttgtataagttattaattggactttgttttgttaatgacaaaatagatcttgtatttttataatgatacaaataggagcctgaattcaatttttgtcaaaataaaatttaannnnaatctgatctagagatgttatgatgaaattggttacttttactgtatttgttcgtgttaagaattgtcatcaagttggttacattaaaaaagatgtcgaaaattgagcctaaggtcctatttttatcattttg

SEQ ID NO: 70101 - DNA, 1503 bp, Cannabis sativa
tggttttttcatccattttttctgctttcttgcagtttttcatcgccattttcatcttaccaatccaaatctccattcctgttcatcaaattctccctgtaacatggatccattgactcaaaaaatgaaaggcatcatcaatcttgaagaagaggaggaatcagtacttgcttttgatgaggaagagtctcccaacttggaagtgaatgaggatcactgcctccttgctcgagtcctcactaggaagcctgtctacttgtctaccctgcaaaaacaaatgaagactcactgggatggacggttccctgttaaaattacagaaaaagaaactgatctcttcatgctttctttcggttgtgaaggagatatggaaagagtcctcactcaagagccttggcacttccaaaatcaccacattgtcctgaaaaaaccctctgcacttcaaaacttaactcccactgatcttaaactttcacctttttgggttcaaatatatagactaccctttctcagcaaatctagagggttagcaaaagcattgggtaacattatcggggagttcatggaggtttacactgattctctcaatgaaggttgggggccgtttttacgaattagagtgaatattgatgttaccaaaccattacgaaggggaaggaatatccgtttacagcaagttcgggacaagttttgggtggatttccgctatgaacggctacccgaatggtgtatggaatgtggttgcttaggacatccctaccagaaatgttctacattccttgaacttattgataatggtgtcgaaccagaactcgcctatggacctgcaatcaaaggggcacccttgccaagttcgggctatgatcggtatagaactgacttctccaaaggtcatgccttgcctttagtcactcgactagcaaggaaagctatcacaagtaccatccatgatctctctttgcgtggccaaccacatccgaaaaaactgctttatggggaatcttcggcccaacagaatgaatctcctcatggcatctcaattcaacctgctactgatggtaaccactctcaatcggacatcactcaccctcacaccagtggttctttctctttcgcaccagcaactttgtcctctgcctctctggtgtgtaataatgctgtgatggctgggacaatcactagtcacaatgaaacagggaaaaataaggctaaattggatatgcatcaatctattactgagatggattctggtcatatggataggcacaatccaaatcaatttgctcttaaaagtcagcagggtgttcacaacaattcactctctattaatccatctcttccacaattaaaggatgttcatccttccctggttcgtggaaagaacaaggttccatcatctcccaagcgagtaccgtcttccccaaatgagagtgatttgactgacattttcatgcctcacattggatcaccactgggatacattgcaacctacccgcctgacac

SEQ ID NO: 70102 - DNA, 2963 bp, Cannabis sativa
aaaaaaaaaaaaaaagagtgtgacagtaaaaatgacaaaaaatggacatttttgtaagataaaaaaaaagtattttctagcaacgaggtcgaggtcgtgtaatgtggccaatgaattttttttctttttttttttctgaaaaaacctcaatgccttaaactgaaactaacttcttggtgagtacatggggactgacctcctaaatacaaagcaaaccagtacaattaaaagccaaaccccatttagcaagctaatgggcacgaacattacagctacatgaaatccaactaatagaaaaattacaagctgaagccaaatgaacaaacatttttttttgctaaaaaataaagagttattaaaaccaaaaatcaaattccaatctggagacttaccctccaccaacgaatgcaccagggtgatataatccaagaaaaattcacctccttgaaagtgaaggtcatgagcaagttcaacactgaaaattaaagcttccaattctccatttaaggcatagacataatcaactttctttgccacaaaagccttcacattcccatcctcatctttgaacacaactgccacaacactccattcaaaagccagataagtaactctctccaagaggggaaatggagatgatccacgcaaatagaccacttagaggggaactaaagggttttggttgtaacacactaaatcaagaaatggaccacagagtcactattcatctcctcacctaagaaacaaggcccatggccatggtccttgccaaaaataccttgaagcttcgaaccaaatggcatgatatcatgacataactccacaagaacaactttaatttatcatgaaacagtttcttccaaagaagagaacaaacaacatctttggaagaaaaatgaaaagcattcatatcccattaagttttttttgagagagaacatagtctacttcaacatagtcaaatcagaagaaggaagaatattcaagtcacagctgcgaacacaatcagctacaacagggttaagctaaccgtgcaccctctcaatacaccaatcattaccctaggtcatccaacaaatcactgaacaacaccagatatttgggaattggattaagtataccagcatcaaataaaacattatcagcacacgaccattgcgcatgccacaagtccactgaggagtctttgtcgataaaccaaacactattcttggctataaaatcacgggtaaaataaatacccttagccaccaaaaacccagtcttgggaagatccgtagagataaaattaccattggcataatacttggcattaagaatcaaagcccaaagaacttccttatgagattccacataccaccccaatttagaaagcaaataaacattgatatcttttgtgcgtcgaattcctaatctgccccaagactttggtttagtaatggagtcccaagccatttggtgatttttgctgggacagatagtgtaaatagggatcgaagccagactatttttaatgagggttattctagcaacttgagaaaggagtctagtcctccacctttcgatacgattacacaccttctcaatcacataactaaaatcactattattgttccacgaaaaagcaatggagtaccgataaatttctcctcacccttcataacctcaaaatccaaaaaatctaatatctaattcttcaacacatcattatagtttttagagaacacaaatttagatttttgagcatttaacttttggctagatcacccgtagtaagtttgtagacaatcatcaattgcttaaatattgcaaagtgtcatccacgtacatcaaatggggtgtaggtggtccattacaactaacatttatactagaaatcaaaccacttctctccttgttaaggatcaaacaagagaggatatcagcacacataatgaacagatagaaggataaagggccccttgtctcaatccaatcttagaaaaggtcttagttaaacccccatttaacaacacttgatagccgactgaagagatacaatgagaaattaacttaaggaatttttcattagaactaaaagaacgaagcactatgtcaatgaatccttattccatgcaatcatatgcttttgacatatcacacttgataccaacgaaggccttactatcttgtttacgtttcatctcatgcataatctcattcgcaatgatcgaattctcaacaatccacatgcctttcatgaaagccgatggacatggcaaaacaagtttatgttgggatttatgccctaaaagtaagtaattaaaggataatatattagagaatatatgaaatatgattgtaaaataaatgacacattaattagaagagtacacttattaaatatctaaaaagttctttttcatatggataaacgtataatcttgtaaggatgtataagagaattaagattatacgatatgaataaagtaagtcggtagtgtattaaagtattagaaatctttaatatagaaatactaagtacgatttactatacactatacttctggtgtgtgtgattatgattcagatcacatatgtagatggacatgtagtagaggtactgtgtataattagattatgcatgattggattgatatgtaataaacatctttcattaacttaccgtttaccataaaagagtttatcatatcacaatgatgattattagtagattagcctaaatcctgagtatacatgaacttctatttgtgttcattgagctctttgattcacgtgttaaagtttctcaaagaagatgattcttacaacttttattttaggagcttaataacatgagtggtttggaagatgttatataatagcgaaatctaagctttcctaacggattgaatattagttcccttatagtgttaattctatgagtgctaatagttagatctaaatctataataagttataga

SEQ ID NO: 70103 - DNA, 969 bp, Cannabis sativa
ctttatatagaatagatatattgtaacgtaactgatatataggttagataaaaaaaaaaataagaaaatgcgaaatgaaaaaacttcttccatccaaataaaattattgtctattttaaaagtaggctataaattaatttatggccataatattaatgttacaattacataaaaaaagaaatgcttttagatagttagacaataaaatttgaatatcaaaaaagaaatctataaaaagtgtttttattccccaacatatctaaaaaaaaaaggtaaagtgaaaaatttaagaaagaaaattgtaataaaatttgtaataatggtgattttgaaccctaaaaaacccttcattgtttattttgtcacacattactcatgtgtgatagtgtttttgagatttatattatttataactattaagtttacgatcgaattttgataaatattggatatatattaaaggtgcatgtgactgaaatctgacaaaaataaataaagtgtgggatgaaagaattaatcgcgtactttatttgttaattaatgttccagttggcaatcatcaatcacgatctgtctaatattattgtcaataatataatatgaatgcatatgttcatgactatatgatgctttttgtttttttttttattcttttgaaaaaagtatagcgttgtttgttgttatacgaaaggtggagatttcttattctaacaacacatatactcgggaccgctcttaaagtatatggggcctaaggcgaaattaaattttggagccactttatatagtttaactattataaaaatgatagttctagtatttagtgtaatggtaaaaaaattaaaaagtagagattgggaattgatcacatgtccttttacttaaaagtaagtccatttactaccacgctaaacaatttttgttatattttcttcttatttaatactttattgtgacagtcagtagtcc

SEQ ID NO: 70104 - DNA, 1168 bp, Cannabis sativa
tatttttgatgtaaatttttcttaaatcaattcatatacatgtgtatatattgtgtaacttaataattcaatacattacaatactctttgatacagtttcgaatattgtattgagacattatttcgatagatttcaaacccaccagcttaaaccacttttataagttgggccaattataaagtgacatctgtacaatctagtaacgttaacatcacttttttttttatttatttaatttgagtattttttttattcgtaaaataaacatttgatttgagtattaaaatttgctgaaaactctctttcacaatctaaaactaaccaaataaagcagacatatcaaacacatggagattagaaaatgtaaaattcacctaccactatgatcaataaacctctttccaatctgaaaaagagagagaaaaaaaaatactacttagaacaacttgacttgtattttagtttaatattggtggattaattaataacaagttccaacctgttcatttaaaaaattaaaatattaacactttttttttttttgatattgtataaaaatataacttatctacttagtttctttttaataaaatgtttattatcagatttcaaaagattttgggaataaaaagaaaataaaatatacttaagagttgtgtgtcttttgcattacatccaaattacatcagtttgtttgaaattatgcaaatcttcttagaaatgttcgaaattaaatttatttcttttgtgaatatttatatattaaaatgttatatatttatatgcccataaaaattaatacaacatataattttacataaaaatatttcataaaatgtaaattaatataatactatataatacaatacggtatataatataacatactaaacgaaccctttaagttttggattagattttaaactattaaaacataaaaaaaaaattgatcttttcctcaatggtaaattcatttttatgatacatttctaaaataagtggtctctttcgcttagcagttcatggtttgacaagcatgcccttcagttagacgatgaattattctggtttgaagaagttcctgcacggtttacggatatctacatcgtaaaaataagaaaagaaggatattaagtagcatataaaattttgagctaatccattatt

SEQ ID NO: 70105 - DNA, 1580 bp, Cannabis sativa
ggggatattcgagtttgtccttgagacaatgattttgattgagttatgttagaaattgcgtaggaaaactctaatggaatagagtagaataataagattaatatacgaaaaactagagaaatatggtctttatttttatctcccatatggcctctcaagaagagaattagtgtttctgatactgatttatcttgtagaagtaagttgtgaattaatgtgtaaaagcaaagttctaaagactagaaatttaaacgtcaataattaagctatttatatttcttctgaggttgaacttttcaatacccgttccttatcatagctaatgtcattgaggttgttgtcgttatttttatttctattttcatcttttatgcattggattgattctgaggttggttggactttgttacactagtgacaaacaaaataaacatgtcatcctacacagcttcaaaagtttttttccacttgcacttttataacgtggccttttagaaattcttagttttgatatgaaacgttgatacatgttataagagcactactttcataaagatatgactttctcaaattgactcaatacatttataataatttgaaagaagatttcggtggaaatggaatgcggacttggtattctgcggtgagctttgaaagttagtacagtttatctgtgaaagtaaccatgtaaatgtaatcttgtttagttgttattacataagctgtagcatacagtattcttcctggtcacgcatcttattgattctgatgcactacgtgatcgtgatgagccatgtgttagaagtcagtaccgattctagaaggttttagcagaaactatttggtggaggcctccaactattgatagataattatgaattatttacagaatggtagaaattcagtggcacaacaacggataaaagttttatacgggtacatggcaaaattttacttgtattagtaagaagatggttatcatagtgagactttatcgcccatcaacataggagatggtggcttcatccaccgagcacgtactaggcaattgctgcattggtgagctttcaacagttaaaacagattggttacgatcgggacaatgagcttcattacttagcattaaaactacatctggcatggtgggcctatctttggcatggtcctgtacgcacaaaagcccaacatgtatgcatcgcgttacttctgatgaattacataagtctcccagtattgcttcatctaccaattccattgctctgccttcactccataatttccatgcctatatatacatgtatattatgttatatttttatcttcataagaatgattcacacacacataatatatatttatattctggagattcaatgaagaaaaaaagaaagaaatactcacataagcaacaaggcttcggtgttgctcctcatgatagaaacttgtgttcttccttccactaattatctccaatatcaagataccaaagctaaagacatcagatttctcagaaaataatccactcatagcatattctggagacatatatcctctgcagttgattgaaacaaaaatatgtt

SEQ ID NO: 70106 - DNA, 1326 bp, Cannabis sativa
gatttgttggagaaatccaacatccaatgtgtagttggattggatctggatgggtccaaaaacattgaatgtgatccaatgaacagccctacctaatacctatttcttcacttgggtatgtgtgcttttcacttataagtgtacttgtggtctaatgtaaagtaaaacactttcatttatgggtgtaatttctaattgggtacgaggttatgaaaaacactttcatttctcttttaaatttgcttgattttctgaaataacattattcaatatcaattcctatgttttgttgatgattttattgatatgctctaatatacaagcaaaatgaagcattcctttcatcctttttcttgccatgggctttgtgaatatatggagatatagtacagtattaatatacaagcaaaaatcggttctttgatggatcctcaacttgatatgttgtacagtattaaacctgtttttcaaaacaagacaaaaaaataaaaagtcattatataagtaaattttttatgattttcaattgtgaaaactaactgatttgattgctatacaaaaatgaattagaacctgaaagagttaaaacttcacttagattattagatcaagtggggttggaataaattgaaattgatcaagtggggttggatgttacttttatatatactaatttttaatctaaagcataattattctgttcttaatttggaattgtctcttgcttaccctcctaaaaaaagtggagtgctttgttgaattttgctaatggtggagatgagcttaaaatggaatcaaaaatgccgtgataggaaaatgtggttgctttatttttcatgctatctcatttggagtgctaaatgggataggaaaatacagtattatttaaattagcatataattcatgctgaattgattttgttgacaggataggaaagaaattatataacaagttgatgagttcttgaaaaccaaggttgcacctcaagagcttgtggatgagattaaggtacttttactatgatataacattcttttgtttaagaacttgtagatataaatccatatatatatatatatatatatatttttaaactgatgttagaaatgttgtatttctcataatttaatagaagagtttgaatatcttatatattcatccatagagaagtaggatttgggaaatttgtgtgctgcggtgatataaggatgaaaacttgtatattatctgattgtttgcggttgaaattgacaaatgattatgttaataaaataggaaaaatgttgtccgatttttttttaatattttctaagtagttgcgtgca

SEQ ID NO: 70107 - DNA, 1193 bp, Cannabis sativa
taaaatcaaaaaaattgtaaaaatgtttaaaattcagtgaaaccttattattgtaatttttttgttgtttttgtgtatttgtgaaataatccctttaattaatggagtttccactacggttttaaataacatcactcctttggcatatttgaaattttttttccttcatctagaattaattctgtcttgcttctaaatttttttgttgtacaacttatgtccatcttcctaagagatctagttcaaaattagatccaagacttgaaaagtgtattttgtgctattctcctaacaaaaaaaggtaataaatattttaatcctattactaaacgggtttacactactatggatgtttatttcttagaaaatacctatattttccaaaaatttgatttttggaagttatgtagccattaccaaaaataattactgatgtttcagtaaggaaaactcaaccccaccctataaatatcaaatctgagcttggtttgtcaaaaaaagaaatactacgattaattaaaaatcgtaataaccttgagcttatggtttattcaaggaaaaatatctttgaaaaaataaagatcatcaaatcatcccggcacacgatcaattgaatgccctaaatgatggttcaacaagtactgaaggtaattttgttcccactgctcattcatctaccattaatactattctgacagttgtttctgaaccaattccagtcacatttgacttagatgatctttccattgcacttagaaaaggaactcgtaattatactatatatcctactaccaaacacatatcatatgatcatttatctaaaacttatagagcctttaccactaacattttagagcttgttgtgcctagaaacatacatgaagcattaggtgaactgaggtagaacatggatgtgtgaggatatgagtactttgaaaaagaatgggacttgggtagcagttaaattaccaaagggaaagaaaattgtaggttgtaaatgggtgtttaccataaagattaattctgatggtagtattgagaggtacaaagctagactcgtggcaaaaggttacactcaaacctatggaatagactatcaagagatgtttgctcctgctgcaaaaatcaattttattcggctgttgttgtcattagtcaattctaattggcaattacatcagcttgatgtgaag

SEQ ID NO: 70108 - DNA, 1366 bp, Cannabis sativa
gataccataagttaatttataatttattgaaggatcaaattataaatattcaaaaatcattctataataagcctataaatagataatagtctccagtaaacactagagttcttgtattcttaaaagatcaaaaactttatgaacaatctctaacaatgacttaagattaatacattcacttatctgtattcattttgtgaatattaagaataacttcataattcatattagtactttttcttaactctctcatataatatatgttattcataaatgaatactatttcttgtaataaagcaggtcaaataatcagaataacttgtgaatattaattaagctattattattatttaagttccaacggccaacccaatatttgcaattattaaaataatatttatatatattaattagttattttaaaataaatgtgatcaagcacaaatgatcaattggtagtactcacattttttatcaaaattttgatatataattttgaatttgatgactttttaaattttctcaataaaatacccatctaacaatgaaaataccacgatttcaaaaattcataactgttgaacatatagttctaaaaatttacattagagataagaaataattgataacattacaataacaagacaaaagatatatattatcctctatacataatgaaattaacatcatcaataaataatataagatatacatattactaattattaatccaaagaagccttcaagtcttttttttcttctaaacattagtccatatagcaaaaaaaaaaaaaaaataaacttttaaaaaccttgtttaaaaaaataatttaaattttattttattttccaaaaaaatccattttttaaatttcatttcaagtccgtaaaagctagagacgaccctaacttacgaaaaaaaatctactatccttaaattgttgcgtcctttctgtcccaccaattgttttcggacacatcatattattggtgggaacagaaaaagcacaccaacttagtgacagcagattttgatttctaagttaggtagtcaaaagtgcttgtgatttcttctcataacgaaaatcattcttcttattcttagaatcatcagcagaccaaataaagattccatggagttttccttgttgtttcaactcattacaagccttgaagaacccattttccggtgacaaacctcctctgccttcggtagtaaagctaaccaaaaccttcccaccatgatagttaaagctttgagtgttgaaataatcaatgaattgagacacagtagttcccttatcataagcatagaattggaaattcacatagtcaatcaaatccccatatttattccacaaagcc

SEQ ID NO: 70109 - DNA, 2958 bp, Cannabis sativa
gaaaagtcatgcccaacacacgcaactctgtgcatggggtattcgacgacaatttggaaggtccttacctaatcgctgaaaaaatcagaaacacaacttatcgattatctaatctcaatgactcaatcttcgatagagcctagaatggagtacacttgaagtactactatcaatagtacctgcatgtatatacttggttaatttatttatactttaaattatctaagtatggggggtataaccatacactgtaccattgtactatggattatccaatgaattattaattttcaaaacttatgaattttgaaatttttcatacttctcacatttacctacttagaaaattttgtggaattttttacttttgaatatgaacatcaaaatgttcatcacaccaaactgtgaaggatagttgcatggatagaacaacgaccaatacaatacacgtttaagcatttaaaggcatcaagttgcaattgtaaacatataaaatttaacgacaaatgtcaaaatcacttagaagcaaaagggtaccccaaatgatacattgttcataagatgagaaaaagaaagaaaatataattgtcttaaaactgtcaagtataaaatgtgagtacccatgtaccgctcaaaagaaattcaaaaaaggaaagaaaaagattaagcaggggcattgagattttctgcgactttgctagtgccatctgtgacttaagcagcaattgcgtcttcaacatcttcaagaaagaggttcccacctaacccttgagtctcagtaggcaacatagtgtgaatagcattaaccatctcaaccacctctagtccgaagattgcaaagtcaaagtctggcatcttggtcagggtggtgtagatgtagtcagagacagcctggtcataagctttctttgcgttctccttctcagtctcaagattacgagtaagggtagaattttcttcctccaacttcttactcttatcttctaactgcttagccctcccctccgcctgatccttggccttgccaagatcttagacttccttctcttttgcaacaacatccaacttcactttcttcgaaccttcttgtagagccaagttttgtttcttcaagaggtcaagatctttgatatttgcctaaaggcctgcgaatataccgccatgaactgcgatgcgagttcgattgaacgagataagaggtcctcggtaggagccctttcaactttagcaacaaagttttcgctcacgaacctctcctgcagagccatgaatttgcgagctttggtggtaggatctatcgtaaccttttttcctttgtcttgtgcaactttctgatgctttttctataaatcaacaacaggattggtggtgacttcactcttcctcttttgaggtgtcgcagtagaaggagtcacaatattaaccttcggcttgcgattaaaggagggagcttgcttcaaaaaattcatatttgcaaaaaaaatacttagatgtaaaaatttgaaaaattaagatactattatcagttagtgttaaatcatattacatgatgtttatctcgaggtctatttgggaagatgcttatctatcttctccttttgtttctctaaaggcccattgtataatggttctcgctgaagtttagcatcggctagaatcaacttgtgtgctcgtagctttgcagaggtacacaacaagcgccagtcgcagtcttgaattggaaggccacttaacacttcagcgatttccacacgacttttgtttaatacaaattgagctagtctacatgcgaacataaagtagatattagtgtctgtaaaataacaagaataaaagctaagtgtaaaagtatgcaacatacgaggttggcagttgaagtcaatcctgaccctcaacatcttaaacgcataaaaccatttcgacttccaatcactcatattggaaactatgccttccaccccatttatctcagagttggcccatttgctaaaacaatagaagccattaccatggccaacactttttatatcataaaagtagctaaaatccttgactgtaggttccccttgcgtgtattccatatacatccatataatccgaggattatgcgataactgttaggggtaagttagaaggggcaaacatcgtagtgcgttatgatggcctttacaaatggatggaaaggaaatgtcaccccacaacgaagaatgggaattgagaccacaacattttgagttcggatgatcgcaaggttagtgaatggaagatgaggtaactacattgacatgggctttgaggtagcagtatggatcagatttagcctctcaaatatggtaagatcaaactttttaacccgcgagactaggtcctcgcaggaaaaaggattgtctaactgagcattgtctactgaatctgttttgctaccctcaccatatgcctcatcttcaacttcacgatcaagtcatttaaagtcctcaccaatctcttcaaccttgacgtctcaggaaattggtggatgagcaaagttaccttgagcagacaccatggattcactatcctgcacctctaaggtgactggtttcgctaattcttgtaacattcgatctatctcattagtagacagcgaaccttctcaagccctagctataggagtctcatcttttaatagcaaggtgggtataaagctatcgctcctttgagattcatcggtaaaggcccattcaccaaaatcgtatctctggctgtctaatagatcgctcatctgaaagatagaagatcttttcactgtggtgcgagtgcagtttgaaaaaaaagtgttctcacctgaattataaaattttaaagtaatgtttacaaaactggacgcttgtctcaagaagtggctgggggtttccgagtagggctgagcatcggccggtttggttggtttttttctatataaaaatccaaaattcgatt

SEQ ID NO: 70110 - DNA, 1614 bp, Cannabis sativa
ttggaaaaagaaaaaaattattttttttctaatttttaaaattttttaaatgttttaatttatttttttaattattaatattaagtggctcaataaaattttgtcacgtgtacacttgtgtacacagtggcaggtctatttgacacttaacaaccaaaaattaactgaaggagtgttgaccaaaatgattgtagagtttggggagtttagccctaatttttttagtaagggggttaatccgtaaagaatctcaaagtataggtagtttgaccgcaaattactcttgataaaattataaagtaatattaactaagatttaaaaatattataaaacagtaactagtcactatattagcaatcttcttttctgagaataacaaaaaaaaaagcatatgattctcacatcttaaaatattcacattgacaaatatatcacaacggtaattttttaagatcaaccgagtaacggcgtagccataaattatttttaaagttacaaaaagagagagaaaaatataaaaagagaggcaatgaaagtttgctaaactttaggtgaaaaaaaagtcaaaataagaaaaaggcaaagacataattgtaaattagattcaattaaaggtattagatgtaaaatgcacaaaagaatatgtattttgttagcataggtagaacccatctatttactgagatttttaaaaatcaattaatcaaagcttacgaaaatgcataaaattaaataatagacaaatagactatttacgtggttcaggcattaatgattcttagtctacgagttcattttattagtcttataggaaaaatgttatatattacaagtatttaaaccatggacatgccccctctattcctctcgttcctcttgaagaagaaaatgaagcttataagaatttttcaaaagtcctctccttgttcgtgaaatacatgggtattcataggaggttttgttatagtgagaatttttcacctagaaactcaagaccaggctcccataaaaatgacatgtggactcactctcctcgaggagggctgagatgtcaacaagagacctcttgaatgtatacctcgcctgaactagactcaacgggatgatgtgaccttgacaaagtctagtcgcattcttatagtttgcacgaagtgagaccaaagatcgggtttaagactcgcatataccaagatatatgctaggactataaaggtcttcttgcgaagtagtagagatcgattctctactgagcgagctggtccaaatgacctaacatcctcgataacttgataaagactcgcatgtcttaagttatcaacctattgcaggatgtccatatatgcgaatcgaataggacgcagacatcttagactcgattagtcttgtacgcatcttaagcatgcgaatccatggtaccagttaaagttggagtaggatctttgaggagagatgtcttcaacaacaacaataatacagaaaatcaactgttacaacttgatcttctagaagagaaacacgatcaggctcatttgaaaaatatagcctatcagcaacgaacaactctttatttcaacttgaaggtcaaagaacgaaacctgtgagtaggagatttc

SEQ ID NO: 70111 - DNA, 648 bp, Cannabis sativa
tatagctataatacatatttataagtgacacaattaattaactcttggaatcttatttactgttttcaaagaggtaactctgggaaagagactgcatgctgtactttgagctcttataagtattacataatttctattttctaccattatttttatatttactgtcaaaaataatgataaaaatgtatttttacttaaacttattaatattggttattatgaaaagatgtgttgcatttcttccaacactcctgatcagtctcttatataacaaatatttgatatatatttgcacatattgttacgtacgtgtgttctgattatatttgaaaagctcgtctatcaatgaaatgtattcaaaatttatattatatatatagttactccaacttttttaatgttttcactaacctcttaggttccaaccaaaaatatctgaagttattaaaaaaaggaaagaagatattccaaactaataggacttttgatatatacaattaaacttttaatactcattgttttcagctttaatctagctacaaatctatagctgtactgtgtctaatagctattactagctatagcctctatctctagctaacatatgtaagctaatatacatatgtttgtttgatattgagattttct

SEQ ID NO: 70112 - DNA, 6093 bp, Cannabis sativa
  modified_base (1329)..(1335): a, c, t, g, unknown or other
  modified_base (1449)..(1454): a, c, t, g, unknown or other
  modified_base (1998)..(2001): a, c, t, g, unknown or other
caaacaattcctttaattttggaagattttataataaagttttctattttggaaataaattgcaatttatgaattgagcttcatttactttatgtgttgattttataataaagttattgatgtttgagcttcaatccctgcgatagcttcggtatgggaattggagcttcctcgctctctcaactctatttagatagaattttgttgttttcaacaaaatgcgtgaagcgcttggggaccgagaccctatatttataggtgggatactccatcattatgtgcgccacgttaattgtcagaatattttgacaattagttggaaaattaaatcaggtaatgaatatcgaaatctagccatttatataatataacttaatttattttgtttaaattcaatgaatatgaaaagtttatttatctcaaaatcaattctttattttattctataattagaaaatattataatatatgattcttttgattttctatgtacagagttataaataatttttatttttttcataaataattttgtgttcattaggtaactatatacttatctacaatttatattttattttttctaattaaataatacttgaagttcataaaattatgtttgtttatttattttttgatgtaaataatacttgaagttcataaagtatgtttgtttatgttcataaagttatgtttctaattaaataatacttgaaattcataaagttatgtttgtctatttattttttaatgtaagaattatatttcaatagatgaatttattcattaggtcattacaaaactaatcaacataaacaatagaaaaatatatatttattttagaatattataaatattcactatgtctatttttatatttacaattataataaacatatcaataatataaatactttgtgtatatatatatatgtttatttaagtttttatttattaaacatgctaatttaataaataaaataataatattcacataaattttattataatactcaatgtgagtcatgtttattttttaataattttttaaaaaataatcaatatatacatataaaaaattgtttattttttttttattgtgtcacgtatactttttattctatttttttatgttatataattgatattttgaaatgttgactaacatgagttcaaaatagaaaatgttgatcaatttttttaaataaaaaaaaaaaatcagaagcacatgtttaaaatcatgccttacttaataatgtagtaattgtaatgaataatttttatttattttattttttatttaatataaggtaaatattattttggacnnnnnnntttgtaaaagttatcgattggaccctctattttgttaaataataaaatagaccttgtatagtgtatttccaaaattgtacaaataggaccctaaactgattttttatcaaaatnnnnnntaataataatccgatctaaaagtgttatgacaaaactgtttacattttctatatttgttcgtgttaggaattgtcttcaagttggttattttaaaacaaaaaagttgtcaaaaattaagctcaatgtcctatttttactattttagaaaatgcatggtccattttgtcatttaacaaaacagttgatcaaattggtaacttttacaaaatacagggtccaaaataatatttaccctttaatatatacataataacaccaataaatttagaaggttaatgaatacaataattttatactatacaataattttatactatatataacatattctaattatcttttcttttatatataattgtaatataattattttaagggaaattactctatatataatttttttaatttttttttcttcaaatttacagtttaggtttttaaagtggtttctccggtagtttttatgtgggttgctatacggattttggttgcaatttaggttgctccgttagttgcaatagagatttctatgtaaaattccgnnnnaatacaaaaaaaaaaaaatattttaaagtgtaaaaataaaaaaaatatctttttattttaattatataaaagtccattaaagtatgtataggaaaataatcacctactacgcacttgctagtatctcacactgttaaaatataacaggtggcagcattggataggtggataaaacttccatccatgggtctgttttgggtgttattggaaaaaaagaatacactatgtatagatgccattaattggttgtatattgatgatagtgcaagcttcattattatgtactatcagaaaatcatttgccatgtttggttgattccgactacacagtttccagattgctttcttttgttttctttataatataatctttgaaacatggatagtaattattatatacatatatagttgtttttgaattttccaaatttctataatcatataaatattattgccacctaaatatccactaagaaatcctttttggctactcaatcatgtcatgcaaaagttcataagagtgatggatacgcacacatctgatgcagatgattcaactaagagcacaaaactgatcatttcacggtccaccaattactgactttgaaaattattcttccccaaatttgtgcactcttcgattctcacgcccgccttaatagggaattaactagatgcgtgctccaaaatcaactaccactaaacactaatttggttccatttttggaaaaaattacaaactacttctttgaaaaaaaaatgtaaaaaattaatttctaaaaaataataaaagcatctccaatggtaatattttaaagaatgttatactattagagataaaaaaaaaatgttattcttaaaatttatattaatgccacataatggcattgatactatattttgttttttacaataaaaaaattaaaggtgcaatatatataatagtttaataaagaaaaaaatatatataatattgtatgagatcataatttagtatttttagaaggtattataccattaaagtatttttaaaaataaatgtgtcaaaaatgatgtagaagaaaaaagaatataaaatataatatatttagatgatgtggaaatatgtagcacttttgaagaatgctacctaaaattaattttttattaaaaataatatcaatattaaatgtgtttttattaaaatatatgaatttatttatttatttattatatttcaccaaaaataaaatatattaaacaaatttatcaaaagaaatatataaataataaaaatttagaccaaaattttaaaaaatattacaaaaatacttcaacacaaattttttttcatttttacatttaaattttttttatttacaaaattacttcttcagtaaaagcaataaacatagttgttttatagtttatttattacttcattataattttcatgatgttattttttggttattttttattattttatagtttatttatagttattttcatgttgatttctcattgttttttaactgtttttttactttttgctgactaaagtgtatttttataattttaaaattttataagtgtatttttataaataaaaattataagccgtaaaattataaataaatataaaaaaaacgtatttatgaaaattctcctataaaataaattaatttatataaaataactactattttaatatttaatattttgtttttatttaaatataattatatttagtggatttttttatattgataatatttctaaatcacattaacttagtgtttacatactataatatatatatatatatatatatttttttgcatataataatatttttaaattatttttaacacgtgcatattaatttatactttaaaaaaatagataaagacaaaatactttgtatattttatattgtcaatatcaataaatatgtttattaatatttaacaaaaactaatatttatcgatatattgtgattacatatttaatgcaatcactaaaatacctttcatataagcaaaggtcttgtcttttgacatgttctctgtagcctttgtggttgttttgggttcataatttatcgatttgtcgatattggttccctgattttgttttttttttctatttttgtctctcttttgtctattgttctggtttggatggcctcaagtagtcgaatacaagaaggtgaggatgatggggcgaatatttttataaagggagaggaagaggttatttgtcatatgatgcgatagcaacgagcgagaaagattatgatgatcgatggtgtattgtgggcagattcttaactgatagagctgttgattttgatactatgcagcatttgatagcatcgctctggcagctggggaaattaatgctcgtcaaagaatcggatactaattgttatttatttcagttctaccatgagttggacatacaaagtatgattgatcgaagtccatggacgtttaacaagtttttattagtttttagaagactgcagaggggcgaggatctgaaagaagttcaactaaaagaggctgatttttggatacgattgcatgatcttcgtgcagggtttaaaactgaaacagtagctagggacatagctaattacattggaaagcttgtggcttcagatgaaaagaactttctgggattatggagggattatcttcgggttcgggtctcgatagatatcacaaagccacttaaacgcagaatgaagctacgtaatacggatggggttgaattttggactaatttcaaatataaacatatccccacgttctgttttgtatgtggaattgtgggacattcggagaggttttgtccatagcggtttgatgttcaagatggaaagctattaaagccatatggggaatggttgagagtcaaactccaacgtaaaaatcagttgattagaaccaaatggttgaaacaatttatggccctttggaggaacaccaagttgccagcgttcaccctgcatcggttgcggtaagcagattccgatcagatggttttggagagagagggacgatcccagctagagatgttaattctcttatgatggtggagactttcatgggtcaataatctggtaagatagcagcttctaatggcagtaatgatgttccaagattgaagggtgatgggaagttgactattctaaataagaaaatgtctgatgatgctataattgatgaaggttgtctcttagtattagattcaaaaagaagaaggactgaaatgggccttactgatggttgaacacaatgatgagtctagttcagcccaattgagcaacaattcaaaaaactccaatatggtgggtgctggtctctagacccaccgttcattatgagtttattatcttggaattgccaggggctagggaacacatgggctttacaattcttaaaggatgtggcaatccaaaagaagcccaatattatttttctttgtgaaactctttgtaaccgaactcaaatggagagagttcaaaattctctgggttttgaaggttcggtagtggttgatgtgcaaggtagaagtggtggattggctcttttatggaggaatgaggaagaggtttctttacttggtttttataactcttaaattgatgttaaagtcactgttgagggtgaggtggagtggaggtttactggtgtttatggcgacaatgccaattctaacaacttttttgacgccgacaataatttcggcgatttttccgacaccggcaactactccggtgacattttcggcactgacatcaaactttagaatagtcgttggaattggcattgtcactagtaaaattaccgaaaaaataccaagaaactggtgatttttcttgtgatttttctagctacaatgctaattttgacaattttttcggcgccggcagcaactccggtgacttttttggtgccggcagcaaactccagtgacctttccggcacgaatgacaacttcggcgattattatagttttatttattttattttttttaaaaaaaataaatataaagagaattttaatattttttataataatttaattaagttttatttttt

SEQ ID NO: 70113 - DNA, 866 bp, Cannabis sativa
ctatgagtattcatcccacaccaattacaaagctccatttgaatatgcttactatacttgcaattaaagaaaatatgctgctctatttctaataatatgttacaaaataagcaattcacctcagttaagttgacaagatgatctttagtgtataaatggttccaacaagcaagccaagtgatagatttgtgcctagggtagctttgcctattccatataagggaaaatcactttctgttccccttatctctagaccatattagattataaatggcataaatactaaatttcatgctagtaaaagtagcagctctgttttacctctaatgttattttttgtcattataagtttcttctaataccaactaaagtttcatggaacctcatagttctatcaattttgatctttgatatataccgaatgtacctattttacccaaaagttatccttcctcgtagcaacattccaaacatatttactaagggctccaatattccagtgatatatgtttcgaaaaccaagcgcaccatctttttttaactgacaaaagaaatttcaagtaataaactcagacctagttgtatctacctcactcttatagagataactacaaataacattgaccttcttaagtagatctctaggcaaaatcataattttagcccaatatgtatggatcgtacaacgatgttggtgttgaaggtagagatatatttttctataacaatggtaggactaagtgcctagattattgtaatgttcccccttcatgcttctattaggccttcccccataaactaatgacttttatacacgggtgcgtcattctagctacttactagaatgaagactaaccctacaaacc

SEQ ID NO: 70114 - DNA, 1696 bp, Cannabis sativa
  modified_base (338)..(370): a, c, t, g, unknown or other
attattattattattatatcttaaattctaggacagcatgtattgaactctttttcttatattttttaatatcagatttgaaaataattgaacattcatcttggagattaagaaacaaataaaaatgttttttttaaaaaaaaaaaataataatgttattaattaatcatgatatttctcaatttatatctaataactctttaatagttcaaatagatttgtcatggttttattaatttatttgaatctaaaaaataataggcctacaattatacagattatataattttttttatacaatctaatgtcattatcacatttattattattattattannnnnnnnnnnnnnnnnnnnnnnnnnnnnnnnnttattattattattattataacttgtactattgttccttttgaatttctcaagcttcaaattatatatttaaacagatcatataagtgaatgctattttgctttccatttttttggacaaaagttggaaagggtagttaattaattagttattaaagcaattaatttcttctaaagggttataaaaatgaaaaaaaaaagtataattagtaattttgtcccaaaatttttcatacgatttcctgtccttagaatctacaacagtacggcatattaaaaattctatttgaacttttatatttacagagatttagttattttattaggtttcgtcgagtattttgtttaaatgatagtgtgcctttgtaaattagtaattttgtcccataaattttgacaactatcaattgtaccacattcaaataaaaaatgagaaagattgaacattttgtttaataaatcttaagaaattaatttagatcgatcttaaaaaaaaatcattttgaatgattaaaaaaattaaaaaagaaattaaaatttaaaattaattaagtgatttaaaaaattaattactttttattaaaaaaaatctgtttagatataaaaaatatattaaaaatttaatttttgtaaaagctcacaataagaaataatattttttataataccaaaaaagtattataaaaatctttccataataccaaaaaattagtttatgtggttaattatcactaattatagagattaggtagttttgctaccaatatctcttactgtattagctttgaagttttactttcatgtatacacatatgtacacagtggttatctatttggtatttaacaatgatatttaactgatgcttcaaatttacaaaaaaataaataaataaacttaaggagattttgccaaaaagaaaaaaaaataaaaatattaagtgtataaaaaaataaaatataaggagttaagtgtataaaaactaaaatataaaagagttttaccgcaattactctaatgaaaaactaaatttataaaaatttaattttgtttaaacaaccacattattattttgtttgttatctatgacaaaatttgacagaaatattaatttataacactgtaaatagtttgtggagattattttcaataagctaaaaaattcataaagcacaataatacataatttatagttaagaggcaaaaatagtaaataatctaaaataaatattaattaaaaataaaagaagaattaccctatatactattttcttaactttttatttaaatttacggtttgggtttctaaaatggttgcagcgctagttg

SEQ ID NO: 70115 - DNA, 1177 bp, Cannabis sativa
aggactttgagatgagtttgtagacaacattacacaaactaattgaccgaaaatctttcattgattttggttttttagtgttgggaatgagagtaatcagtgttttgttgagagcttcaggactacccccatcatttagaacatgaagaaccgcttgtgtgactaagtcgccaacaatatccaaattatgttgatagaataaagctgacattccatcaattcctggactaccatctccattcattgtttttaaagcctcaaaaacatccacagcagtaaaatctctcaagagaaaagcattatgttcagctgttacagtagtaggaatgacattgagaacatgttgtaaggcccaatggtcttcatttggtgcttgaaagagattctcaaaatatgtagcaaccaaaccagccatttcgtgctgtgatctgtagactgagccatcatcatcagttaaaaatttgattttagtattggagtatcttgcagaagctttcgtgtggaaaaactttgtattacgatctcctgattgcaaccaatcaattctggcacgttgctgccagtattgttcttcagtggcaagcaaatcatcaagaacgacttcagtttactgaactggctggttatgtgaatttggttgtgttaaagtgttggaaagggcaatgacagtagcttgtgctgaagagatctgatttttaagatttctaaatttatctctgtgccaagatcgaagagaagaagcacaatttgacaagtttccattcaaaacttcaacgggatttcctgaagaaaggttccagcattgagaaataatgtacgaacactcagctttcataatccacaatttttcaaatctaaacctcgatcgatactgaacaacagagttaatagattgcaaattaatgacactgaggatagctctatggtctaaaccgtaatagtccaggtgagatacatgtggtgaggccaaactatctttccaaattgtgttgatgatcacccagtcatgacactcttataaagcttgtggattccgtctattttttgcccaagtgaaatctggacccgtatggggaaaagaagagagcataggtcaattgtagttcgaaatgccatcatattgttatcagatcgtaggggaccagaatttttgtgtgagtgtgagaaaatctcattc

SEQ ID NO: 70116 - DNA, 993 bp, Cannabis sativa
gtggcgaaatgaacatgaaaatagttatggagctattgaatattgaaatgaaagagatgagatggcaacaacatatgtcttggctacaaggaaattttcaagcgatgactttagtgtttaagaaaggataagtgtaaatacaagagaaggtgatggaagataagagtatatggaagcttcaggtaatttttagtctagtgatgaaaagtgtttcgagaatgattcttaagagttttggcttattggtgtgagtgatgaaaataaaaagagatatactctatttataggcttttactaaccctaaatctacccatgccaaattgttctcaactaaccgtagttaacactaagaatattcaaatattcaactaaagtcagtaacttcctctatttactagttcaaactgaactccacttctaatgctagccgaaccataaatgcttgaaaatttattatagtacttttagtcattatccttgcttataagataaaacaaagacctttttattctaaccacatcatcaaccaagaccctcctagcaacacacgtccacaataaattcaaatttcaaagttgaattgtctccttaattcatgcacttatatgacttaggtaagtcaaccttgctccacgtatagctcaattcctaagcaccctcctaaattatttcttgtaaccaaattttgttttttgtaccactatataatatatcatgttaactatgagacaagacatccacatgccactataaaaccatgtaactattactgtagctagtaacactaaataacaccatacttaaaccttaaataaaaaaaaaacaattatattagctatgatgacattcatatccaccaagtcatacacattctcactagctataatactaattattttctaaagttagttgtgcgtaaaataatttatacttataaaatgtgaatttctataaacaaaaataatttaattctctaccgtaagatataaaaaa

SEQ ID NO: 70117 - DNA, 2854 bp, Cannabis sativa
caaaacaaaaaatctaatcagtaataaataatatttactccatatataattaattaatatacaaattaattatatacataatatacatatatacatacgcacataatttatatatatatgatcaatataacacaatatatcaaaaaataagtaactaacctgcacaaaacgccattataaatcttttggttttcctttgataattaatttatgttttttgttgatatatattttggttttaggtatacagggtgcattagtatttatatagattttagaggtgtgtgtacgtacatgagccgaaatatttgaatgaattataataataattaataattggcctttatatatatatatatatatatattaattaattaaagtcttttatatttttagctatatctatatgcatgcattgcactactcatcaacacatgttatagtgttagagcttatcatcatgatatcatgattatatatatatatatttatatatattaatcataattaatgtgtgttacctggaaatcaatatagatacaatacaaggtaacaaggataataataataattaagttggatatgtccaattatatatactagctaataagctatctatctatctagttgcttaggtatttatatatctatatatattgagtattcatcatgttgaaaaaaatgccactttcattccatcaaaatattcaaattctaacggccaattaatcaagattatatatatatatattatatatatatacatgttgtatatataaatatcaatttgttctggtttattgaatatacatagtattgaagttttttcatttcttttcataacaaatggtcaattgcaaattctgaataattttgtaattaccaaaaaaaactaattaaatggtacggagagaattcaaaactttagttatagtccgttatgattacaataactatttattataatatgcacaataaaaattatggctcttctcattattttgtggcttttaaataagatttatatctagagatcttagtaattagagtccgttatgattttttttggtttgagcattggaactttaatttgtaaaggtttttgatgcttgtgctgatgatcttcttatataaaattgtatttggattttattccattatcaatgaaaaaaagaaagagcaaaattcaaatacatatagtccaaattgtcatttactaaaataaaaaatttcatctataatttttataaaacacaatatttaaagtagtatttatatgtaatttttctaatataatgaataactattataattaactacttgaggctagctcaagtggccataggtggatgtgtgtgttggaggtcctgagttcgagttctaagtaaaacatgattgtaatatataaacacttaaatgaaaaaaaaaataactattataattatatgtaacatttatcgataattaatgattaaaaatttaaaatgaaatgaatagttaagtattaaacaactttgaccgtgtttttttacatagatttttgatgtttatgattaataacatatcaactttattaattttgcttatatattaataatgaatacaattccaatccattatatgtccattgagtaccatatatatgatttatttaactttatttatacaaaataaagtcaataattaatgatgttgaatttttttatcagttcttctcccaataatataattaagcacaattgcaatgatcatattaaatttattaatattctttacatcataaatttcactttctttacagaacttattgtaaaacacttagcattctataggattttattcctatgtaatcatattctgtacacaacacatgctcctgctcttgaaaactttaccacgagaaaaccatcttaatgatattataattaacacgaacaacttattgcatatttttttttattaatgtaataattacatgatcaacttaaataacagttcaagtccaaaatttattaatgtaataaaatgatgatgagaggtaaacacttaataatatttattaataatttattaattagccaatttttgggacttgaataacaattccagagtgattaacccaaaccctaaccctctcacaactaaactctttagtgacaatagttccttcaagaattacaaaggccatcacattcccattctcttttcctatcgttttcgcggcttcatctccattcttccccacaagctccggccatgaactcttacctaacatatgtagtacatgatgtaagtaaaaagcaatactaattatctacatttcgaaaaagcaatctctcgaaaacttaatttctcgagttatataggattggtcggaaattttgcaaagctataaactctgaccaatcctgcagttttatgccatatttttttttatataatatttaagttaattgatcataacttcatgtttattaattaatacatgatttttttaaaaaaaaaacatagaaataaattagggttaattagttacctgcaggacatggacattcatcagccattaatttcttcctacttttttccttttctatctctttcgatgtgattatatatataaatatttttgagtgagttttgggggtagagaaaggtgtttatataggaaatagattaaaggttttatctagcttaattatttaactaataattgatataataagtttcagttaattctgaattaatatttataaaaaagaaaaggtgtcaaaagtcacattcttcgactttgaagagttccatattaattattttaaactttctactttgtgtgttattgacatgcattaatgac

SEQ ID NO: 70118 - DNA, 2502 bp, Cannabis sativa
  modified_base (2471)..(2476): a, c, t, g, unknown or other
aaaatgtgggatagaaattttaaacaaccaaactcttgcatatcaaacgcaaccctcttcaactctgctcccaaataagacttcatcagacattttctcttctcctaacatttgaaaaaaaaaacataagattttatgatttttcaaataaaaaaataaatataaatatgttcaccttatctcctgcattcttagtagaagtgatcatttcaactgctccaacactatcaacggacttctcatcactagtagacttcactcaacgcttaatcgtgcgtgttgatgacttttacattaagtatattataaatattaacaaaagatgctgtgaacataaggagttaatatacatatatacaattttttctgattaaaccattaactttttcacttactgtatttcccatctcacgttcaagaaaagtttgaccaaactgagtggtcttttgaaacactgcattgtcaaaggttaatcgttttccacgcacacaaccactcttcactgtaggaccccatacacttgtggaagtcttaccattgacacttttaaaaaaatcaactgcaggtgaaggtgttggtaaattcgattcaacagcctcaatagttgacttctcaccaacatactattgattgaaatgatcttgtttcttcacattttcattaatgagtataccagattctttttaaactctaaattctctgctcttcttcttatctagctcatttgaactctcatccatactcccaagataacattttaaaatatttgattgaaattgttttcgatcctcatcacgccttttaccctcctcagatagggtatgcatattagatcgtattgtacagacactttctttcaactcatcgtaggatgttcccaacatttgtaaagttttcaatatgttatccaaagttacagcttccatactataaataattcaaatatgataagttcaatggaaattgaaataatctttgagtatggaaaaatgacagggagcctaacatatagaacctgtttagtccggcgttggcttcggtggtttcggtagtgtcagttgtggtggcagcagaaatagatgaagcttttggttttatttttagaaatactattttttttttgaataatttgaatattatttgaataatttttgttgaaaataatttgaatagagagtgaagttgaaataattttgttggaaacaatttaaatagggagttggtagaaataatttaaaaaaaaatcagatcatgatgccttgaatataggagaatttaaaacaaaactaacatattcaattttgaaaaaggtaaaattagatcatgcttagattataggagaattaaaaataaataataaaaatcctatgtgtgatacctcatgataattaaataaactacaccaaattattacctttagattaaaaatcatgggttgaaaaaatactctcatgagtgagagcaaatgtgatgctctcacctaagaattttcttatatatatatatatactcttgttcatgaatttattattaaaattattcgtggtaaaatatattttgattgagaaagaataaattcatatcgtcacgtgtgagattacattactgctttgaatctttggattgcaattaacacatctatatatgaatatatatggatgaatgaagaaatatatatatgtgtacgtgagtcgatatatatatatatatatgtgagtcggtgtatttttatatatatatatatgagtgcgttatacatatctaatatataataagaggcttaatggcctcctgcttctttgacctttataacctctgtttcatttattttatgaggacatagttgtatttttaatataattttatttgttttcttattattatatattcatctaaaactagagatttgactctatcaatttaagtcgtgtcagtcatctacaacctttcactctttttaccttccaccgcatatattgtgatcctcttatttagaacaacatggctagctttttttttttttttttctctctttcttctaactttgcttaaggtcttcaaggatagctcatgtcgatgttgaagtttaacacaagaattatgaaggctcaaaggctagggagcacattatctttggctaattcatgctattaaaagccgaaataaaaatgatgtagttttgctctagcattatcacaaaaattatgttgatgagtcgcttgatccctaatattagctcatatatttactacaaccaatatggtgtagaaggcctctccaattatcaaagagaacttttaagtttctttaattacttgatgatgaatttaatattattttagacagaggcaagcggaagaaaatctatatgggaaaaagttaataagccaattaagcttctacactttgattgaataatattaaaatattattatattattagtgtaaagactgttaggttttatgccctnnnnnnaactccatttcaatgtaatctatttt

SEQ ID NO: 70119 - DNA, 2688 bp, Cannabis sativa
tttttaaaaaaaaaaaaagaactttattaaaacacacaactacaccatggagggcaagtttgctttaacatgagcaaacacacaactaggcaaatcctcaaaccaaacttggttacaaccaaacataaaagccaacttaaccaaacaatgagcaacacaattacactttttttagcatgaataacaatttggcacatcttaaaactctcggaatgaagaaggtccagcaagaaaacactccagttagtgtcgttggggcttgggtgctgcagaaaatagaccaccaacagacaatcggattacagaatacatggggagagttgcagcttgaaggcaaggtgaagacctatttggacatcaagactttccgccaactccactaaaaaatgtcttcccgtttctacaattccaaagccacaacaatccccaagaatatgaacactagcattacaattgatacaaaacatccctcccggaagagatttccaaccaaaatgctcaacacctagttgcttattactgttaagatccttaattggtgaaggaagcagctcattaagctcaaaattggctcaatccaactagctctcacctgaagttgtgtaaatattgagtcattttttattatttctttgccatagcaggcagaaaataatcataaattgaagaaaatcaaaccttgacatacctgtgagcacatgaagaataaactccaaggggtctggatgatagttcggaaagtattgccaaagcaaaaagcgtttccacaacaataggacaaaattaaagggcatgggggataaactctaaatgggacttacaccaacaacaaataccatcaatctcatacctcggtgtacaagggcagaacctgtagggagccagcttttacaaactctccaagtaaagttcttgacttcgaaaggaacttccaacttccataacgtttactaccacaccagatgacggtcttgagaattgccaagagcttaatggacattagaactcacttcataaccacttttaaatgtataaaggccttgagatgtatagtgctcaaccaaattatccttatctgttgagatacaaagagctcaacccaaaactagaggaacatcatccttatgaaatatggtggtaatatgagattcttctaggaaccatccacatttttaagagtgcccgcaacttaacttggagtggctgtcgcagggaactgaagagagaaggtgatgggttagggaagccaatggtcttcgttgatccgcacttacctacccgattcaattcgccaattcgccaacgaatcccttttgcaatcaaggtctgccctaaagaatactatgccaaataaaggagcaggttcccctggcttgtcctctaaaaaagtgccattagtgaaatagtattcttttaaaacccgagctagcattgtgtgcgggttatgaataattttccaaccttgctttgcgagcaaagcttgattgaatttaatcagatctcgaaatcccattccaccctctattttggatttacacaacttattccactttccccaatgaattttccgcttattatctgaagacccccaccaaaatcgagccatcataaagggaatatcgtgaatcaattctcgaggcaaccgaaaacaactcataacatagcacggaatggcttgtatcacttctcgagccatccttggagtttattcctcactttttcccaaaatggaaccaaacacttcgtttttcctccaaccctcataagttggcattctagagtagtgggtatagcattcaacaagtgagacacccaaaactgaggcaaggcgttgtccttccatttgagaaacttttcagcccacacaaagatcagatatttgcaaatttattctctggcccgagagagaaaagtattcttcaaggatatgtttaatacctaggtaactaatcccaagcatgtgtcagagactttttggaagcattgatgatctctttgggttatgacacgagctgggtggataagattatgaaatgtgtttgctttgttactttttttttttttctttattttttattttgattaatggagtcagttgtgggaatatcattccgaagcgtgggttacgttaaggagaccctttcttcgtacttgtttcttctttgtttggaaggcctctcgtgtcttatcaagaggctgaacgggcagacttgattcacggaatttactttggttgcaatgggctcacattatctcatctcttctttgtagacaataattttgtgttccttaatgtgatgaccgaagaaggagagtattatatgcatcttaaaaacttataaatgtattatattttaataatttttattttatataaaatatataccattaattatattaaattttttaaaacaatatcttatttttaaacaatatatctatcagcaaaaataaattatatttaaaatattataacaaaaagttatgtgaaattttattagaaaaataaaaaaaatatatattattaaaaagaattataaaattaaaattaacataaaataatattacgaaaaaaatattaagaataaaaattattttaaaaggtttacttatcatgcaaatagaatttctccaaaattaattgtggtgcttgtttaatatttagccatatttagccatattgaacca

SEQ ID NO: 70120 - DNA, 2332 bp, Cannabis sativa
tcaattatactaccgagttctcaaaatgctagtgttagctagtccgtagggaagagcttgcggcgaacaaatcaaagaactcaatatgataaactaagtgatattatcttagaatagttataatgataagattatgataaatgttctattttttaatatcggccccatcccaatgtaaaccttatacatccaatgataaatttattttgcttaataccttgaaaaagacataacacttaccaaaagtgtaaataaaccttattgttgacttcatgtcagtgtaaatccagcgcattaataaactatgagactataaaatattctaagcatataatcataattattttctactgtaatgagatcactataattatgaataattacatattcttaatttaaatagtatttatatattaaatatataattacgtaaataaatatttaaagtacacgattgataaagtcaaaataaattttttgaataatattgattaaaaataatattaaattaaatttaagttttatttagggcataaatatccattccctataaatatttcatttttggttaaagtaaacaactcagctcctatagtctgtgtagatcccgccttgttaagaaggtagctgagaccaaattcttcctcatctctggagtgtgcatcacatcttttagaatcatagttcttccacaggtgaggtttaatttcacatttctagtaccagcaaatatagtggtgtgggagtcacccaacaacattttttgatcctcagcagcagcaacatatgttttaaatatagttctatcatagcatacatggcgagaagcgccagtatcttcccaccacccttcagatccacaaatgagattgatctttgaaatcatagttgtaaatggtagctcttctgtcaggttagcctacagtgcagaactaggcatgttcttacactttcgtgccatatgacctagcttgttacagttgtaacacgtgaacaaaccagaatcatttttattaggggtacttgttgcctattgtttttggttcctttgatggttccaattctgattgttattattattctgaggttgactgttgtggttcagctccgctttgcgattctgattcttaaagtttttcccattgggttttagaacaatagtgaatttagtgttgttgttgttgccaacaacaagcacctcttccttttggtcttgttttcgagcttcctcctcaattcaaagacgagtgatcagactttccaatgaaaactcttttattttgtgcctgagagtatttttaaaatctctccacgaagggggcaatttatcaatcataacaacaacttgaaattgttcatcaatagtcatacctttagacagaattttgtgagctattttttgaagctcgtgagactaagctttgactgatttatcatcgatcatttgaaacttcaagtagcggctcatagcgtatttctttgttcctacctccttagcattatattttttctgtaatgcttcccatattttcttggcaaatttatcaaaattataataatcatacaaatcatcaaacataccattcaaaataaaattcttacataaaaatcattctcaacccaggagtctctttccttaacctgtggttcgtacttctcgacttcatccttcttctcggcaggaggtagagtctaagacacaattgatttcaaaacagtcagcacaaattcaacttttttcatggtcgaaaaaataacatcttctgtctctaacgtctaaaatccaaaccctcaaaatgaaaaggcttgttaatgtaagtagtagaaccagaaaagtcatcggtagtagtcatagaagaatgaatgtcttaaaattgttgagtaaattgctagcccaaaataaaagatgaacgatattaccgaatgaaaattctgggttgagtcgcaaactaggtcgctctctttaagacgttcgcggtgctgcctaggaatgtacaagcagtcgaaaatttttggtcgtctccaggataaaacagcccagtcatactgtatcaaatccccactgcactgtagagaaccatcaaatacactctaaaatttatgatatcgcaggtggatttttgtagtgtaaattgtgtttgtttttcgatataaaaaagtgtattatttatatcaattcaatcgcattatatagattaatggattgaaataatataacgggaagaagaacgttttttaaatcgtggagagtagttggttgaacgtgtcccattaactgatacaactaagtaatcagtttcaattaaatatgtttctcaattaaattaaaaaa

SEQ ID NO: 70121 - DNA, 703 bp, Cannabis sativa
aaagctttggctgtttagcttatggctccactctcatttccaaaaggcacaaattcacaccaagaggtagatcctctatcttcattggctttccacatgacatgaaggcttatgtacttatggatattgagactaaacagattaacatctctagggatgttgtgttttatgaacatattttctctcttttttcctcaacatccccatctaaggtcaacaacttgttccctcacatagtgcttcccactgttaggccgatgcagcataataacacatctgtagccaccaattttttgccacaccagcatgaaaatctgtcacagttggttttgtttcaaaccagcaaactactacacctgatgcacctaatccaaatactacaacatcagtttccactgaggctacacaagttcctgttactgaatctcaagaccagcagctacctgcggcaccttcaaccactggctgcaccagtaaaaaaaccaacctatcgacaagattatatctgccacacaacatctaccactcatccaatcgaaccattcttatcttatatcaaattcaattcccaattttgagctgttgttttagcagcatactcacaaattgaactaaaaaaattatgctgaagcttccctattccagcactggctacaagctatggataataaaacccaagccttagaaaaaaaaaaaaaaaaaa

SEQ ID NO: 70122 - DNA, 2475 bp, Cannabis sativa
gaaaaagtatggggttgtagccctcctaaatgttttgttttaatgaataattatgtgaacaaaattatatatacaataattattaatttgtctccccaaaattaataattttacattttacctcccaatttacatattctccctcagccatctacttttaatatctcttctttcaatgttatttagattggataacacaattactttttcatttattgaaaaattattatttgttagtaaaagtaatggtactaatcaactatgaatacagtgataattataaataagatacatgacaataattttaaatataattaatataattacaaataaaaaataatgatataaataaaatattgtaataacaatatgtttgaatataataataactcaatttaaaagatgaaatatcttttattcataatagaaatagctaaataatttatacacacctgatatatatttgaaactaaatagttggtccatactatttttttttttttttttgaaaacaaaaaccagagttacagacaaacacaacaaggcaaatctgcttctaaaacagcagctgcacacaacggcatcgacgaagtccaaacctcagaggtcttgaacaaccgagcccaactagctaaacaattagccactttattacactgtctaggggaaaataaaaaagaaacaagattgaaattttccttggccttaatacaatccttcaccatgagaccccaatctgtaatggaatgattatccccatttagagcatgactaacagactggcagtccgacgagatgcagatattagagagagaccaacaatccgcaagcttcaatcccgatcgaatagctagagattctgccatattaaccgagagacaccctgggataaaaatagtttcagccaccacaacagctcccaaatggtctcgaataaccatccctaaaccacaacctggctgtcccacaactagagaagcatctgtgttgatcatgaaggtgcccgagggaggaggagaccagctaacaggagactttttcatagaaggaagaggaggagtagaatcggtttgaagctagaaatcaatcaagttcgaggcccattctatccacactctgttatcaaagtttttctgttgaaagatgcatttgttatttctacggtgccatattaaccaagtaacaccaagaaaaaggataaaagtctccttagaacaccgatccttcatgataaataggaaatcaggggctttactaatgttaggcaggaaaagatggagaaaaccgaagtgcttccaaagatcttgcgtcttaggacaataccagagagcatcacaaatgtcttcaacataaacattacactgatcacagtaaagatttaaggccatacctctcttagttagctcggttttgataggaatccagtggtggaaaagacgccaaataaaatttttcattttaggagttaacttattagaactctaaatgaaattccaccacttcttaaggatagacttgtctgaacattcagccacctgaagatgactaaaccgaagcttgtagccgctagccactgtatattgaccattcggagtgaagctccaaccaatgatatcttctcgctcccggtttgggtttattcccagcacccaagggatgtcttcatggtgaaaccagccagtaagttcatcacacttccaagacccatcatggtttagaagtgtatgaatagtaaccccctcgggaacattaacttttgatcgaagagcaaagggagcccctctaggaagccaaggatcttcattgattcttatggtaagcccattcccaatatgccaccggtatcctttgagaagaagctcacggccccacactataccacgccaaatatgagaaccatagtgacccactttcgcctcaagaaagttattattagggaagtaaagagctttcaaaaccttagccatgaggcaatcgggattggttaaaattttccaaccttgcttggccaaaagcgcttgattaaagctttctaattcccgaaagcccatgcctccttgttctttaagcttacacatcttctcccaactaccctaatgaattttatgtttttttgaagaagcgccccaccaaaagcgagcaatcatgctttcaatttcatgaaggatacccttagaaatccggaagcaactcattacataacacggcaaagcttggacaattgcctttattaaaatctcttttccagcttgagaaaaaagccccaccttccaaccttggagcttagcttccacacggtcacagatcttaccaaatacttctttcttgtttttccccacaaaggtaggcatgcccaaatatttggtgtgagtgttcacaagagaaactcctagattggtagccaaggcctccgccagctcagtcgaaatttttccccccacacaaaggtcagatttctccaagttaatactctgc

SEQ ID NO: 70123 - DNA, 1743 bp, Cannabis sativa
cattattatttctccatatgtttgtgtgattcttctacctacttattattattgcttattattatttatatgcaatattcttctcattaaagagtccaaagggatattaatttttctttatacatatacataaatttgattacaccaaacctttataaataaataaataaataaaaactcttttaattctttattttttttcaaaaaaaaattcaaaaaaaaaaaaaaaaaaaaaaagagatatataatatataatataattatgatgaacctatataaatatgtgctgtattgcacaaacatatcaattatggaattttattcatacatttcatttatctaaaattaatgatattgatcactttatatacactttgttacgtaacttcaattaattattattttatattactatatatacgtatgtacttttccactatgtattaccatacaacttaattattaattatcaatacatattaattccctcaaaaagtgggaaaaaagaatatctaggacacttttaagggaatgttttaataggttccacatttaataaaaaaaattagtctgattttttttttttgaataaaggagtttcattaaaaatttagtccaattttttttaattgtatatgttgtagttatttaaaattacatgtaaatttttataaatttttaaataatttataatatcaaaattaagatttaaatattttattacacgcacgactaatttttttatacacataataagtaactgtttaaactttaatattgtaatctaaaaatttacaaataatcttaaagatttataacatacgttatcatatttctgaatatcaaaatagataaacagctaccaaaataatccttcaaaagtctatacaaaaatttcttataatataaatagcttattagaagccaaatatataccaactcataattaattaataataattgtatcagaattattaaaatccagccatatccgaggtatatacactacctaaaaagttataatattaaaaataattaagaccctaccacaaaactcaaaattattattaatacaaagtattcagaattgatgagccgttggatttgcatgtagaaccaattgaaacccaatcaacggtcatgatcatctatcaatttatatatatggtggcccctaataccagcttttttcattgaagaaaactagtgtacttcttattaattaatattgtaacaaataaaaaataaataaaaattaagaacaacttaataaattagctaattatatatatgtatgtatagagagaaataaaagggtggagaagctaagctaatacagattattaactatttatgtatttagatgagcattaatgaagaaggttgggatcaactactcaaagatcaacctataaatatttatatatattatgatcaatattatcaagattaattattgatcatatatactcagttatgtaagttaatatatacattattttttttttttttcttgagtatctaactatatatctatagtaatatgggtcaacaatgcatatcatcatcatcatcatcaagatcaagatcaccatcaagagaagaaattatcataatggaaaagaagatgaaaaaatcatcatcatcatcatcattatcatcatcatataatattagtaataatatttcaagtagtgataataataataatggaagcttaattaggtgtttgtctatggtgaa

SEQ ID NO: 70124 - DNA, 2607 bp, Cannabis sativa
taaaaacttgatgatgatgatgataacaaaagttgttctggccataacatttctatatccattttcttcatagttaaatcctccaagttaggaaaagaaacctgcatgcaaatatattaattattgtaataattgaatatattaatctactcatgaattacatatcaacaaaaactgtattatataaattaatatattaatttattgattctaaatataaaattggtatattttgaaagcagaatttctttatacgatatgcatttattctattatctttacttgtccgtgttctatgtatttttttaaaaaaaaaaataaataaacagaaaaaagaaaaaagaaaaaaaaaaagtgtactgtttcactgaataaaggctttgaatgatctgactcctcagctgccctgtggttggagcaatagaattggaccaactttggtaaaatatataattgcaaggagcgtaattgcaaagaagagtgataatcatcaatgttatggccaacttcatcaccatcttctctcactacgatctcttctatcatctcacattcttgtactataatctcatcaagtagtttggccacactcaaagggaacaaattctttaatctaccacaacacctcacatccacctttctcaattgattgaaggagcctcttgggagtttattgccacgacatatgctttccaagcttcttaaatggacaagtgttattgactccaaacacggaaaggctacgtcggtcgaattattgatacattggaccccatcattattagaaaatctcaaatgctttaatctaggaaaaccttcattaaccaaagatggagaaacactgttgacagacattgatcctgttaatgacaaacattcggaccttctcatcaacgatatcagttcacgtgcagcttgttccaattgagagaggcttaggcccactaatgacaaatattcggaccttctcatcaaccacttgcttgaaaaagaagaatattcaactccaatacatatttggtatctctccaatttttcagaaaacaaaccctcaggcaaaacatgctcacgcggtacatataaatgtaaggctgtcaatcgttgcatactctttatctcaataagactcgcatttcttattccgccttcttcatcaataatcttatcccatccttcaaattcacgaggaagatagagctcttccatctgtgtcaaatttgaaatgacatttgccttaatgactcttaaatttctacatcctcgtagatctagcacttgcaaacgctgtaatgctcctatttcttttggcagtcgcataatgaaatcagacttggacagatcaagagcttttaaattctttaactcaccaatcactgctatgtcttccagagaagaaccacgcagacataatgtttggagattttgaagagaagcaaaagacgaaggtaatgatcctatccatgtacgattcataatcaaaactttaagcaggccagtttgcctaaaaaattcatctggaatagattcaaaagtagacccactggatagaagaagcaattctaaactaggacattccaattctggaggaagattatcaaaatggtcataatcaagaaaggaaattgctttagatgctttaagtctttcatcttcatacataagaatgttactcatcatcctatgcccatggtcttcttttccaatagttatgcaaacatctcgaatgacatcgtgcatcttcacttcattacttgtacttgtaccatccaacaacagacaatgagatttcaatttaacaaccaacgaattcaccctgtttcttgcatcttccattgtatagatgtcttgaagcaagcgccaacccatgctatatctgattaggtcttccacttgtatttcttcatcttccttatgtaaagcacaaagcaataacaatagtttggcctcctcctcgtgacttcctagaaaatcgtaactcaaccgaatactcttgtagactttgtcatgcattccctcaatccctgtaaagttggaactccttagtcgttgcaaggcatcctcccatatgaacaagctgtccatattgcatttcaaagcatgtgccactgtagcaatggcaatcggtaggcctccacattcatcaacgattttgagtgccagatcattgtaataagcattattttcaactttagtgtctccaatgattttcataaacaagttgatggcttcactcgactttaaagctccaatgaagaacacatcactctcagccatacccatggagttacgtaaaacatgcagatatctagaggttactagaatcttgcacccgtcatggattccaatttcttctagattgagttccttccaaatatcgtcgaggattaacaaaatcttgctttcatcttgttccaatcgcgttcgaagcagctctgctctcttgccaatgctttcgttttggctgaaatttgtcatatctagcatttcagcaatatgttgctgaatctcttttatgtttggtgcttgagaaatagtggtgataaccactttactgaacaactcctctgcctcagttagtctatggatttctttggcaagcatagtttt

SEQ ID NO: 70125 - DNA, 1328 bp, Cannabis sativa
atttagattatgacatcatatttatatttacatatctatagttatctccaaaaggttattttggtacaatattgttgtcatgtgttttgatatttagaaagaaatttattggtttttcttttatgatattatcacttctaaatttttaaaaaaatttaaattatttatagtttcgaaaataaaatttaaatattttgttgtactgttttttttatacatagtaaataattatttaaatattattttcattactataaattattacaatattaaagataatcttaaagaagtacaacatatatgattttatataaaaaaattaaaaaattgttatagataccaaaacaaataaaaaatctagtactttacattatttcaaataatatatgttatctcctctaaaatattggacaataggcaccatgtgtcttagcaatgctccaaaggatagaagtatataaggcaccatgccataaaaaaaaacatgttattgaaatattattttgataacgtcttacaaatttataataatttgataaagtcttcaatcaagggatctccatttgaattttatgctcatttcttgaaaaaaaaaatgcatatttggttgataaaattttataattaaataccattaaatgtctgaaaaaaatccaaaatgaaagcaaataatttaagaaataattgaaagagagtaaccaaaaactaacatatgtcctcatagcttgtattataggttgcctgtgataagtgtgtaaaatacatattgttaggtgtatttgagtaaataaatataaataaagtattcattgtaatttgttataatttaaatgcaaaattatttaagttgaaaaagttaatttaaatctacttttgtgtttcaatttcgatttaaagcaaaagatggtaataatgaaaatgtataatgaaatccaatcaaaagcccacgtcgccttcaatgatattgggccttcatttccaatgtggacacatgacccaactgcaaatccttttcaacaattcactttcccatgccaccccaaagttcactatttcattttcaagcacgtaacatgaagtaaaatgctagatttcttttctttcttttttttttttttttttgataagtaagaaaaatcttagattgattaaatgcatctaatggaccccacaattgtgagttatgtctcccattaagagatgcttcgcttgactcttgctccatccaattatgcagtgaagattttttccagttattattatttgtcatgattttctttttaatatgtacacaaccatgcaatcaaggtttcaccaaattaaaaaaa

SEQ ID NO: 70126 - DNA, 2188 bp, Cannabis sativa
ataataataccgtctgaatttcttgaacacccccaagggtttgaattgcacgagacatggaggaaggatatccaggataatggactgcaaacacttgagcatttggtagagacccagacactgtgccatctttgatgattcccattatgccacacacacacgctccctaagttatctggtttaacaaactcattttgaataacatttgtgatcaaagcatgtatattgacataaattaaagcaaatttgtacattcaaattatatgatgaatcatagtctgtaactaatcttaactatgaatatttaattgtatagttgcaatagtaacaatcattcactttgtatttaaagaactactcatctcaattgaaaaaattaaatatcattttaataagaaatcaaaccccgcttccatattgtttgttattttttctcatcaatgatagtgcataattttctttctttttcttggttggaatattgtgtctatcattactcaaattaaattgtgttaagaggcaaatgaattataaatgcgtacccttttataggttttggcctcaaaaccagtcttcttgcagctatttctcagaggaaattactcgaacagatggtgtgcaactgttcatgcatataatcagtcaaccaaatcagcatatacgaacaaaaacacaataataagaaaagacaaacaatcccaaggctcgcttcactacttcacttacctaactacgccatttttgagtgtaaatttgaactgtaactaacaaactggaagtaaagtcttgaagtttagaaacaatagaaacccattattaaactgggtgtttgcggtacggttggtgcgaattaggcgatttttgtaatttctcaaaccagatcttacaaaatcttaaaattgtaaaactacactataaaaataatttaaacactctataatacaattattatcaaacattataataaaaatttaaaaatcaatttaacaataaaaaaaaataatcttattaaattttaatatcatataatgtattacgtatatttaaaaatcatattatataaattagtaattttgtaatataaagtacgatgcattttgaaccataattattaaattcaaaattgcagattgtactgcatcgcgcagttagaaaaaaatgcaaaccgcaacataaaaaatttcaaactgtatttttcatacagtgtggtgcggtacggacaatatgtgtagtggagcgtgggtggtttgatgaatacccctaattaaacttataaatttctatacagaataattacataaggtacaaatttttgttaaaaaattatattgttacgtttaaattttttttttacatttttacgatttttcatagaaacaacacgaaaaacaacaagaaaattacataaaagtaacataaaaataaaatcaaaacaacaacaaaagaatagcatacaaataataaaaaacaaacaacaaattcacatgagtataacataaaaagaccgtattttctgtaaataaaattaaaaaaatcttaaaaatattcaaaattccgtaaaaccgtatttttataatttttttttattgtttttgtatatttgtgaaataatgccaataaaaaaagttggaaaattataatatttaggcccaagcccaaaatagccccatcattccgggcccattagtcctaccctaactctcttctcctttcattcacttgctttcgtctgaagctctcctctgttctctaaagcaccataactacttaccacgccggctctgttatccaccaggttttttttcttacaaagatatatatatatatatgtatacgcaaatattgaatgtatatatggttataaacatgtatagattacccatagtatacaatagaggattcacttattctttttagttcattcacttccttcactctattaaattgtattttgtgtgttttattctaatcacagctttcttttttggtcatagtcgactgagcttttttcacaatcacaggtacatatttcatcttctctctgtttctactttggtattatttatttatttattatacttattatgttctgtggcatttgataaatcgttttcctgctttggtacatttttgtcttcatttcaattatgcaattatgctttcttttccatgttgggatttttttttt

SEQ ID NO: 70127 - DNA, 877 bp, Cannabis sativa
  modified_base (721)..(743): a, c, t, g, unknown or other
  modified_base (796)..(814): a, c, t, g, unknown or other
tggaagcaatgaaatgattgtattaaatgaattgtaattacaagtgagtgagccttatatagctcaagctcaagtacatgattatagtaactgaaaatagttattggtctgaccaactagctgagctaaactagtgagcacaactaactaaaacaaacttcccttaccaactaactcttaatagtcatccctaatactggtatgaagaggagaattctccctgcatctctcttgggttgtagttcatttgggatgggatctagaggagggaggagacgtaaaatagtaattctatgtttaataattgagattttctctctgtgaaaagaaaaaaaaaacattttattaaaaggagaaccaaggaccactcgtactctcaccctatggatccttctactgaagacgaaaattgtgttgttaatgatgttgttgctacttttacttcggatactttaccctcacttactcctactacttatcaacaaacctaacgatagagttaggtggtcaatgattatgaattgcttatgctaaaagtttgttgattgggccaatattagacgttccaagcgcttactggccattttcagtcccttatggcaggctttttttttcttttggaattaattactactcaagtacgtgattcgtgtttgctagggtttttatggtaagcttatagttgataaaattggtaaaagtgttgggaatattttaccannnnnnnnnnnnnnnnnnnnnnntgttgaattaacatcctaaatatgcattctctaaaacaataaaataaacacannnnnnnnnnnnnnnnnnntacattggttgcaacggaatataaatactccttccgtttaagatctctagcccttgattcttt

SEQ ID NO: 70128 - DNA, 755 bp, Cannabis sativa
tatattattttataacaataataataataataatattaataatagaacttttcaaacatattatatacatacaataaataaacatataaaaaaattatagattataccatatatatactaaactttctttacatataacagtaagatatattaacttaaaataaatcaaataatataatttttccctaaactataaaaaaaatacacttataaaactaattattcttcccactaacaaattacataaattatttatttacctaattttgaaaataaaatacacatatttatatatatacacttaaatttctacaaatatataataaaacctaaaaatatatacataaattaatttatctattaatttattaatatattctttaaattctaaatatttaaataaataaattgattcaaaaaatatataataaaataattacataatcgaaaataatatataaataaataaataaacatgtaaataaatatatataaataaattattgtatatataccgtgtgagaatgagagagcatcgagacggagaggaacggaggcagttgggtcgctggtggtgagtggtggtggtttttgtcaagtgggagaaagagagaacgatagtttgagctagagagagaggggggggggaaggataacaacgagaacaagagagagaaagaaaggtttgggtggtgatgggtggttgtttttgtcaaatggaaaaaggggagagagagagagagagagagagagag

SEQ ID NO: 70129 - DNA, 1710 bp, Cannabis sativa
aatcggagtgatccaacatgaaatgaaccaaacaaaaaacccttgcaatagtggactaagaagactgtgatctgattgaacccctatattctctttgtgttatttatatttacagtacatctctgtgtccatagtttgaatactcgccacttagggtagagcaatcgcataatcttgtccatatttcaattataatattttaattggtgttttcaaaattcctccaacaatagggaggcaacagatgttaaagagataagtactgaccggttataccctttgagagggtatggtgaagtttggccagacctatggtgaattgtagaccatggccatccattctaaggtacggggctggctagacctatatttggcatgttcaggccgcctattgctcctccatggcctgtcagacttgtaaagaacagggtctagttgcccgtgacttcgcgattaactggtgttagttatgtttttatagggggtagatcacaaaaattgttggagttttggggattaaaatgtcaaaagtgattggtttcacttcttgaatttccattttgggtgtttccacccgctctcggtccttgttggttcaagattgacctctaggcaccttgctcccgttagggaggaaattttgtactctggccagccaggtgtgctctattgatggttggccagccattggttatataatggaggtgtttttgagccatagatacctggtcagccccccatgctactggttgccgagatctggccgttttatttccatttaacctttgaggaaaggtctgtcctccctttggcagaggaagatttgtaatagttcttgaggaactgggttgattagcgtgttgatagtccctccctaatctatcgatatgtcttccatgaagtggatgtctgagtagatcctggcctcttctatcgattctctagttgaaccgtcttattagaatgctagcctcttagtggtggcaatctaaatctgcctggtgagatcgaagaatgttctcctggttatccatccatatcaggaattcgcgtctctactgagcaaaaacatcgcaatcaacagtgcgtggttctttagttaggcctgcaaggtctacaacttctcttaggctagctaactcaagatattctcccaagtctagatggggctcgccaatcgcaggctcgccaactcttggggtggtctctctagcgtagagtcggagatgagatccaattgttattctagggggctttcggccctaggtccttcctttagcaggaggcgccaatggttgatcttctcttggaggcaagggcatgctatttagaaccactaagatgcttgtatcagtttggctagctgtagtggcccgacttgtggcgcccattgtggtgataggattcaccacatttgcagtgaacatggggattccagttgtgactagaacctcaatagctggatctgtagtctgtgggtcttgagggagacccaaagatgcaaatggtgcaacaggggttcttcttgtgttaaccatggcatttgatcagatacgatatccatgctctcaatgaaagaactaaaatgctgacctcaaaaaatgattaaccaacaacagggtcatttagatctgatgcttgccacgtatttgcacaagcaagaataaaaagtaagaaacatacagatttgttatagaggttcgaccccct

SEQ ID NO: 70130 - DNA, 5383 bp, Cannabis sativa
  modified_base (2536)..(2536): a, c, t, g, unknown or other
ataaaagataaaaagcgtaaaatttctccaaacaagagtagaactaaattaaaaatatacaaaacttaatctaaaattagtactaaaaataacctaaaagctttccactttctgttggcgccactaccgatctttccaacaggacaactgggatttcatcaaaaatggggacttctagagcctatctgagaggagtttaaatctctccttctccacaagtttttatcttttatctcgtttttttctccccttatcatcctcttcctgaattatttgtcttgccgacatcgctcttttctcacttagctcatcaaagaggccttcagagaatcaagcaactaaagtccgagcttcgcacaaccattgagaaacgtgaagttattgcgaggcaattgaatgactcccggattgaggttactcgattaatgaaggaagctgaaaaacataagaaaagccataagactaatcttgaaggtgctcaaaaagaggataaggatctccgtgaagctcatcaaaaaaatagtaaagagcttgatgaggtgaaccaaaagcttaatgaggccaacaagaaacttgaaggggtcgagcagaatgccatagctagagttaactcgatggctaaacggtctatctatgatgcctggatggccaatccaaacatggatctaagctttttgggagaaggagtcatggagatgctggcctttttttagcaaaccgagaaagacgaggttgcggatgccgaggaagaagaagaagaacttaccaagtctccaaccatgtagacttggttatttatatttttttttgaataatggccttttggccgagaccttggttgccctttatggctttttgtaaaaacttctgctttgttggatggccaacatagctaatttatatatatttttatgcctttatcctacttttttcgagttatatatgtttgtttattgtgttccaattcacaatctaaacattttttctctcgatatagcttaggacactctttgggttacatgcatttaaatgtcatcttctttgagttacacgagtagttaataatctaccacattttcacgagcagtttacaatctcacatgttatacgcgagcagtttataatcttctatgttatacgagagcattttataatctgctatgttatatgcgagctacttttgtgcaatttttagttattaaactaacacatttattttttagaatgtaagtagaaaactcacatttataagagtgctacaataaccaaatcttttactattatcccaaatctatcaaagaataaaataggatataactgtgctcacaaaaaaaatataaatctcaaagtcattactgatacgtctttaagtgcgtggaattttaaaaaatgttgccatgaatattttttcaaaatttcaccttagacaaggggtaaagtcggtatacagacgagataaaagacaagtgagggcactccaaggagccacagctcaaaaaattttgcttaacaaagatatctcgaatggcgtacatttgagactttgacaagtaggtagcctgctaaaattgagtacccaaaaagttaaggccaatgccgacaacttgctaagactagcaaaatgcaagctaccactggcaataattaatattatctttaaaatcccgtattataaagataataagtatcggaataaaataagtgccaaaaaatatattaaacttaagttcaaagtcgccaagatacggaataaaccaagttatatatgcttaaaaagttctaaagatgtgaaaagacttgtttgtcctaactataataagcactccacaacaagtagacatatacaaatccatacatgtaggtcttaacataaatgcacaaccaaaaagtgtataagaagaataagagaattcaactctattcacgacagtccttacttgccagccaacttgagcaagagatttaactctactcaaggaagagtttgagaaagggatataactctactcaaccctgatcaaaacttaagcaagagatttcaaaactctgtaaaagtttcaaattcaagaaagagatataactctactctgaattaaaaaacttaaacaaaaagttttaaaccttgcgaaagtcccaaaatcgagcaatagacataactctactcaactaccatatgatatgtgagagctaactcacctcacattctaaggagaagccatgtgatttaaaaactccacacatataattccaagaacattggtcgtgcccatgcacacctcttcacaaaaatgaagaacattggtcatgcccatgcacacctcttcacaacaattaaggacattggttgtgcccatgcacacatctctagaagagaagtaacattcatacactctacaaagaagtgctttccgtgaaagccttaggaaaagtgcaaaagcaatacatgaaggcttacaagcaaaaaattttgggagaaaatgtcatatcaaaattttataaaaaaataaaatggctactcttgcacaagggcccacangccaagagtaccttgaagacactcaactcaaccctgtgactttgaccaagacttataaatgaaaaataagttaagacatcctacttgaaggttccatggcacctctaggaactcaaaaacattgaccaactatttggtgccgagactcacacacccaagtgtgcctaaactaacatttatgggcccgcatgagcgttttcaccctatatacctcaatctgacaaggagaccaacaaggactttactcattaaggcataaaaatgcttagacttgaacatgaagtcaaaattgcacaagaatttcacgcaatatggcctatgcgaccactgccacatgaagatggcaatgctctcctttttttagagcactgtcagaagaagatggaagctctcgccactcaaaaaaaaatacaaaatgggacttattaaaatgtgttctctcaacacccaggagtgcaacacaagttaaagaaatcatttcccacaaaagatgaagcccaacagaccactgccatctttgtggtacaaagagtgatagtggtcgtccacattgaatggggaaaatattttttatcaataacatgtcaaaaccaagagagaaaagccaccaagtgaaatagaaaccacttggccgaccactgctacctttttggcaaaaatggtggtggtggtcgaccacaatataggatggggagtttttttggccaaagtgtatttctaacatccatatatcaaatacaagtgagaaaagtcacccaagagtccataaccctcctatgcgaccactggcatctttttggctaaaaagatggttgtgctctcttaaccaattcaccaagaaccaatgtggccaaagtagttttctagcatccatatgaaaataagcaagaaaatccttccaaggcttcccacaagctatggccgaccactgccatcttttggccccaaatgatggcaatggtctcccgttagggttttagacgttgagatgaggttttggggtcccaggatccccaaaatatgactcgccataaaaaaatgtcagaacacaccccgagggggtcgagaacatgcatggtcgagagctgccatttggtcgtgtcagtgcttgcatttggagcaaaataacacaaactgccttttagtaaaatgtggataactctcttaatttttatccaaatgaccttgttcaacttgcaatggaaagatatttttaagaaaaatctaagtgtctcatagtcatagctcaattctgaagttatcaagctcaaattttgcttacaagacaggctggtacattgtattcgagaattgagttgtgtaattaagtgtacgatgttggagagctatgccacagcccatgtagcatcatatgtgagaagtggcaccttaaaacacctatttccaatacttctatctaattttatgaattccaagccgacatgtgacatccaatgtcatcctctccaatttgatatatttctaactgagaacaaccattctctcaatgtttgtgggattttagcctaagaataagtgagatttttgtagatatttatttatttgtactttttacttattattgggaatgggatacatgatttgaaagtgagacatgctgacatatgggggatcgcaaacaaaccctaagcctatataaagatagtgatatgctggttagaggatgaatcgcttgcttactggatggctactaagaaaattacatcccttcatttgctcctccatactttgtcgacaccaagtctccattactcaaatgccattaacatacacagtttccaagaacagggaccattctcttttcttactcctattagtttattattcacaagagccttacaaccactacctatactaaatttcttaatattgaatctcccatgtgtcttgtgttcataagtctcgatacagatttcacctggaaatctatctttgtattattttcaaaacactcttgagaatataactctggtatatgtcggatccaattaataaaaacaaaagtagacgtagccccattactatcgcgacatgggagtgaactactataaatccctggtgtccattttatttattacgattttatttagccaaattaattcatcgcaatcctcttattttttacgatcttcttaaatcagttgacgaaaaactgcatcaacacaatcatatcactgtaacaccaatggccaaatcgtcgcattacactgttaccgggcataaaatataaaaataacataattaatatatattatatataatacatctagaactcaacaaaattaccagaattgagaaaatatttctcaaacaactatttttgacaataggccccattttcattaaagcatgcataatcaacgttaattaactatcaatcataaaaataccactaagttccatgtctaaatatgcggtcatcacacactctctccaagagatttgttggcgccaaccacttctacccacttctctcttcccttcttttctcccttttatctctctttgtcgccatcctctctcctcaagagagtggtgtgtgccaaccaattctacccctattttcttctcttttcttctctcttcccttattttctccactttctctctctttagagccatccactcccctagaagagtggttggcaccaaccactcttgtcctttcttccattctcttctctcctcttcctttttcttttccaatttttctcatattccctctccttgtcgccagatggttctcagtgccaaggaggctcaattcccttttctttatcttatcactcaatgagacataagaacacaattctcgtggcacaaaga

SEQ ID NO: 70131 - DNA, 1780 bp, Cannabis sativa
catggtcagatttgttctctctcttgctcttgatttctcttcgtctctctctctctttctctcgatttctcttcgtctgtgtgtgtgtgtttgtgtaggtaaatggtcttgaagcgcgtcgtgggttcgtgttcgaggcggagaaaggagttcaggccgccgtgctcgtggtggatctaagttctataatttttttttgttatgaaatttctattttgggtttattactttttgtatggaatttttgtattaagtttataattgtataatgataatatttattctgggtttattactttttttgtatgaaattttttgtactaagtttataattgtatgataatatttatttctgagtttattatttaaaatgtctttaatttaatattgtctaatgataatatttgataaaataatagctacacaattttattattgtttaatttttaatttaattaaattatatttaaaaaattgattcaaaaatataaaaaaaaatgatatttttaaataatatgaaattacattcgtcttggttataaaccgagatatatagtgcaaaaatgattgtacattcactagtgtcaatttagaaccgagaccaatgctcaaaagtctcggtttaaaactgagactgaaggatatactttttgtcactgtagaataagtgtcggttttactaactgacattaaaagtataggtgtcagtttaatactaacaccaaaagtacaatttgtagaagtgtggataagaaagctgatactattgtttatgttaaaaaaagaaagaggcttaagtaataaaggtatttaaatttttatgttctttctatttttgtttgttttcttatcatacttgttgtttatgttcttgtgttgtttattttctgatcaatgttttcaggatattgttccttatgttgattcttctattcaagtgcaggatgttcctcaacctgttagtgtgtccgaaaatttatatgattaggtatataactggtttccttgtttatttcttgttattttttagtgttaattcatgtttctttttttaaatacttttattttaatcttgtcatttttataactgttttataaccagttttaatcttgtctttgtcattgttaaaaggttgattctgataaggttgttaatgttccttcggtatgtagtgattctgaaaccggttctgaggttctagttgatgattctaagaaaccagaattcaaagaagaagaagaaggtgttatttttgacgaagttttttctcaatttctgaagatgggcaatattaagtggaacattgccttgcctcatcttgctttagtgagggaggttcatcaagagtgggaggattttgagaagtggtttttgattcgggaaaaagttgtatggtttggtttggaggagttcgttttaattactagagtaagtccggaagggtcttccaatttgaacgagtttaagcagaagatgtcgttcaagaagaagatatttcctgacttgactattaaagttattcaagagcaggttaggggaaggtttttgtctgaggattttgatgatgatgttgatgctgtcaagatggggattgtgtttctgttaagtcattatttgtatggatatgagaatgggaagagagtcgacaatgaattgtttgggttcgtggatggggattgtaacgcctcgatttcccgagacgtcacacttattagtccgtttaaaaccatttaagataaagacaataaaagacttcttaaatgaaaaataactaagcat

SEQ ID NO: 70132 - DNA, 933 bp, Cannabis sativa
aaaataatatttaccttataatattatgttttatttttatttagtatatatatgattttatatataagcataataataataataattgtattgtatggttgatatggacagatttttcacccaaacattgatgaagatgggacaatctacattgatatcttagaagaggagcaatggaacccaattcaaacaattgaaacaattctactctccatatgctctttgctaatggatccaaacccagttggctattacaatacaagttgctttctttaccaaaccgatttggaccaatacagacaccaagccagagaatggactagactttatgccatggatctcgacctcgaggatcctcatcatcttcatctccatctcgaatctcttcggctctaatacaaaccctagtttatctgaccatattatctatatgggaaaattcttagtcaaggctcaggatggtctgtcacttttgttcatatattagtatttttaatttctacataaattatagtaataatttatcggtttttgaaaatttttgtatagtttacaatctaaatatatatagagctaaaacaattatttcactcgtgcaataaattattttaaatcttgtttttgaaattataaattatttaaaaaaaattcaaaaacttataaaatactttctataactacaatatataacacattgtcatttaaaacataaaaaatattatactttttcgatactcactaaattttgatcatatggtgttttccattttttcatatgatatgatataataagagtttgttacatttttttagccttaacaaggccaaaatttcaatataatggtcaacatatatgtttaattatatggtatgattatttgaaaataataataataagaaaaagttgcattcctaaaatcaatatttaatacg

SEQ ID NO: 70133 - DNA, 2218 bp, Cannabis sativa
cgaaggaattgcttggataactgccttgagcaaaacttctttactagcttttgaaaagagcttttgattccaaacagaaagcttactactagatttttgaagaaggaaaagaaaggaagatttcttagagcgtagggacacccaaatatttatcaacaaaaggtttatcttctatgtggagagaatggaggaaagagtttttctcctgggacatagtgttttaagagaaaagaacagaagacttggccaagttgacaaattggccagtggctttattgtcaatgttgagaatatcattgatagcttcacaattttggatgttaagaagagtgaaatgtaggctatcattaacaaacaagagatgggaaattgaaggagccgagtgacatatagatataccctgaaatagataatcttgagttttggaacggattagggcagaaggacctttagcaactaggaggaacaggtaaggtgaaagagggttaccttgcctgattccacgagaaggaaagataagagaagaaagactattattaatgcagagtttgagagagactgtggaaatacaactacagataaggcaaatgaacttggtagggaaaccaagaagagaaagaatgtgattaatgaaaccccactcaactttatcaaaagctttctccatgtctagtttaagagctacccaactaacttttcaacttttcctataggtaacggcattaataatctcattggcaataataatattataaaaattgattctattgctaagaaatattgtgggaaatgaggatagagagaactgcctttagcgtattagctatggacttagcaacaactttgtaaatagtagaacaaagactgataggtctaaagtcccgaaccctggtagcattattatttttttttttgggataaggacaacaaaagtctcatttatgggagcaagattggccccattattaaagacatcaaggacatcatgaaaaagatctttacccacagtaggccaattcttctgatagaaaaaagggttaatgccatcaggaccaggggccttatcccctaaaagctgaaaaatagtagttttgacctcagagaaagtgaaagggttgaccaaaaaattgaactaataattatttatgcgcttagtaatacccctaagagccatgttgatagagcctaaatcagtgccattagaggtaaaaagatcagatagaactgaacaaaactattagtaatgtgagaatggttactaatagtagagttgccatcaagagtaagactattaatgatatcatttcttcttctagtagaggttttattatgaaaatatttggtgttcttgtcactagctttaagccaattaaccctagatttttgcctccaaaaaactttctccttaagaaagagagcactaagagaggtttggtaattattagcacttctaatatcatggctagagatgaaaggctgagagtaaatcctatcaatgatcgattgcatattattgattttatttttaaattcatttttgtccttagaccaacacttcatagcttgaatacaattatcctgcttacgaagaaaagaatcaagagtgggagtaacactactaataaccctattagatgacaaactttctttaatgagattaaaaaaaacccggttccatgagccaatgattttcaaagaaaaagctcttattatttttatgaatatgtggagtaggattgtaaacgagcttgagtgctctatgatcagagccatataaaggaaggtggaaaatgttagcagtaggaaaaatatcgtgccatgcctagttaacaatgccccagtccagacattcaagaagactaccatgcttccaagtgaaacagttaccaataaaatacagagaaaacaggttgtatttacaaataaaatgctaaaaattatggatagcgtgggcaggggcaagttgttactattacgatcattatagcctaaataatcattaaaatctcctaaaataagccaaggagaaaagggggcaacatcaaaaagacgatccaacaagatccaagagttagacttatcattgatataaggagatccataaaaatataaaagatgataataaacatgggagttaatagaaacagtacatatatattacataaatagtaagataaaatattaacattgccagcatcattctaaaaaattaataaac

SEQ ID NO: 70134 - DNA, 2402 bp, Cannabis sativa
aacagggacttagtcttttgattcatattatcacaatcacattccactgtattgacgatactgtaatagatggttttttcaaatgagatgggtctgctgttaggggatgtcatagctttgttgtttaaatttcttagggcagtttggtctcatgtgtcccacaaagataacactgcgacccatggattagctaaatatgccattaggctagacaatgagttatgctggtttgaagaggttccaacaatgattgttgaagtcttctcgagaatgtcctaatgtgattctaatcacgtttttctaaaataaaaacaaactatttatttaattgattgatacaataaaaataaataaaaatatgatttcaaaattcgtaaaatatttaaattataaatctttctaacttacaaaaatagtaatagtaataaaccacggtgcttggatgtggtttattaaaaatatgttgaagactacaaactaaaaaatttgatgtcatgtgaataaaaaacttacactatagttaaggcaaaaactacattttagctatgtaaattgaaaaaaaaattaagtcgttgttattagcgtatcacaattgtaattgctacaatactcaaaattattattatcatcgtatttcacttataaatcatttaaatttgctattattgtatctcacttataatcgatgctacattcaaaactgttgcatcaccaatattcaagactgaccaagtattatcaaaatcaatataaaaaaatctatttgaactaattatatataaaaatattataataaataagattttttacctcaaattataattattgtaccttcatcttctattaaataaaaagaatatataaaactcattaaaattatttattgaaacatatatattaataatcttgacgaagaaaaaaatatataaaaaatatatgaatgttccccgttaagaaaatatagtcatatatgattgtgtacaaacgaaaaaaaaattattagtaatttttttatgatgtattgtaatggactttgtcaaaataccaacaaatttagaataaaatatttagaaagtgaaaaataaatgatattgaacttaagtaacaatagtccttattggctaaaacatattattatataatagattaatattgttacttactgatcaaaattacaaaagtattttcttcatcatatttttctgtagttccatttaaaagatcatatttttctatcatcaagattggttatattagaagaaaattactcaagaataaaaatattaaataataaagtatggacaaaaataaatttgattaagaatatacggatccaaaaaaaaaaaaaaatcttgagttgcatataaaattgtgttgtatatttgaatatttctgtattaatatggtcaaggtagaaaaataaagaagaaacaaccgtaaattattaataaaaagtaaataaaaaattaacaaccaattgttagaaatttatgaagattggtaaatataggtatatatatagttgtatagttattatatatagtatataattttttaagaatgttagtataagttatgtcatcgcagattttcgttaacaaaattaaagtctatttcgtgatggtcttgcacagaaataatagtagtaaaaggaaaagaaataacacaacttttttattatgtgattttgtagttaaaaattatgcatagtccacaagtctatcttattagatttctgatacaacactagggctctttttcagtgtatcctgcccctatttatagtaacataggagggcagttaattacaatcaaattatttttccacaataataattccctgaaattgtgggatttgattatgtcccacgtaaattaaatgtagttattatttgaaaatcacacaattgtgatttatcctcttttatcaggtcaatgtagatttaaacacgctccaaagtgtatcttgcagagttacctcgctgggataacaacaattaccctaacagcaagctgaagctttttccatatcttttcgaggttgataatataaataccgccgttttagctattgaaaacataacgctccatctgacaatcgcagttcttggtgacaaggtgagcttcagcagtcaccatcattttaatgtcatcatctatctaagaaagccgactcgacggagtagtgaatctcattgaaagatgtttgaagcttattagtgaaggtaccatgagtatgtcttcctatagcgagatagattcctcgctattcgttgctcagattcatccaactgttatgcttagtttgtataatgtatattatacgctaagtgttttaatagtcatcatgtctcgtctatgtgctaagcacatcttataggcggagctccctaagaacttca

SEQ ID NO: 70135 - DNA, 1161 bp, Cannabis sativa
aaagttcagggggcataatttggtacatgtcaaagtttagggggcaaaaatcctaatcatgtaaaaaactcaaacatacgtgaacaccatgcaattaattagcatgtcacatgacatgacaacatgattaggacacaattgtcaagataaacaaaaattgttttgaaaaaatgtgaaacctatgaatattaaatcgtgttatcatgtcaacacagttatattacgacacgacacgattatggtacatgaatacgacagacactaccaaaaatatcacctttagtaataactttttagtcaataaatatggattttttgtaattaaatattacttttaagattcgtttagtaccctgtattacatcacattatattgtataatattatattaaattatattttgtgtgatatttttatgaaaaattatatatgtggtattaacttttatggatacctaaatatatagtatcatagtataaattaaaaattaacataatatgatataaaaaaaaaattgatatataactcaattcaatataatataatacaatacaacctaatagggtgtaccaaacaagtccttagtcataacaaaaattaattgtctctaataagtaatattgatacaagttgtcatgtttagttttgtggctaaacacacgtttagtgacagataaattgtgatttttttgtaaataatacttttagaaacatgctttatagtgatattatttgaatgatactttatgtttaattataatttttttttttcacttttagttacaagttttattataactaaaaatttttaaaaaaatataataacaattattaaacatgtcaaaaactcaaacacaaatataatacaattattaaacatatcaccctaagatttagattagagttttaatacatatgaaattgaaaattattaataataatactaattagggtaatttgcggccaaactccttatacttttatgttttttaccgtgtaacccccttgctcgaaaaattatggctatactccctggactcgacaatcgttttgctctgtagtatttccatctattttggtttgttaagtgccaaagtagactgccatggtgtacacaagtgtacacatgacaaattttcattagttcatctcatattaata

SEQ ID NO: 70136 - DNA, 3070 bp, Cannabis sativa
  modified_base (30)..(32): a, c, t, g, unknown or other
  modified_base (1173)..(1197): a, c, t, g, unknown or other
aatccaacatacatgatagtaaatagatcnnngtaaaataatttccaacatgaagtccacgtgcactaaaggtcctacacagacttgcgggcaaatgttatcctaatttttgcaccaggatgtggcacttgactggatgacacgtgtcttatatttctcaatctaggcaaatggttttactcctagtagcccataaaaattgatatatgaagatccaagtcatacagacatagtaggatgtccgagcagagtcattggtggacatccaactagctcaattgtgtgaaaaacttgcatgtaccagccatgggatgtgagttggcaatttcaaaagtgatcatactatctccaaacttgcatgtcacgaagcaatccctacttttgtgggattaatttttacattcagagaataaaagcaatcagcctagattttctgattttctcattggaaacatgttcatttcctattttatttcttatagattaagggaaaccattactatgtaattagctcctatatatagtggtctcatttcgctatttagagggacaaaattaattagagagaacactcaagagtggaatcatgatctaagagaaaattactcagagatctttgtaagagctttcaagaaggaatacttcattctttatctcacaagttaatgcaacaaaaaatgggagtaggctattaccactattacggggccgaacctctataaattctggtatttttttacttattatcttttcttttaattatttatttaatcttatcattttaattaagactcactgtcgttggctaaaagtgaggtcaacactcagaatatgttatattttaccctatcagtagactttttgtactaacaagaaccctaatgggtctgggttaacccgatttatcaacaacttgcctataaatatggcatgaaccccatgcaaatggttagaatttctagtgtccaaaaactagaaatacagtgtaaaacatcatagccaagagcttaacagtgacacatggactaaggcttgttaatgtcccaaccacgtaagaattagtgtcttagtttcttcttaatcataccttttttagtttaaccataatttttttgtgactaaatgtgacttttaattagtcacaaaaaaatattacttgtgactaaaatatannnnnnnnnnnnnnnnnnnnnnnnnttagttttagtcataacaagtattgtgactaaaatacatttagttacaataaattgtaatttttgtgactaagacctttagtcacactgacttttaatttagtcacaacatagaaataataatttataattatagtcacaattattttacttttagttacaagttttattgtgactaaaagtaagattttttgttgtgtaacaatctttatcaattgttttatttagggctaatctaatctaattcatatttatcaattgttagtaatattagactaggccatatattgttatgaaattattcattaatttttttaaaagtctaaaaaagaataattttttttttcttttgctttcttgcaatggatgatgtttgttaagactataaacatatgaatatatatagaaaagaaataaagtcaacatgtgtacataagttggtctctccaccaccattgaaaaataacatatatatctttattacgtggtgtgaacaacacaattacaccatggatgaagtgtgtacgtactatactcgattaatcaagtgctgtttggcagtcaaaatagggcaataaacatcatggtaagcaaatatatataaaatccacaactaccacaaccacatgcatacatatatatatatatatatatatacatatatgaatgaacatgatgattatctcatcatcacatcacatatccatcgatctctttctttgatcttaaacttttttcattattactatacgatgatgatgatctctgccgccgtctctccccctgtcttcttcacacgaataaatatataattgcgcatgcccaccccactcccccaaataagagcaggtacgtttatatctagagagtaattatggtatatatatacttgcacaaatatgcactaaaattatacctagtaataatatagatctttcttaatatgcgactcgtcattttaacgtgttgttgactgataaatataatgtaatattattatttatataccatttcatttctcaatctcagtgcatgcgtatatagatgggttcttcgctcttcaatctagctctatcttcacggttgattagagatcgtatacaacttatatcaacatatgcatatatatatatgagtgtgcataaattgatccaatctaatgaaaatcgaccaatatagttataatcgatcactaaacattgaatatctaattgtgatcgaatcggtttggatgctatatatttttaaatatccagttggatcgtatcaaatggtggatgaggtgtccagaaattcaatacattcttatacaatcaaactaattaatattttcatttagtttgaattagtaattatattttatatatattattatacgtaaaatttatttatatatttgaaaattaacattaaaattttactttctttttctttaattggatagatccagtccaatttaatacattggatctaaaatattggatggattatccgattcgatccaaaaaataatatgtttaaaatattgggtaaacctaaattaaattaataaatatatataaattaaatacattcaatgataaaactgatccaatccaacattcaatggatgttgaattaattggatgactgaaattaattagatcggatcaaatggtaaaatttaacattcaatatataattagatcagatctggatagtagtccaataaataccctcttatatatgagtattggatatgatattagaaggagtccaatccgtagtatattaaatggatctcagagtacattagatgggtctttactattttttaatcttaattacccctagatcaaccccagtcctcaaatcaaataactctcccatctaac

SEQ ID NO: 70137 - DNA, 1118 bp, Cannabis sativa
atattaaaataaaaaataatgtaacatgctatggttacatgaaaaagaagtttacgttttttgggtagaaaattaatggcttctctctctgttattgttattattattgttagcagtagtcatgtcaacgacgaagttgaacatgtcgtttggaaaagtacgtctgatgcttacttccatggcttctctctctctgtttcgatatttcctttttctgaagaaatgggaatgttgagacttgaaaattgaggagattgatttatatatggggcgagctcttgttagcgagaaattaggaattcagttaaggtgttgagaataatttctttttctttttaaaattatatatgcagaaactgaattacttgttgctcaagaaaaaagagattattatcgttagtttctttttcttttttccttaaattggggccaattcattctttcaagcaaataacaacacaaattgcaaaaaaaaaaaaaatcataaaatttatatattttttttcagtattttaattttcagttgtttccatttcattttggcagccacgaacagttgagcttgctacattttgagtgagactactccttttactaggggtgtgcatgggttgggttggccgagttgaggctattttagtgggccaagatcggcctattaaattctaacgcattacccaacccattattgatcgggttgggttgggttgggttacaaccttaattttttgcaattaaaattttccaattaaaaaaaattgagttgaataattaaataaatataaatttcaggcaaagttataaaaaattcaaacatcaaaaataaattattacagtcatccatattcaaaatattaaaattatccataaattctcacattcacctcaaccaacaatgtcatcctcagtactccttgcttttggtgataaagccttgactttaaatttaaatttattttctacaataataaaacataaaatcagtcaaatttttataaatatacaaacataacaaaacaaagagtctttgtcaaaccatattcactttttatcaataaaattaccttgttggggtggtagttggggtaggatttggattattcagttcacctatttgg

SEQ ID NO: 70138 - DNA, 1605 bp, Cannabis sativa
aaaaaaaaaaaaaaaagcatatcagagaattgctctccatttttcacacctgataaacatagtacctggcaacctgctgtttgctcatatctcacaaggaaattaaaaccactttcattcttcatttatggacctaaaaaggtcattctatatgcaaatgtcacttcctatatatatagggaaggacgttttatttgcacatcttaaaatagatttctattttatactagcccaagctttggactccaaagccaacttagctaaactatgagcgagaagattagtatctcgaaacaaaactcaacagaatcaaagttaaaattgaagctttttttagagttacaaaataatttaaaaataaggatttctcgtatttaaatttatagttacaggaggttgttttttctccggccttccctgggcataggcacggtttggtcgggattgtatttgctattgtgatttgatttttgctattgcgtttattcttatttatgtgacatagttttcagtgttttagttttgtcttagggacatgatttgagtgttttaatcttgtctgtataacattgtttaatttagttttattgttggttattctttcttcgatgactcgcaatgaaatcgttgttactaattaggaataacaagttttatgcgactgaaggagttaaatgaacctactgcaacaatttctattattttatcttttgaacagtagatggaattcaatataggtgttttaaagtttgtgatgatgtaatctttttaattttattttatttttaatttttttttatcaaataatttgagaattaagtagctgattatttgagtcattttttttattttaatcctaattgtgtctctaatggaaaaaaatattctgattagattgcagactattattttaattgattgctattaataaaattgtataattaaaaaaaaaattaaacaagaatcgatatttggcaacaaactcatttcaacactaaagtaaatctcacaaacctcccaaatacattaatattttgtcatacgaaaatgacatatttcaatgataataaaacaataagtatatatatgtacaaccaaaatatccacccaatatattatacaatacctttcaaactagatttagaaaaacgtgcataaattgattaagcatatatcattactcaaaagaaacaacaatactaatcatatggttacagtctccatgaactgtttatctactgacatggattcaagtgtctgagctcgaagacaaacctcaaagtcaatgcttccatgttcagacccaggaaaaacagtcaacttcccatcatacttgttccctggaccacttcgcacagtaactggtcttccccaaccaaaatcattctcataaacattaaaccgtggtgaactaccggtcaatagttcacaccctaactctttctttatttttatttcgtttgggctttctgcccaattctttaagtactcttgggccttcttcgaggtatgcgaaacgaccatcttattcatttccaatgcagcccagcccaatccattcttacccaaaagcttccctgctgtggtctccacattcccaaacat

SEQ ID NO: 70139 - DNA, 1551 bp, Cannabis sativa
ggacaatttttggaagtatggcttgtattctccagctccaagagttgtgagagtgccaactgtacatggggcttgcccttgaaatgggaaaccttctgtcttagatgatgatgaagtacctttgtctcgtattgcacgaaacttagagaagagagagaaggctctttgccggtgcctggcctgcggaggtccagtaggtgatacttctcgtcatatcaggcctagaggctaggtttcttggagacctacatgccctgtgcccgcatctgggggcaagggcaaggttgtagttgaggactctgatagtccctcttctaatgatgatggtatttgatagttcataacatcatgcttttactcttgtattgaatgtttatgattgctttctgacattgctactttatttttgcagatatgtcttccaggttgagaggttttataggaggatgtttagaaaagtgtaccggataggtgaggaccaaggtggccaggacttcccgtggtgaggatgttctcggacgatcactgcctccccttccaccaaggcctacaccagttggacagcctgtgataaggcttgtccatcaaggtactcaaaggcctaacagaggagtagggtcagttgcttgacagaaggctcttgaggtagccaactggcgcatagagagagctcttcctttcttggacgaggatctgagggagctaggtgatggtggacctgacagaccttactctgccagacttcaggacctttctcttgtaagttatactttcagctctgttcatcttctttgcactgtataggctggctgaccatgtggcttcttacatgtggctagctggccttagaagctctttgtggggggctggctagcaaaagtagtcccaaagggggactagccgaccagtgttgtggtttttgacactgaaattgttttgctttgttttcagaccctaatgaaactaagctcagctcgtgatggctcttgggaatcttcatatgctttttaggaatgtgtgaagaccttggaggcttcccttatggcaaaggaaaaagccaattctgagctagaagtcctcttggtagagcgacagaggatggtttcttgcctagagaccatgcttggctccaggaatgcagagaacactgccaaggctgccctcatctctaggctaaaaactaaacttgatgatcataagaagaagttgctggaagctcttgatggctagtaggccattagggttgagtatgttgacctatcctctgaacatacctatgagttccagttgcacaaccctcgtgctagactatcatacatgggcaatatggcttttgtggagagaatgttggcctatggaaaggcactattagagagccacatggagaaaaacaaggttgctacctatcgagaggctcattattaaggacaaacgacaaggagttggccgacccacctgttgagtaggtggtcggccaagacattgaccactaggccagccagcatgctaatgctggggtcggctaggactctgtggatattgatcttgtag

SEQ ID NO: 70140 - DNA, 2385 bp, Cannabis sativa
atatatataatgagggtacatttacagtttataattgttttctttaactattgttgattgagattttcagcaactaattaattagagatgttttaatgaatttaatgcaagtattttcacgtgatttgggcattgataagccttagtccacgtgtgactgctatttaatatagtagttttttgcagagggtgcacaccattttttccgacctcttcttcagaatatagttagggtatttatagcctcatgaagaaggctaaaatgtcactttgttgtaagtgtagaagaattacttgcacaagttcccaaatttagataatagggtatgcttgtttatctagtaggttacataggcttttcctaggtgtttggtaagataagcccttaacctttcttgattgatgcgatagttcattatgtagccgtcataaagatcatagggcagagtgtaattgccgaataatgtgtttaatacctctgacacatatttttagaacattagcatacgtgttccccatgctgcatttaatgcgtccacaatgacacaggtccaggggctagcgaccggacctgtgtattttatccagctcctcgaggtgggcataaacccctggacttagcaagatgcgactgaagctcctagaagggtttctcggacatgactattaagtctctgacagttatctcagtagttttgcaataattattcgtggtatttagaattttgtgccacatggcttactcctggctcgccacgtatgttaggagaataatggacaacatttatccccaaatcttgttttgcacctttgtaatatgagatttactatctgcttcaagaaatgatcccattggacctcttccagcatgtgcatgggtcatttatcgttcataatcttttttctcatttttagtgaaaataatttgattcccgcctatttgataaagaccttcattaatattactgttagacaatattgcaaccgccctttttaccatatttccctgctaggttgtcccaaccgttagatcaatggaatttcgatagtttgagccctgatcgtcggatggctgtcgatcaatattcaccttagaaggtctataaaagcccgtgtcttttccttctgagatttttacccactcatcatttttcacttccaaagttttatgtgaatcccttgattcggggcgatcaaccccaactatccatggcctatctagaggtataccccaaagttttaagcggtcaaggtagacccccgaaggatgtatctcagggcatctaatggtagccaccccgaccccatgaagtggtatcaagatttgaagggaaataaggggtaacccaaaatctcaaccaccaacacacaatacacggtcaacaattttttccaaggtacagacaatcttcacaaacatctttttctcaattttatgagaatcaaagcaataaaagagagggaaaatcaaaattcttcatgttcttaatgttcttccaaagctcaagaacactctcaaccaaaagtttcaaaattagtcattccttcactaaatttcatcaaaccagagccaaaaacacattacccatagcctatgctacataacccaatcgtcaaacactcacatgtcaatcaaaaacttaaaaattccaacgattcaatgccattttcgaccatggaaaaactaccaagaagaagcttcatcaaatttcaaattccaagcaagaaaattgcaagaggaagtgtagagaacttacccactatgaagatggaaacttcaaagcttccaaggattattataatgatacaagtaatttatttatttttatctttgtaaatatttagattattttttttgtaataattttttttccttgtaatttaattttatttgtaaaggaaaaaattatcattgggatatgttgtaaaaatatgaaaagtgagagaattattttttgggtttgaaatgcaattctagtataagcatggcattctcgacaccataccactaagtcatcaacaactaaattgaatcacaggctacacaaggaagtttctacagtatagtcataccgctaaaaacttggaggcaaatgtttactcaaatttttataatagtgatgtggaaaaaatgatgacatgtggcacgaggataccgagattgaattgataaataatgtgtaaagtcatgatttttggtcatgatcgttggaagagaagtctgacgatcatctttccccctagcttgagcaaggtgactacccatagggggacagtggactagccccctcataaataggataaacgatcaccacacacctgtgggagttaaaccaatttagggtgtaaatactactacccctacctcaaatgcaatgatctaca

SEQ ID NO: 70141 - DNA, 584 bp, Cannabis sativa
ctactccatcctctcagtatacacttcatcctacatcccaaattaagaaaaatatttcaagttcttaaaatgaaaagataaaatatatactttttaaataaagcattccaaacaaaaccaatgtttatcggtatggaggagatcttaattataccatttaggttctcgattaagccaaattaaccacattatagacataaaagtaatgacatgtgcataaataattaataaattttaaatatgagaagtgctaccgtcaacttcctattacaacctcttagtcaaactttatgcccaaaaatacatgtcagaatacttttttttttctttcgaaattttattcatgatgatattcgttatagttacaacatcactcctgtagatttttgaatagtttctagtgccgaaatatatatttgaagttttttaagtacgtgtggtgaattagaatatcaaaaactttattttttatactgtaaactatttagaaatttttaaaaatttaactataacgaatacttcaataaaaaaattttaaaaaaaaaatattacaacatgtgattcaaatataaaaattaactaaa

SEQ ID NO: 70142 - DNA, 2608 bp, Cannabis sativa
  modified_base (36)..(38): a, c, t, g, unknown or other
ttttcaaaatgtataaatttttaaaataattttttnnngcacattttttgtaattattttgtttttgttgtacattatagaaaaaagccctattttttattggtacactaaaagaacactatacacacaacgcacataatagagtagaaaagattttttatttcaataacaaatggaaagaagaaaaaaaactttcaaatctcaactcactattcactaacacaacttatataaatgcttcattacaaatcactcagtactacgttaattttagaaaagttaagatttaaaattattttttcttaatattagaagaaaaattggtagttgatagcttgattctcaagatcaaatacatctttcaaataccaatatcaaatcagccatcaggtattttgttaatttataatattgtatttcgttttgcatattttataattgatatttatttcttattatcattttcattctttttaaaatattatttttggtttaatatcttcttatataatattatcaataagaatttttagggaccccttgttaagggaagaagtgaattggtggatagttgatgttcaagaaaatatctttcactaccaagtaatttatatttctttatagtattatttttttttcattttttttcatttagactcattttttgttatcattctacgatatttttcttagtatttattttcaagaatcttttatattatattattgatgttctcatgttgagagactagaatatagagattggttgtaaaacttacaaaaatgtccctattatatattaatagtcgagaggaacaattattcatggcatattgttgtcagtgttaaattaaatgttatacatattctattagtattagtggggaaaataataaagatattcaagttcaaatgagttaaaagatatctcttattgtttaattaaaatctttaagtaatttaataacacataaaatataattcaatagaacataaaatactgcgtataaaataatgtaattttcattaaatacgaatcttgtgtataagcattataaacattatcattttttatattcacaagcattttattaatatttagttaaatttatctctatatattgatgtatcattctaattaacattttaaaaattaaaaatgattggcacaaatagttatggagaggtactatggttgaaaaagagatgcacaatcctctacaagaatgaatattgaaagttcaaaattaaaaaaaggtggagattaatcttgcagagcttccttcaaatcctgggctacgaactccaattttagaatatgatcttaatgttagagaccaaattcggagagcatacctacaaaaaagttcttatcaacccataattaaatttccaaacaaaatgatcgcaaatcaaagaagaaaatttcagcaatcctggtatgtcgactttcctacttggttggaatatagcatagaaaaggatgctctgttttgcttgtattgctatcttttttaaataaataatagagaccaatcaggtggtaagtgttttatcaaaaggggattttcatattagaaagaaaggtcaagagtgggaaaacatgtcggaggctctaatagtagccataataaagctcagaggagttgtgaagctttaatgaatcaaaagcaacatattgaaataataatatctaaatactcaagacaataatggaatatcgaacttgtttgaaatcataaattgattgtgttaaatatttgctacgacaagggcttgcatttcgtggacatgatgaatttgaggattcaaataatcgaggtaactttttagagcttttgcattttctgaatgatcacaatgatgacatcaaaattgttacattgaagaatgcccctagaaatttgaaattaacatcttttgacattcaaaaagatattgcttaagttgctgcttctaaaacagttaatgttattacgaaagatattggagataaatgtttttctgttcttgttgacgaatctcgtgatgtgtcaatgaatgagaaaatagttgttgtactacgctatgttgataaaaatggtctagtgattgaacgttttattggggtggaacatgttactagtactacgagtctttcacttaaagacacgattgacaaagtattttctagacatggattgagtttgtctagactacgagaacaaggatatgatgggactagtaatatgtaaggagagtttaatggtctcaaaactctaatattgaaggacaattcaagtactttttacattcattatttcattcgtcaactttaattaatccttgtagcagtagcaaaaaagcatagtaaaattgcatctttcttcaccttggttgctatgattgtgaatgttgtgagagcatctgcaaaacattgtgatacccttcaagataagcaagctaccttgattctcaaatcactccaaaatgataagactttacgtgggtgaggcttaaatcaacctatttctcttaaacgtgctagagatacacgatgtgtgacagtcagtagtctcgtgattcataaggggaaatgccgagtaagctgtgcaatcccacatcgcct

SEQ ID NO: 70143 - DNA, 2138 bp, Cannabis sativa
gttcattatttaattaataatcaaacacaatttgaattttgaagtcaactgcatgaattataataattattattaggtcttgtcaagtgtattcattttgttttttaagttcaaaaagagtgggcgtctggattattattattaggtcaaggtagtagctagtaataagaaaatgggtgtcacaagtatccattcttacagtcgtaagaaaccactatcgattatcccataggccatataaatacatatagttccacttatcaataaagatgatatatctatatatatatatgtatagggtgaccccattatgtatgtgaataattattatgatggttattatgtttgtaaaatctttgatggggtctattccatctgaacacttatagcgacgtgttatcatcatcatcatcatcatttgggagctagctattagtatatatatatatatattcacatttatatattacacattttagactgaatctctcaatatattattattattattattagtcaaagctcttaaaagaaacaccacatatatgtacatgattatatatataaatatatattcctagctatatatagccagaataaattaaagtactgatcatatatgatgatgactatagtgtcccttgaaaatctaagtgggatcaactatatatatatatatttatataaaaacacccaatacattttgagaaattcatacattttgttaagaaagcatatattataaattaatatatatgaggtttttgatcaagctaaattaattagtccccacaccatgattctatacacatactacatgcaaaatttaattagtcatatataacattatgaatatttttgttcaaactgatcttataaccacaaataaactagagaggcctatatatatatatgtaataagtaaaaatagtactgtagaagaaaattaagacacaaaatatatgtgaagcaaaaacaatttcattcatgggtgatgacccaagatttggaagtgggcctaaggttttctttgtccatatatatatcaatagttaaaattaatggaaggaaaaaagaggctatatatatatatagacatatcagatatgatatgataccatatagatgtcacagcactaattaattaataataatataaagaagaagaagaagatgatgatgatgatgatcgagataagaaatggcactatagttatggatctttgtaagcctatttacactgtactctgtaaattaacactttggtacttattgttctcaacccaaaagaataattaatagactgtagatgttgaaagtgcccattttatatatataatattatatattctttttactatagtgctatatatatatatttatatatataggattcctcttctaacgcccaagttgtcatcactatttatttatttttggtagtactgttattataaattatgtatataattaatcacctaaacaaaaaaccactatgcatgagagtttgacattgtgttcaaaaatcttttcttttcttttttggggtcaaatttttaatttcattttgtgtgatcttcaaaagttgaaactcaatcactcaattgaggaagctagcaaactcacaacaaaattaagcccatgagaggcaaaccctagattattagaaaaaactagcacgagttaatattctaatttaaaataataatctttatattagttaccttttctttgcttatttttttttcattatgattttttgttttattactttctctttcattatatttgtctctcataatactcactacaagatatatcacttttgttagcacatttttgtgctcgcaaaagttagtattgcgctagtaaaatagaatttacttgtgatgtgttggcaagagggggttggcaaatcaatgttgatattagaacttttaccagcataaaataaaaagcgttggcaaagatgactttttccagtacgtatttgcgctaataaaagttagattttagccactgcaaatatatattggtaaaactttgatctctttgctagcgtagtttgcgaaatgcgctagtaaaagtttcttttaccagcacaatagcgaatggtgctgataaaagtgacatttctt

SEQ ID NO: 70144 - DNA, 1407 bp, Cannabis sativa
ttgtacatttttggacaatactacactattatagatcgccatttcagtacggattatatgtccttccttcaaaattaattaagagggagaaacagagagccaatgccttttatatgttcaaataaaatcaaaatagttacagttaaatctcttattacgatctcttagtcaattttcgtacttaaaaatacttatcataatattttgtttcaattttcttataacggtgtttgttctgcttacaatattattcttatagatttttaaaaaatttcaaataatttgtatatagtatcgaaaatatatatgcagtttttttgaatatacagagtaaattaaaatatcatgaactatgttttcgatactgtaaattatttaaatttttttaaaaatttatgaaaaaaaattttaaaaaaaatattctaatataaaattttggacgtacaacttaattaaaaattataataagaataattaacagtcctcttatctaatacgggtctatggtcagttagttttaagtaattaaatgcatgtagtgagataagagggtgggtgtacgtgtcaggacatttttgtggctataagtaaaagaaatttaaatgaagaagaagatgatgatatatatatatatgtatatttataattatatatatgcatttaataccaaagtagtagtggaccagttattaaaaaaaaaatggaccagtttagtttttcaccaaaaaggcagaaccctttctattctcttatccaatgtaccctactatatagtctatgtactataataaatacatagataaaaaaatctcaacatatggccaaatattaaatcgatataggaatttggatgtgttagtaccaaccctatacatttttattttaatttaatataagcattgaatatacaaatactatttttgttttatatatttttagaaaagcaaaagccacgagcctagctaacttaattattaagtggtcaaataatgacactattgagctaccatgtgtgtcattcaaaatactatattcatttatttatttattattattattatttttgaataagtatattcatttatttatttatttatgatgaagaaagaaaaaatcttgccatgagttaaattgggtataggtaaaaaaaaaaaatcaatttaaaaaatatgtatattttttaaaagatatttttttatttgggttcctaaaatgagtgggacttaggcacggatttagcacacctatacctagggccaactttgataacactcttaatttttttttgtagaaattatacatatatggaaaaattataaaaattaacttttttatggcataaataaataatgctataagaggttttaagtttattttttacatttatatggggtttttttttttttt

SEQ ID NO: 70145 - DNA, 906 bp, Cannabis sativa
ctgtgtttgaagcataaagttctaaaatttgatagaaatataaagatgaaagaaaaataagccataactcactctcaaatcatgaattatctattacctatgacatttggcattcacccacatctaatgataatgaagacctagataatgttatgccacccttatggaagttgacttgcctttatcccttggtggcccgattgacccgaacatgtaatatgcgcatgattgagtgaatgacttgtataatcgaataaaatcaatatatgattcagtcacatgattcaaagtctcaattcacaacacttgtataggacaacgctatgaatttgagtttaaccatatgaattgccttaacaatttggttcaccggtggactctaaatgtgtcaggtaagttttttttccttttagtttagttgcacattagagacaactcgtttgataaatttggagttttcttactatataggtgtttattcttaatattagctgcatgtttagttattttttttttgtctatgtaattagtaggttgtgtgttcttatgagtcaattatcaattatgaggtcatgatactaagggtatatagcatgtttgaagaaaattgtgactttttgaatctaaatgattggtgagattgcattgtagtttaactttaatcctaaatgagaatgaaaattatagtgtactaggtcaattttttgcaattgagtgtagtttatgcatcttaaataaaaatgtgtaaattttagaacttgcttgctatttgaaacggaatcatgaatgatgcatgtttagaaatacgatatctagtttttttttttttttttaaacgattgagcatttcaacccaaccttattaagttgtatccttagttccttattttgagcctaacattaaaa

SEQ ID NO: 70146 - DNA, 5634 bp, Cannabis sativa
  modified_base (5557)..(5562): a, c, t, g, unknown or other
cccccaaatgagctgagagatttagactcctctaaattcttggtcatttacttaaagcccaatgtgtggcattaccgtactacttctttgtcccaaaggggggatcgaggtgcgtgttaaagttttagccaaactcctttctaggaggcgtaacttatgctaacatctagaccgtgccttttccttctatggtcacttagaagggaatctttccaaaacttgatggaggctaggtggaattcggtagtggtctcccaacttctgcgggggaaggcaatttttgcactgaaattcaagcaaaggcttcacatctgaaattgtaggtggaaaccaaagtgggtggcggacttcaagcggttcctccttccataagtttggaaagtaatcctttatcacgatagagaccacgtggtggaggtgtaggtatccgtggaactcttgttgaaccgtgtgggagaatttttgtttccttgagggaaagataaggctgcgccacaacttgaacaactattgcaggctgtggtgtgctttgatgtgcgagattcacgttgcattttatttggcagacttcagctattgcgaggaaaggctaaagttacagtaacatccaagtaatgacttcgctttcaaagactagagggtgcaacttcactgggcgcgtgaaagactccaagcactccttctcctttaggaaagagggttaaagatgtattaaacccccagtgatcttccacgcatgaaaaaccacgtgcatgcgagagccatgctgaatttaatgtggaagacttcagcttctatgaggaaaggctaaagttgcactaaaattcaagcaatgacttcgctttaaaagaccaaaggctgaaacatcaataggcgtgtaatagacttcaagcagtccttctcttctgggaattgttgaagacatactgaaccccattgatctttcacgcacgaaaagctacgtacatgctagagccatgttgaattttatgcagcagacttcggctcccatgagggaaggctaaagttgcactaaaattaaagcgatgatttttctttaaaagaccaatgggttaaacattcctggtcgtgtgacagacatcgagcagtccttctcttttgggaaggagggttgaagatgtatcgagcccccaattatctttcacgcacgaaaaaatacgtgcatgcaatagccatgttgaattttatgcagcagacttcggctcccgtgaaggaaggctgaagttgcactaaaattcaagtgatgacttttcttttaaaagatcaaagattgaaacatcactgggcgtgtgacagactttaagaagtccttctcttcagagatggagggttgaagaagtatcgaacccccagtgatctttcaagcccaaaaaacttcatgcacgcgagagccatgttgaattttatgtgggaaactttgacttccacgaaagaaggctaaagttgcactaaaattcaagcaatgaatttgctttaaaagacctaagggtgaaatatcactgcgcatgtcaaagactccaagaagtccttctcttctaggaaggagggttgaagacatatcaaacccccaatgatctttcacgcacaagaaaccacgtgcatgcgagagcaatgtcaaattttatgttgtagacttcgacttctgtgaggaaaggataaagttgcactaaaaatcaaacaatgagttcgctttaaaagataaaagggtgagacatcactaggcgtgtaacagacttcaaatagtccttctcttcagggaaggatggttgacgatgtaccgaacccccagtgatctttcacgcacaaaatactacatgcatgcaataaccgtattgaattttatgcagtagactttggctcctgcgagggaaggatgaagttgcactaaaatttaagcgatgactttgctccaaaagaccaaagggtaaaacatcacttgtcatgtgatagtctttaagaaatccttctttccgggaaggaaggttgaagatgaatcatacccccaattatctttaacgcacgaaaaactttgtgcacgcaagagccatgttgaatttaatgtggcagacttcagctctcgcgagggaaggtggaagtttcactaaaatttaagcaatgactacgccttagaaagatcaaagagtgaaacatcactaggcgtgtgacagacttcaagtagtccatctcttccgtgaaggtggtttgaatacgtatcggaccccaagtgatctttcacgcacaaaaaacttcatgcacatgagtcatgttgaattttttgtggcaaacttcggctcctacgagggaaggctaaggttgcaataaactccaagcgatgactttgctttaaagtctagatggtgtaacataaatgggcgtgtgatagaatctaagcagtccttctcttttaggaaggagggttgaagacgtatcgaaccgccagtgatctttcacgcacaaaacaccacattcatgtgagagccatgctgaattttatgtggcagactttggctttcgtgaaggaaggctcaagttgcactaaaattcaaaatatgactttgctttaaaagaccaaagggttaaacatcgttgggtgtgtgacagactccaagcagtccttatctttgaggaaggaggattgaagatgtattgaacccccactcatctttcacgcacaagaaaccatgtgcatggagagccatgctgaattttatgtggcagactttggctcctgcgaggaaaggctaaagttgcacaaaattcaagcaatgacttcgctttaaaagaccaaagggtgaaacatcagtgggtgtgtaatagacttcaagcagaccttctcttccaggaaggaaggttgaagaagtacagaacccccattgatctttcacacacaaaaacctacgtgcatgcaagaaccatgttgatttttatgcaacagacttcggcctcgcgagggaaggctaaagttgcactaaaattcaagagatgacttttcttttaaaaaccaaagtgtgaaacatcactggtcatgtgatagacttcaagaagtccttctcttccgggaaggagggttgaagatgtatcgaaccccaatgatctttcacaaccaaaaaactttgtgcacgcaagagccatgttaaatttcgtgtggcatacttcagttgcactaaaataaaagcgatgatttcacttttaaaagatcaaagagggaaacattactaggcgtgtgacagacttcaagaagtccttctctttaggaaggagggttgaaagcgtatcgaaccccaagtgatctttcacacacaaaaaactatgtacacgcgagagccgtgttatattttatgtggcagacttcggctcctatgagggaacgctgaagttgtactaaaatccaagagatgtctttgcttcaaaagactagagggtgcaacatcagtgggtgtgtgacaaaatccaagcagtccttctcttttgggaaggagggttgaagacgtatcgaccccctagtgatatttcacgcacgaaaaaccacatgcatgcgagagccatgttgaattttatgtggcgaacttcaacttttgcgatggaaggctaaagttgcactaaaattcaagagatgactttggtttaaaagactaaagtgtgaaacatcactggacatgtgaaagaatccaagtaatccttttcttctgggaaggagggttgaagacgtattgaaccctagcgttctttcacgcacaaaaaaaccacatgcatgcaagagccatgttgaattttatgtggtggacttttgctcctgtgagggaaggctaaagttgcactaaaatccaatagattactttactttaaaagactagagggtgtaacataaatgggcgtgtgacataatccaagcagtccttctctttttggaaggagggttgaaaacctatcgaacccctagtgatctttcacgcacaaaaatccacattaatgcgagagccatcttaaatgttatgtggtagactttggctttcgcaaaagaaggctaaagttgcactaggcgtgtgatagactccaactagtccctgtcttctgggaacgagggtttaagatgtattgaaaccacaatgatctttcacgcacgagaaaatacgtgcatgcaagagccatgttgaattttatgtggcaaactttgacttctgtgaggaaaggctaaatttgcactaaaattcaagcaatgacttcgctttaaaagacaaaagggtgaaacatcattgggcgtgtaatagacttcaagcagtccttctctttttggaagaatggctgacgacgtatcgagctcccagtgatctttcacgcacaaaaaactatgtgcatgcaagagccattttcaattttatgtaggagacttcggctcgtgcgagggaaggctgaagatgcactaaaattcaagcaatgactacgccttaaaagaccaaagggtgaaacatcactggtcatgtgacagacttcaaggagtccttctcttttgggaaggagggttgtagatgtatcgaacccccagtgatctttcactaacaaaatactctgtgcacgcgagagccatgtttaattttatgtggcacacttcagatcctattggggaaggccaaagttgcactaaaattaaagcgatgatttcacttttagaagatcaaagagggaaagattataatgcatgtgacagacttcaagcagtccttctcttcagggaaggagggttgaagatgtatcaaaccccaagtgatctttcacagacaaaaaactttatgcacgcgagagccatgttatattttatgtggtagacttcggctcacgcgagggaaggctaaagttgcactaaaatccaagcgatgacttttctttaaatgactagagggtgcaacatcagtgggcgtgtgacagaatccaaaaagtccttctcttttgggaaggagggttgaagacgtatcgactccccagtgatatttcgcacacaaaaaaccacatgcatgcgagagccatgtcgaatttaatgcagcagacttacgcttccgcgaaggaaggctaaagttgcactaaaattcaagcgattactttgctttcaaagaccaaagggtgatacataactgggcgtgtgatagactccaagcagttcttctcttacaggaaggagggttgaagacgtatcaaacaaccaatgatctataacactcgaaaaaccacgtgcgtgcgagagccatattgaattttatgtggtagacttctgcttgtatgaggaaagactaaagttccaattactttcaagcaatggcttcgctttaaaagacaaaatggtaaaatatcattgggcgtgtaaaagacttcaagcagcccttttcttctaggaaggatggttgaagacatactgaacccctagtgatctttcaggcaaaaagatatgtacatgcaagagccaagttgaattttatgctattgacttcggctcctgcgagggaaggctaaagttgccctaaattcaagcgatgacttcgctttnnnnnnccaaagggtgaaacatcactggtcgtgtgacagacttcaagcagtccatctctttcgggaaggagggttgaa

SEQ ID NO: 70147 - DNA, 1403 bp, Cannabis sativa
catcatcaatctccatatttaaatataattgtatcactactatctatcaagtttaattaggtaagatgttttctcaacttgtcttctttcaattcttcatttgtcctctaagcataattacaatgtttgacatgagttcttcattcctagactctatatcctgtattccgtgcttgtagaattgattaacacaaacaattcatcaaggcatataaaaaacctagtgagagtaaagaccaagttgccttttgctcatctattcaagcgttcttttttttcttttttgtagatctattcaaaagttaatattatagaattatacttatatgttacagctagttgccaatattcgtcatatacataccttgtcatctaacaagttgccaaaaaacttatcaataagacatttaaagatgagaaaaaaaaacacccaagtaaaatttaaaaagtaatggcccagaaacttagtgagaacggtttgctaaattaggttgggcaaagctatccacaagtaattctgagttctaagaacgaagttacaattctaaacgcatagtatagcaagtttctcgactctttatttattcatttatttttggagtgcatgcctaataattcaacattgaaaactataaaattgttggtctccacagaatcagaaattatcgggaatggaaataatacgaagtagaaccacaggacgcaaaccaaacaaaagaaaggccattaatctcttcaatgaacaaacaaaactctaagttttcactcaccctggatgagacacaacgcaagagcaacaaaattaagattaaaaaagcttttatttattattattttttttttcaatgagtgatctaacaatttaaaagaaaacaaccatatgagcagaagcaaactttaagattaagctaattccttcattaaaacattaatacaaacagaaggtaaaaaggtcacccttaaattataaagctcttacgaaaaataccataaacatgacttagatgacgcaataatcggaaccaaaccagaagtcatttcagattaagaaaaaatttcctgctaacataccattgtcaacgctagacattggaaagtttccttgcgaccaataaatggctaaactcagaaagtcatggttctcatttagtacacatgatgtcacaataatccagagatatttgaatagaaaattaaggtaatatatttaacatacaacatataaatttgacttaacatgaatgtgaaaaaaaaaaatcaatgtactacaacaaaccacaaaacgagtggtggtatgtatcactctgatggacatgagacacaaacacaattctcgcacttctttctaggcatccaaaaaaccttatataattagataattcttgcattctggaagattcaag

SEQ ID NO: 70148 - DNA, 1065 bp, Cannabis sativa
tgctcaaagtttgcttcccttcgaggagccttaataccttttgtgtgttgagtttttgcatgactactgggcatggtagaagtgtttcgtgcattgagagtttccccttgagtgctagttcccacatggccagttggctgacgaggtattcatcctgctagctctgaagctctccttagagaagctatttcacgaccagagcaataagcttccttgatttgctaggttaggttatcccttcgctactcctgctcaacacgctgattcttaacattcctctaattctccacgagctagttttgaaattgctcatgttgcttgttgagataatgatgatgtgacagtttagactactgctatgtcaataccgcgtgtgtaattaatttgaaaaaaataatttattttgttaatttagttttattaaagtttttttttaaattattaattgattttttgcttaatttctagcaaaatgcatattttttatttattttttaattttaaattacatagatgacgatgatgtggcaatgatataaaatctacgttattatttgtttaggaattatttttaacgggttgaaaaattctaggagcacaattatgtacaagtcatatttggggataaaaatcttaaatgatcaaaatataattaagattttgataaataaaaacaaattcatattattttttataataaaaaggagcataagttaataagaataaaaaaaattatactgtagtagcactacattcttcctttacaataaggatggttttatttttaacatttaaatatattctaactaatttctttttatctaattgtgtttgtatattttatgtacaactagttattttaaactctatttttagtattgaaaattattaaaatcaatttaaaaataaatgggaactataatatagattgttataccaaaaagaaaaaaatataagactttttttttcagttttaaccaaaaaaaataataatattacaaaaaaaaaaaatcaacatatatacaaccgaaataaattttttttacataaatacttcttacacac

SEQ ID NO: 70149 - DNA, 1543 bp, Cannabis sativa
  modified_base (34)..(35): a, c, t, g, unknown or other
  modified_base (1508)..(1509): a, c, t, g, unknown or other
ataattaatcataaacaactgctaatttccaaannaactaagcgggctttacattcatattgatgtttgggaaccttcttttcatgtttctatggatggttacaaatactacttaatccttgttggtgattttactaaatttgtatggatctttcctatgaaaaccaaagctgaagcaccatctctattcaatcaatttaatgcacttgttgagagacaattcaataccaaaatcaaaaccattcaaagtgaccttggtaaagaattttcccctctcaaaagtcatctgcttgctgttggttttatgattaggaattcatgtccccacacccaccaacaacaaggtagggttgagcaaaaacataggcatgttgtagatgtgggattaaccctccttgctcaagctgatatgccacttaagttttggtgggaagcatttgtttcggcatcatacctcataaatcggcttcccactcctatcaacaattacatatctccctttaaaaaactttttcaacaaaaaccagattacaatcttttaaaaaaatttggctgtgcatgtttttccttactaagaccctatcaatcccacaaagtgtcatttaagtcatctaaatgcctattcatagggtatagtatgtctcaaaaagggtacaaaatgtcttcatcctagtgggagaatatatgtggcaaggagtgttaaatttaatgaagaagaattctctactaatgattatcaagttcccatacataccatatctcacaatcccatacctgatactcataactccccaaattcccaacccacctcctcttccaacaacaacattagtttatcttctcctgaccaatattctggacatatatccccacctccacctcagccatttcctaatcacaataaccagtccactacagactctcatagtgatacttctcatgccacattacccctaccaacacataatcttcaccccatggtcactcgttccaaaatgggaattttcaaacccacgatttacttggcagatgtgcaaactgaaaaagaacctacctcagtaaaacaagctttggctaatcctaagtggaataaggctatgaacaatgaattctctgctttaaaaaggaaaaatacttgggtcttggttcccccaactccagacatggttattgtttctaacaaatggttattcagaataaaattaaatgcagatggctcggtcaataaactaaaagccagattagttgctcgaggtttttagcaaactcaaggtgtagatttctttgagacatacagcccagtggttaaaccatgtaccattcgaatagtctttacccttgctgctcaaattaattgggacatacaacaagtcgacatcaacaacgcttgcttgaatggtgaactcactgaagatgtttacatggagcagccccaaggtttcattgatgtcgaaaaaccagaccatgtttgcaagttaaacaaggccatatgtaacaccctaactagnntaggcgtattacgtgattttaaacatactgtgca

SEQ ID NO: 70150 - DNA, 1624 bp, Cannabis sativa
aacacgaaaaaaagactatggcaaaactacctaaaaaagggctggcaattttgtaaaaacgacatactatttttttgggtagtctgccaataaaaacggtagaccatttccctagaaatattctgtcgttttcgactgcagagaaacacaagtcttaattcgagctcaaaataatgctaaacttcaaactaagctccagatcacctaattacatcacaataaacataacccaagcaatagcagcagctagaacacaaaaaattgaataatgccatggttgagccaagtttgagttcttgaactcaaacttgctcaatcactaaactagctaccaaaaccagctcaaataaacttcaatgaactcaaaaataatccaagaaacgatcccctatcagttagggttcggacagaactaaatttcaaactttgcatggttgaactaaacttgaactatcataattaaaaaagaaatagtttttagacttacctttgatctccacccttaatttctgctggaaatcataagaaattgatgaagaataaccttcttttttgctggttcttttggccaaaggagaaagagactaagagaagagatgatttatggtttttaaattaacttgcaaaataaaacattaatcaataattgattaattttagtaaagcattattcaactcaagacacttagaaaaccctaagattccactaaagataaaattaaccacaaggataatttctaaaatttcccctcacttcccatttaagttaactcaagatttaagggtaaaatgatcaaacaccacaactttgtctaaacttgatatttaaaatatcacatatgattgtcccgctagataaaagattctaaaatatctcatgtgactatataacaaccattcgttgcatttttatcgttaccgaacaaaaattataaaaataataattttcacttatagcatatataatacacttagagtttagtaaaatctctgaaattaagaaactataaccctaatgcctattttttaaaaaatagggccaacaacatatataatcatgtataatcataaaatataaatacttaatggtaattaccttacaaatctatattctaagtatacagtcattacagtatgtaaaatgaaagatttaaaaaaattgagttaaaatagttaaaaatggtgaaatcgggggggtggggggtgaatggtggtagttggtgagggtttggggtttgggcgttttggctctagttttttgtaggaatgaagaagacaaagtgagctggaaggaagataaagtgaggggtttaacaccctatgccgacagttattaggaaataactgatggcatagggaccatggtacacgtgcgagaaaaaaagtgttcctatatcgtcggttatttcctaataacggccaacaccatggggtatttttatcttttatatttatttggttaaaaatcatagctatagaatttaggtacattttataactacaatttttataaaataatcgtttttaaatgtcaattttcaatgagcgggaatatttagacgttttagcttcctcttttttaaaaaaacaccttttaaagggttatttttgttggaaattattt

SEQ ID NO: 70151 - DNA, 1363 bp, Cannabis sativa
gaataagcaatgagcagtaattactgaatatagtaaggtagtgtttcccatgaaacagttatcttctcccatggaataaccctccgtaagaactcatttttgaacttatcacgtctggtcaagaaaggtgagtccttttttctactctccattgaaatcttctcattaatgagccattctttttgatcttgctctccgagccgagcatgagcatcacaattcctaatatcctccccaaccttttcttgcaaggtctttcctttagcaaaaccagccccatctttaacaggtgcaagtttatcctcactagcatttctgccatcaccttcagagctataagctcggaactgaatagactttaaacacggattcgacttcacatctaaatcagtatagcaactagcagacgcaacagttctagaataaaacgaatgtaagaaactccttctgcctaaactaccatgagaacatttatttcctaaaactgttctacatatcaaagattgagaagaaccccgttcaacagagtatgtcctcttaacgtatttcgatggcaacaacactccccatatctgatttctacactgtattctccttgcatacattgcagcttcttacacacaattcccacaacactgcagagcatgatttcatttcattagtccaagtccaacattgcattcaattattgcaaaaccaacaaaatgaccatataaacagcataaagcataacaaactatacactacaaaatgcatcaatacagcaaaagacttccacaacacaattacctttaccaatctgctctcaaactcaaatttctcaatccaaatacacaaaataacgatttaaaagctttaaaaggaagattatttcgtaataattttccaacttcgaaatttgcagtccagattggggaaaaaacgattaaaaaaactaataaaagaaaaagctttgaagagagagaaagaggtcggtcatacctagaggtgattggaagcttcgtcaagaagaagactggttcgcggccattaaagagagagagaagggtggagagagaagggtggagagagaagcgggagaggagggaagagcgagataagatacggcttgatgcagctttgtttagagtttaaactaaactcaacaacaccattatacattcccgaagctttacgtaggtttcaactcggaataaacaactccagcccatgggccctctccgcatttatatttgggttgggcccgttatttcttaagaattttcaaatattgaaaataagaaagtggggttatttgtgaccggtttttgcaactaacccctaatttaaaattttagtagtaaaactacctaaactactagtc

SEQ ID NO: 70152 - DNA, 710 bp, Cannabis sativa
tttttttttttttttaattatgaattgtgcattctttcataaatcataatagacaaacttccccgtgtgttcatgttagaaaaaaaaaatatacaataatatttatatgtataatgtgtaaaatatttcaacatttttgttatatatatattattacaataacccattattaatacatatatagtataacaacccacaataactcacaatatttcaacttttgttgtactatatatagtacaacaaaccataataacctataaaaaaaaaaccaatataattttaaaataaaaatcagtttaataatatgcttctaaattttaaataaacattaagaatataaaaacatattttggtcaaacttgcttttacggtaagtagtagtatatgatttggtggccagacattacaataaaattgggctttagagacagttttatgagcttttagcataaattttggcaaaatttgctactgacgttgttccaagcgacacggtaagggtaaaaacaatctacagcatagggaccttatagcgtcagttattatgaaataaccgaccccataggatccctatgcgctatgccgtcagttattgtataataaccgacgccgtaggattttttatgattttttttttcagctttataattttgtattttagtataatttttgtatatatatacttattttattattaatataattca

SEQ ID NO: 70153 - DNA, 1975 bp, Cannabis sativa
ttttgaatggaaatggatcattttattaaaaagatgaatcattcttaacaatctctactaactcagcaggtgagttgtagtcataaaaaacacgaactgacgagtaacaagagcttatcgcaaggaaatacgcagccttgttagcagaacgttttacaaaataaactttaacattattcaaagcagccaaaagctgttgacattcaaaaaccagtagtccaaaagcagaggggagggaagccaaactgtgtatagcttgaacagctactaaacagtcggattcaagagagaccttgtgccgtcctttacttttgatctagctaagggcctcttttatgccagcaacttcagcaacttcaggagcaactcggccaatctttccaaccgaaactacttctaaaagagaaccatcacttcttctagcaatgtaaccaaacccaaaagaatttgtagcttcaaaggttgctccgtccacattgaccttaatcgtatcatttgcaggtgtaatccaatgctcaacctcggcattatgttcattgaacataagcagaggatccattcttctttgatgagcaaaactccattgattaagggtagatcttgcagacaaaactacgtcagcagctagcatactctttttatcccaagccagcttgtttcttgcgttccaaatagcccacgtgatcatcaaaatctccttcagcaaactgccattttttcccagcaacttgtgcttcgaaccaggtgtcgaaagtggcatgcgtctcagtagaaatgttgatgcttgatctgatccaacaagaattagcaaaagaacaattcaccagcacgtgaataatagtctcagcagcaatattgcagaaggggcaaagattgtcgacaggaacatgcttgatttggagttggacttttgtagggagacagccagtgatagccttccagccgaagtgaaaaactttagaaggaacttgaattttccaaaaatctttccaaagatcagagttttgttggccattattttttgattgttgtaaaaatctataggcacttttgacagagtaagtacctgatttttccagcaaccaactccaacaatcctcacgactagcatgactaagaggggtgcccaaaattaaagctttatccctgacatcgaacagatcatctatgatctcagtgtcccagctaggttcaccaacacacataagactagctactttttggccaattaaagcagggtgtgttgagataaccttcgggttattcaaatcaggcagccatggatcagaagtgatgcttgtgtttaacccattccctatatgaataatagctccagctttaacaagatctttggtttcaaaaagactcttccaaataaagcttgggttacatcctagggaggcagagaaaaaagagtcttggggataatatcttgctttataaactcttgagactatagaaccttcattagtaatcaacctccatgcttgtttaccaagcatggctaagttatagtctcttaagtccctaaaacccaatcctccttcattcttgtgtttgctaagtctgttccaacttgcccaagtaactccttgattctgtttcgaagacttccaccagaatttactcataatactctccattgatttgcaagtttcaactggaagcaaaaaaactgacatagcaaagcttgggagagcttgagctattgattttaagagaatctctttaccagatttggacaggaagcggctttcccattgttgaactcgtttctgcattttgtctttcaagaaacccaagatggcttttttatttcgaccaaccaagcaagggagtcctaaataaaagttgttagcatcagcttcatggacattcagttgtagacagattctatccctagtagctctatctctattagagctaaaaaagactgaagacttagcaaaattaaccacttggcctgaagcaagtt

SEQ ID NO: 70154 - DNA, 1839 bp, Cannabis sativa
tatataaattaatctttttctccttattagtatcacttgggttgttctgtactgctcatgttagtatcactaaatggagcaggtattcatcagatgaagaataaagaaaagggttgttaggaaatatgaatgtaagagtctttggtacttgaaacagttgactcaactgactgtggtgaatgagaattagtgttggggctcactatgttgtttgatcaaaataattttttttttttgggaaaagcttcttgttttatctaagcagaaaattacagaccaaaagtgtaatctcaattatagtttgaagtgaatgtggatgtagctttgtcagaggtaaatcacatgtgtgtccatcgtgtgttgttggtgtgcactgttctcttttaagtttgttttgtgtttattctcttggtgtttgttgattttccattgtcttggagcaaaatttatttaagaaaaatcttataaattgtgtctttgaatttgggtgagaaatagtaattaatctttgcttccttgaattgattttattccttgaattggtaatgataactcaaatgaatttatttctccttatttatttttttttggatgaactacgctgctttttgatgatcccatctctctaattgtttttttttctttctatggttgcaggctagatgttcaatccattctctcagtgactgagaactgaaccaattaagatatttcaatatcttcttttgattatttggtttgctttcatttttttttcctgttttttaagtcaattgcaaattttattgcttatggaagatttgaagtttaattagaggttgaagtttattgatgtggaattccattatggaagatcttcagttttacaattataaattgtatatttcatatcacacttttttgtttttttaaaaaaatgttatatagttaatagtttatagtatattttttttttttaactatagtaattatctcatctttgtagggccaaaagaagaccaacattattattttgatcttcatagtgttgatgatatttattattgaggtgtcggggtaataatatgaaggagcttatggggcatcacaaatgtacaaagaaggaaagttcatattttaaaataccataattgtaaagtagaattggtaactgagctttaataattattttatttttttatttctactctattttcaaacttattattattattggattcttttggttgaattattcttgtatagaaacttgtcctagtcatctatttgaaatttatttttgtatcttcttgtttgtattctctacttgaaattgaaagaagtaaatggatatataatcaattcaagtatgaattttatttattgtaattgttattttgatttctgtaaaagtttatattttttttaaatgggtgacctatctcggcgggctaagtgtgtcaagattggtatttgaaagtggaaaaatgacagtcgagatgggtctattacgggaggcctagctcaccgacattagtcatatatatagaggggcttagccctccgtgattgacccttaatctatctcggcacacaaattaaaggcggctgtagcccgccgagattagtcaatcttgacgggcctagctcgccgagaaatgacattttttttgtagtgttgtagcagtagagtcccatgttgattacaaatctcgtatgctcctgatctgggacatgcatttttatctggttatatccagaatatccatccatatatgacataagctcgtgcctagtagttgcatccactaactggtcgatcctgggtagtgggaaacagtcttttgggcacgccttatt

SEQ ID NO: 70155 - DNA, 2336 bp, Cannabis sativa
ccctaaaccaataatgaaacaacagagtaaaaagacatcaaaaacagtttaaaacataacaatatgaatattatctctaacattgccaagtattagactttaccctttaacatatctgatcttacaacgatcaagatcatcggtggtgtatgtcagaaacatggtatcaagatgcttaaccagttcaggaacatctaccagaggcagcacatcccagactttcaagacttgaacataccgatatctttcgttctctatgtcaatcgaacaaattacatgaaaatccttaaccttgtattgtttcagacattgttttgattcaacacaagtaatgctaacactactcttaggcctccagccatttgctagcctcaaaagaaagttcatcactaaactcttcttctgtgcttacttgatttttacaaaagaattcacaaaactatcactaaagctaacctgaaaccataccccaataataataatctttaggacttatccaaaaactctgaaaatggaatgaaacaagaaaaattgacaataatttttaccttccattttgaattcctgaaaagaaaactgtcaggattgagcatttcattcaattcatcaagctctttcttgacttttacaacaaatttaccaagctcctcatgttcttcaacattaaagaaacattttcttgctttcgcatcccgaataatcgatttccatattgaacttgtacctctgcataatgttctttcatctcccaaaatccagagacaatctctgcattgatataaacatgaagcaattggaaataatcaccatattcaccatactcaatgaaaagaaataatgaactaagaataaccttttaccttgcacttgtaaatacactcttcactctctcaagattagaaagcaatccaattgaaccctcagaattggatcttacagtagatagcactatcacatcagccttttcaccttccaataactcaataatatcaatcactctaacaataaatccatcaaaattactgtatttctctccaagtttctctttgatttcaactacttgggcagtgtaagtagatactattgtcacattaagttgttgcctcaaacacttccattctgaataacagataaaatcaacaaaaatacataaaagggaaatcaatcaagcaagaaaaaaatgtatagaaaataagaaccatgcatgcatttatgaatgaaaaatctctatgcatgtagacaagagagtgatatacctttgtagagattgtgtacaattctaatcactaatgcaacctcaacaatgttcttccaaccatatttaacatcatccatttcttcttttcctgatgaaatgtttatcaatgaatatggcccaaaaagggacatccttgaatctttaaagttcatattattataccttgaagtttctaccaacttgtttatacattccccaacagcaactgcagcttccattctctcctttcttatctaaaaaaaatgttttagaactgtttgttctgaaaaatgatcagtattcaaaaataatatgttttgcttagctgaaaaaatatattgagtagtggaagaggtggagtagaggccaatggggaatacaaagagttcttatttctttaattttctttttcttttctttgagacaaagtacaagggagttaaagagagtagagtgcatacgtggagagttataataagtaagtgtagagctttttttttagtactgttattgggcagtagtggtgccaacactttccataggtggcgccctataattattagcgatattgcctaaaaattattttttttaaagttatatgagactcgattcttaattacaccaataacagtataacaacaaagagagtgctaggcaccagtagtgtcttttagcaattctctattttttaagtatgctaaaaatctccatgcaaaaatataatattttattatatctctctttaacatcatttgtgacaattttacttctaaaaatactccaatgatgtaacacttttcaaaaaatgctataattatgatctcacattattatttaatatatatcttattttttagcaacaataattttttagctttaatttttaattaaaaaataaatatcatcaatgctactgtatagtatccatacaaatttctaaaatgacatccatctctctacaaacttgtaatatccagattaaaatagtatttaaatttttttttctctacttgggatattaattgtgtgaggataattatcttatatatttgtgttgttagtgagttgagattattgcttagattattgtaccaatttt

SEQ ID NO: 70156 - DNA, 2053 bp, Cannabis sativa
ttggcagagtagggagtgcaggcagttgtgatccacgagcttgagaatgacctcctatgtagaggatttatagtgcccttctgtctcggaacgatcatgtgctcgtgaatgaacccttgtttgggatagatgatttgaatccagacacattgtcctaagtgccctactctgatcaaagtctcgatttcatccttcagataatcacatatattagtgatgttccctttttctcaatgatagtcacactttttgttttggtcccgcatatttctccctccgtgagacattttaggggctttctatagtggaccatattgtacgtttctgtatagacattccaccgtgtgtctactaagctggtatacacagtgtatttgggttcatattccttctttgacttcttcaaagaatcatttcaattgttgcctttacccccttttattttgtgtatggctcacatttgaatccaaagattttattttggctgttgggagccacactgcatccggtatgtgccactgtgtactcagagaaatgggtctgcataggtgcgagacgtgaagcagtgggtccgtaaatagttggcaaaaatcgagttacgggaagagttaaagttggggctaggaattggggaataaaactaggtgcattcgcaaaaggaaccagagctgaagggactccgaaagctttttactaagaatcttcaaggttaatgattccttgggattttgatataaattcaaataatgtttcaattctctttctttgcctttgtccccatagtaaggacccaacatttaatccaaactgaagaaccaccattctcatgtcatcaatgactttggttttggctgcagcttccaccatcctctagataaaaggcctttaggattttcatttactgctgcataatattggtgagagagccaacttccatgtccagatcgcatacggcaatgaactacttgtagaaggctgactgtaaatctttctagctatggatcgatctgggagctaggtgcttccactagtcttttgcagacttggtcaatgtcagggagaaacacaagcacttggcatcatctctcacacgtgccactttaatcatattgtcgtattttgccaagtgggtttgcaaatttgtcattccttcatataattcgatgtgtggcattttgaagttttctgggagcggggtctccatgatcctcctaacgcaaggttctgagtcctcatcttcagaatctaagagggccccacttttctttctgatgagcttggttagagcagctatctgctcctctaacctctttgcgtcactatctcgaagatcacgtcctcgcattttgtttttaaggtcaccttcatgttgcatcgctttttcacctttgtaattttcatacttggtgtccaatcattgacaaaggtctacggtggactagctatctctagagtgcaccttagtcatccctctgtcctggctgatagaatcactaaggcagtttttccatcccattgggcctaggcacttttttaccctgccctcttggcgcagttttgcctctgggagtagaaggttgtctaggctagaaagcattggtggccttttgtgtcgtagagggctggccgaccagattagcacacttttgacgatgtttaggagcagcctcttgtccgggttctcctaccttacctttccctttatcccaatggggattcgaggttctggcttcagttttctcaggagcacactcttcagccacaaattcaaccgaggttcctttatcagaatctgctaggtctccaatttgcttcgtaggtaaccatcatcttctccatttttccagtcagttttttcttatttagccaactttacatgagtagtcaataactctttggacactcaaagtaggtttaggtcatggtcataataataacaatccttgtaatacccatctttcacatactcctcgctgtcatcctcctctttcctaccttcagggcttggttcatcgtcgatgccatcgcgcaagtcatcaacattttctgctca

SEQ ID NO: 70157 - DNA, 3712 bp, Cannabis sativa
acacaaccaattatagaggttcgaacccttatttagtgggtaatgacttactcccatttttttttgtattggtttgagagataaaaccacatagactacaagcttctaccttgtaatttctggtatggctctatgaatgttacaatgttgagaatgatgtatgacaaattctgaacaagtgagaaacaaattaagtgtctagggctcacatgtgagagagagaatgagagtgttctagggttttttggaacttaaaacttagatccttttccatttagcctaatgctctttatatagtttagagcttacaaaagatctattttcaaataggttaatatcccttaaaaataggagatattactctttttaacatatatttaagctataaaaataactagttaaaaatcctaagagataggtagatatttttgggttgaaaccctatattcgtggtttgttggaatggtttcacagttgagaacaagttttgatccgtccagggtgagggctggagaaatatcaattgtttgggcttctttttatcactattcatatgtgcttgccagcacatagtgtcccttggatggccagggtgatgtccagccataccctctttgttggtcattttcctgtaactttgtcatgactgagtatttggatccctcattaatagatatgttatgcatggtgatttagcttatctagtgacacactgtattccatgtggtccttagccccttgcccacgtggacatgccacgtaatgtgggcaaaaattaggataacacttgcaacactatcaccagtgaacccacacaggttaaccatgcatggttttaaccttccctcttccaaacccattttccttaatgtttctttgtagataatataaatataactctcgttatcaacaacaactcttcttactctcttatgaacgagctgaaccgtaatcactaggggatctgtatacagaaactatacatttaatgcatcttcatcattaaagataatgggcagttcttcgggcttggctcattttaggagttttggagcaaaggttgattcttgatttttcacttcatttatatatcttttttgagctttattattgtttcttgcgaggtgtggccctccaaaaataattaagatgtcctcgccctcaactagggaaggttttaatccttggttgttctggttattaggcagctcatttccttaatttcctatatattgtctcaaatatctttgagaaatgagattttcaatcttatcttttaactggtggaattactcagtggtatatcctatatctcgatggaaacgataatagttgttggcgtttcacttatttcttacatgcctcattagatcaagtctccaaagtacaacctgattttcatttgtgagatagatgttttcatgagttttatttaattccgtatacatcgagtataatagaatatatttctcgtgcttcttttgctttttcttgtcctttgacaaatctcttgactcgtcttttctttttgcatttgagccattgtggttcgatttttctgctttggttgttatagtactcgttgttgctgtactagtgttgggtttgtcgctcgagctaaatttgagtaatttcattttgcttcgttcctcctccttacgcacgaagatttatgctctttcattaaattcattgatgtttctaacagggcgaccttgcaaaatcatcccatagtgtaccctcacggttgataagtcagttcttattccagcttgaagagctgtcaactatatgctatcatttagctttctaactttggctactgctgtactaaaaagactcatgtaagcctttaaagattctccttgttgctgtttgatattagtcagcgaggatgcctctggcttcctgtgccttgtagcctggaattgcttcttgaaatccttagatagttgttcccaggatgttgtagaatggttggtgaatttatcaaaccaactgcttgctgcttttgttagagaagttggaatcaaaatgcaacgcaagttgtttgaaacattacttgctcgcattatgttgttaaaattattcaggtgagccacagggttagttgtcccatcatactgtgtgacgtgctggtttttaaatccctaagggaattaggaattcaaaatatcaggatggaagggctctatctctttgtttgaattgtatcctgatagttacccatattctccgtcttggtattgcctgaacttgtcatttaattgtattacccttaactgaattagatccatgggttgttgcttaacttatagttctctactagatttctgatttaatcgatcacgaagatctagagcattttgactcaaatgctcgtgcatggctagttgtctatggtttagatgctcacataaatcaaggtgcacgccttccatttctttggtcataattgcttactgaccttgttcctaaataactttcagattgataactttaagagtcactgatattctcttgatcatctcggtaatatcgtcatgaaccctccccatcttgtgctcgcctttcacgtgtatgggttttagtcgatctactttacctgtgagtcattgaccttgatccactaggatctgtacttgaccctgtctcttgtggttcctttcgcccctgcttaggtaggtgtatgcgttgtctctgttgttgtgatttggcctttgcggtgtctaggtggtcgacctgatctaagacgaatccctacacttctcgcattgtgttgagaaaattcttgatttattcaaaataaaataaataagtacatggatttattcgtctcgctggtcccatcaattggtagttattactcgtatctcaccattgtctacatgatggtgagtttgagtatttttatcaattgtaattctcgagacgagtcatctaaatgcatttattgattcataatttgagttggttcatattactgctcaaaatattggtataacaatttgccttataattttgtagcttgaaaaaaaattacttacaataatgaggagaggtacttacgatcattgcaacatcagtggttaacaaaattaacacaatatttgtactagttagctttaagacttagactttaaattttagctaaatatttattttgtgttctaaattttattattcttagacttttaagtacttatcacgttgtaaattcttactttgtcaatataattaagctgtatttttattttaaattaagtatttattattataattaatttattcaacatataattatgtatgataattaaaattaaaaataatattcaacataaaataaataagtacaaagtgaaaaacaaaattgcaacctttggttatataataactgaagacataaattccccatatcttcggttatgatgtaataaccgaagatgtagggcctcccccattcaatttttgagaattagctccacttatgcctttgattatttggtaataatcgaagacataatttccttttacaatcttcggtatttttagaaattacgtctttgcttcaaacgatttgggtagcgaatatatttacaaactgaagatgaacaggaataataactgaaaaataataaagatcttagtgattgttgttgttgcccctgattttgcccaatgtacgtggaccaaccagacagggacacgtgga

SEQ ID NO: 70158 - DNA, 5021 bp, Cannabis sativa
aatgatctattgctttcaaggtgataaccaaatttaaaaatttccaaatggagcatatccccaaatgattgaatcagacttctaggtgtctaaaataagaatgaataggatatcattaaccacatcaagatggaaaaaatgttgaagtttatgcaaatcccaatgtccagaaggattcatatataaaaaaaaggaaagaaagaaacaatatttgaaggaggtgcaaaagaagttttgtaattgttgtgcttcatataggggatccaataatcttacaaagttctaacagagagactattaccaatgttatcccaaaatttgcacagggtgacttggcatttatctgagtgatacatgaggaacatttcatgacttggatgggcaatacgcaccaggatgtactgtctagaataatttatcatttgtaaacaattgattagaaggataacttggaatatccaaacagagtaaatggcaccgtcctaccaacgtcgatcttgtcgcaagcccacatacactggccaaggtaaatgcgggtggaatatcttcagagatatttttctcttttatttatcaattaaatccttattttcatggaatttatacatgcaaaaaaatatacaagtttcccatttatttcctagttattttggaaaactaacatgatgtaattttttttttataaatagtggagtcatttcactattgatggatccgaaaattattcattcaatagagtatttacgcagctaaaatctctataaaagctttcgacaaagatcaaaaacttcttgcttttttttttctcacaagttaatacaagtaaaattaccatttaccactatcatgtggtcgaactactataaccaattcgtgttcatattgctcaattattattttttattatttataatcactttaatggactcattgtcgttggctaaaagtgaggtcaaaaactaattttcacaattaatcctttgctcaagagttcccttccccaaataagactctgccaaacaaaggaggaagaatggcctttcctagcttcaagaaaaattgtatgagcaaagtacttagctttaaacaatttacccaataaagaattaggatttttatagattctcactgcttgtttagcaaaaatggcttgactaaaatgaataaaaaatgtaaatcctatccttctaaaatatttagagtgacataaatctgactatctcttcaattgaattttaaaacattcattaagataaccccaccaaaagttaggcaaaagagattcaatttttgaacaaatattaagaggaattttaaaacaagacctcgcattagaaggcagagattgaatgacaattttaagaagaatttatttcctagctctagagaaaaacttattgttatagaaatcaggataaggattgactttattaacaagaaattgaaattgctccttcttatttctacaataaattgagacaaatctatatatttactaacaaaaggtctatcatatagatttagattattaaagaaacaacatttcatatcataaggtgtattaggtgaaaacaaaattaaagattcaaaaaagttaacaagttgacctaatgccctatgatagatagaaagagcatctttaatagctaaacaagagtttctatcagcagtggtgaataaaagactatcatctgcaaataaaagatgaaatatagagggagttgtccttcaaattctaattctactaagctgagaagacatttcctaacaacatggtgtcttttcttgacaacatctttgtctcccaatcgaattacatactaaattatttattacaaaaataaataattactattttgctatttcaaaacatatttttctcaacatcattattttgtgtcatctgttgacattgaaaagtggccaatacctagctaaataaaagagatgaataatgaatgtacgtatataatttatagagacatgcaaaatttatagtagttaactgtcgtgatggtaatggagctacatatgctttgagtttgtattctcacgagattgaattataaaaaaatggataagtgtttaagctctaatttctatagagagaaactagagagattttctctaaccttgtgggtagtaatctgaatatgaaaaataaactaagggagctctccttttataggtgaaggacgtccttgaaaataagaaaaagtatgaaaaaaatttaaattggctaattttgatcatagatgatgatctaatggtcaaaattaacttttgaggttgatacttaatttttggagttcgggtcgagacggcaggactcgctctaggtaagtcggagcttatttttgtaactccattgggggtgaaaattggagtcgataacttaagaattgtgattgaaatttgagacatgacttgttagatcattgaattatcttaaaaatgcaagttgaattgcatcaatcagatcaatattgagtgagttatggtcattttactaaaggttattctgggcccagcccccgagttgacatcccatctcccaggttgacatatgacgtcaacctggatgttgggtaagtgaaataaatatccaggggatgcactttatgatgcctaagtgatactttgaatcacttagtatgtttctttgttctagcaaagttggtcaccagttctcgaagatattattgttttgtgaaaatgagagactcaaaactcttcacttccgagtgagttttccaatgtaaaaatgataaatgtgaagttatgaatttaacttttctgacttcatggatcttagtcagtaaaaaactagatagacggttgagacaaaatcgaatcgaataagcagaacccagagcaccagaacatttgtcaacctgggcgttgggtgctcattttagagcttctgggatatcattttgatacttccaaggttcaagaacctaaggacgaggtctcctaccccatttttgaccattttgaagagaatgctcatatcaaatttgacatttgaatgatcaaaactggagcaccaagctaattgtcaacctgggtgttaggctcagctttaaggccctcgagtttgtagttttctcctcgagtttgcttatatcttcgttatttcttatgacgaaaaacatgcctagaatactttttttgagaacttgattgaaaacagttttggccctctagaagttctgtttggtccctaaaaatagttgaatcttaatattttctaaaaatagagaacatgctcgtaagagttctcgaaaaacatcattaaaatcggcccaagttgacataatgtcaacttgggcattttgccttgcttctaatacccaagaacaactgtttcttccccaaagtacctatttccctatttttgatgaagatgaagataatgcaacagtcagatcgtcaatttgatacttggaagtcacccagacatcgggtgctttgggtgctcaaaaatgaactttttccaagtctaattatgatgcctcaaatattttcgtggtatgtctagtttatgtttcaatgcaaaatttgacccatttacactaagacgatctcgaaaatagataccctagttgaggatgtcaacttgggcgctaggtgaaaccctagtgcctaggttgacttttgaggtgttggttcgtgtatttttagctcccagggcctagacttggatgtttcatgttttcatggtacagaatactgaaagatggtgagttggaaacaacttggcaaaattaaaacacccattttggagttctcgaagtcaacttaggcccagggctagggacccctccaggtcaacttactatgattcaagactacttaactccaggatgttttccttcttgccaagtgtcaaacattgatgtccatgtcactaagactacttttggtgtaaattttttccccccaagtcaactttacacttgtgtgaggttgacttaatgatgtgaactgagcctgtttctctcgaaactactaggtgggcatcaattttgacaatcttggacaattatttctattcttcaagcattcccagtgaaagtaggatttcaaattctcattccctgttgaatagtagaattcaaaatttctagtataaaaggagaagaggaaagatgatcatcttttcttatcgcttatcttttcctttacaacttaaaatttaaatgaatgcttgagtgatttctttttatttgagataccgtgaaatcatgctaatattggaatgtcaacatttactctgacctttggctattgtcttagcattgactctcttgtcgtgctgtgtgtttatgtgaatatagatgtagtctttgtcttctctgagattttagccttgaagctctttagcattccctcgactgtgtttcaatgaaggtggtcttgttcatctcctagatttggtagtaggggaggccttcgtcaactccttaactttacagcgtaggaggccttcaacatcccatcagctttgtagccgaggaggccttcaacatcctatcggctttgcagcggaagaggccttcatcgtctcctcaactctacagtagaggagatctttgtcatctcctcgacttcacagtagaggaggtcttcatcatctctccaactttacagtagaggaggtattcaccatctcatgggctttacaacagtcttcttgacgactgtcaacgatgtgtgtagcagtcgctggctgttctttggtcaattgaggatgtgaccaactcctggattaatatacccaatataaggtgatgtctttctgataactctagaaattagagttattatatctcattttttaagctaaatcagtttagttcttgagtttttaattaattacataagcttttatttatttttgaatttattagctttattttaattttataggttttatgtatttttataaatattttgttataatttgttatgggttatttatttataatattatgttaattttctttctttttttt

SEQ ID NO: 70159 - DNA, 884 bp, Cannabis sativa
tttcggttgtctggttgttgtggtggttttgtctgtggttgtgaaagatggaggtctcgtacttttgttttggtacagtataaatgtaatttctgccgtgtggcagtaaaattgaaaagtattactccaaatccagtattttgtaaaatgcccttattaatactgtgcattcttcattgtggattattgtaattttaatttgaaaatttgaattttttgcttcatgtgagacactcattaaataaaatcttcttttttcacacaatatctaaaataatttatctcattatttttctatttctctctctaactcaatctattctctctttttatctcggactatcttgatctctctctttctataatggaaccacatctgccattaaccctccacctttgtcagttgcaagcttgtgtaaaaatcagtctttacactctttttcacttatagcatacctcaaagccaactatttcctcctttaattaaggatgggttgattgttaaatttaatgctcttataaaacttcatttttcttatatactattgtttattgatagaataaataaaaattgatttgtttaatcaaatgtaatgtttgtatatttatttttgtttatctaaaacttttgcttgaggtcatctaaacttgatgagtttaggtttgtacatacattactagtcagatagattagtgtttatattaactcagattttcgttaacaataaataaaattttttgtgtgttagataaataaataaaatataaaattaaaaatatatacattgagaaaggaatttttttacgtagttttgtagttaaatctacatagtttacgaatcactcttatttttgaattgtctgattgcaagatacaacttaca

SEQ ID NO: 70160 - DNA, 865 bp, Cannabis sativa
atagtacatgatcgcataaggggtacgccgaggccagcctagctccctatacaagacaaacattgctaagaaatactttatgctctttcgcatgagatgtgttgggcacatctcaaagtaaccagcgacatctagaaaatactagtgaaggagcaacaatgccccatgttcaatgtggcgcccagaccatgccaaccagttcgaagagggcctgtgcgctctagactttctaaggggagtttcacaatggacattccctattaaacagctagtaaggatcttaccaaagacctcattggtgagaacagacgcaagaaaaatccaaccaactttaggtggtttggcattggtatctccagctcaagagactacttttggacatgggccagtcctagttctgaaggctcatcgagttcattcaatggattacctcaggcatcataattgcccaagggacagttagggaggattgaacatgtcttatacctactcctcctcattggaacaacctcctccagcttagattttacatcagaattctcagtcccttgaatccatctctggctgagcctcgataagaggttgggcagtctccccctccattctaacttgaccccttgtgggcaccatggccacatgaagatcatacagggggcaccttcaagccataagtacgaggtaaacaaaagacctacgcagttgtcacctcccctattcaatgcctgacactaattgcatggaaaaaataaggggaggtgagaaacctgacaaagctacaaatatattccagtcaatggcacccaagggcatctttaggtaaaacaaagtgtacaaggtttaccaacgaccaagtatcgtcttaggt

SEQ ID NO: 70161 - DNA, 1029 bp, Cannabis sativa
taattttaaaagggcaaaaatttttttttgggcccctggactaggtgggccctaggcacaggcctagcccgcctatgcccaggaccggccctgaccttatcgaccttctttttgcctttatccatcgttgaggccatcttcaggactgaacaagcacacacaaaaaaaaaaaagggggaataaacgtagtgttaaccaaagaacacaaggaagcacagctacctgggatcactcagggaggatcaaaataagcgcaaggaaaccgtaatttcgtacgagaaaattctgtacggagagcattttcaagagagaacccgtcataaaaaaggacatctaacaacttgacacaattgatacaccacagttgatgttcatgaaacgactctcatgtggatgctgccacttgacacatttgatgtccaacactatatagttaattaattgagcttaacacacatttgaatttgaattattaattttaaattgagatatatgattatcgttattaaattatagagttatgttatgagtgctctatagtcatttgcttagagagaataattctaaaaaattgtaggaacatatttgtagaattatatatatataaatttatatatataaatattgggaacaacattcgaacttgtgactttatttttgtaagaagattgtatgaaacttttaggctatattatggtcgtacatattcttagactcttggatgctcgaaaaatgactccaaattttcaaccaaaatgataaacggcgtattatcattattatttgttagaattatttatcactcataaaatctaaacaaaatttttggtgatttaaagagaagaaagacaagaatagcagaaacataccttgatttatagatagtgatgatcttaatccatttaatagagatgatcttagagtaaagagatggaaaaagatgagaatagagtgagtcttgtatcttatagattattaactttaagtattaatttattagtccctgaataaagggtttttttttttttt

SEQ ID NO: 70162 - DNA, 780 bp, Cannabis sativa
caccatactaacttaatgaaaaatatatcatgcataaggccttagaattctaacgttgtttgaatgaattaagaatatcatcttgcctgtgtggtttgagaactgcacagaattaattggatcaacatcgtagcctaataattggagagggaagacggaagatttgttgccaacatatccctaaaatgatttaagatagcaacattttaagttgacaatagaaatataaacatgttgaattgatacgttcactgcaagtagattcttttacatgtataatagaactaaccaatttatgatcagagacaaaagcttagaaacaaaatctcagaactgttggagtctaggtcagtgatgagatacaagatgaaattggattgtgcacatatgaaccttagctttgggcatggttcacaaatttaaaacaaactacagacaatttctttctcatagcatcacatgatatggcaaagataatatctaaatataagcaacataaacaatgacactcaagacacagacatagttataaattggataactcaagatgaataagttttcttacacagtacatgaatattctataaattaacataaatgtaaactttcttaattgtcctacaatatggaagcaaatgtgatacttctttttttttttttttttagaaaagagacaaagctcacatatgtctgagactgacccaaatttattagagaggctcacttatggtagaggaaaaccatagtaataaaaaaaaaaacactaataggaatgttaca

SEQ ID NO: 70163 - DNA, 2293 bp, Cannabis sativa
acagaagccaaaacaatatgtactcactttggtttgttatgtcagagacttgcatatcattcatttccattttggactattgaggcttacatttacaagaatttctctagcttattaatcctctcttttatcactttcacagaggagacatggttttcctttttgcgtcctcgcgactgggacattataatcatggatgcactccttcatgttcccgggaacaatgagaagaaccgaacatttcgtgtcagtctctcagattactttcctcctccatcctctacagcatgcacagaatgcaaaccgccacaagaattggataaccaagataagaaatgaaagcaatcgggtctcgtgagtatactagtctttattttcctcaatacaaatcacagtgtttcaatcaagtaaactaggctggccaagctccatgttccaagtcatgggaatacatttttttgtttacactccttgagagcaaagcaatattgttattagaccaatttcattgttatgcaaagttctgaaataaagttatctttctttgttgttattcttaaactcttataagaactagaacaacaatacctttcaccattctataatagatagacatgtttatatgttgaataatactaagatataccaatgaatatgtactttcttatatataatattatattttcacacattatcaatgtaaaactctttaacaagttggttgtgcaactttttctggtcttcgaggatcttactagagtgccttctacttcaaataaattataaattacattagaatcattttcaacatgtctaagaaataattctatgtattttatcgagttcgaattttgcctttgagaatctcgctatagtatcttttacttcgaatatgtcatgaagattagaatcattttcaacatgtctaagaattaattctatgttatttatcgagttcgagttcatatcaaaagcctcaactgattggcttcaacttttctcaatctttgaagatctcactagagtatcttctactttactttgaataagtcatgaactagattagaatcatttttcacatatttataagaatagattcattttttttcatcgagtttggatagatgccaaatgttttaagtgactaatattatattgaccaccatgacaaagaaaattgctcttatgtgttgcttcctccataataatcatgtgtgggcttggcccaatagaaggtgggacccaatatgggccaagcccataagaaggtaggacccaaaaaatagtagtttgggcttgattgaatgaatgcattcacctaccaacctaccctttcaaatcatgtttgaggcttttccaaccgtgtgaccccttttattgaatgtatattcataaattctatggtttccttgagacaaatcctaagatttaaatgaaaaccataaaaaacaaaaaacaaaacaataagacataagaaaaaatagaatcaactaatggtggtcccatttatcatttcaacaaagacaaaataaataaatatatttatatatttgtattaaaaataagaaagaaaagaaaaaaaaatgttcaatttgtactactttagacgtgtaaatcaagaatgttcctagaaaaattgtcccactcctaacttctagaaacttggtttttgtgttaacttttctttttttatctttctgtaatttgcacaaaaaaatgaaaaaatttcaagtttgtcaactttgctcattgtaaagaagaaaaagttgttaccttggaattatatggatgcatatttttctctatctcaatcttcttttttttttttatatttttttttcccttagtaagaaaaaagtacacttgaaaaatggtccccttatatttttagtaagtcattgggataactattttgaaaaatatctttttaagtgtttctttaataagttcttgaataatttacggcataaataattaaatttaattttctgttgtatataaatatttaagtttaatttttaatagcaataattcataagttataattttaaaatttttataagtacctagttgttaagtgttaaataaattaccacgtgataatttttaattaatataggtaattaaatttttatttttttttaaaaatatattttaaataccaataagaaaatgatacgtggataatcacttgacatttaacggccaagtacctacggagttctaaaagtataacttaggcattattactgccaaaaaataaacttatgtatttatttgcaactatgagtta

SEQ ID NO: 70164 - DNA, 2384 bp, Cannabis sativa
aattggaggaattagttaggacaaattgtgtcactccgagatcgcagaatccacctcaacaatctgatcattctgataatggaggacagagttagtagttgtgtttatatgtagtgtctatttctttcacgaaccattttattaacatgttaggtaattaaacttataactttaaaatataaaaaattaaatttatggtatttttattaataaaatttattttttactataatttgagcaatattaatgtgaaaataaagaactcatatgatatatttattatgaaaattaataatgaataaaaaaatgtggtttttttttaaaaaaattgttctcggtaaaagactgtaccatggacaatgtcctcggtatagatgggttcgttaggccaaaatgaaagcttttaccgacaacatatccaagcttgtaccgacaacattgtcctcggtagactctttaacgagaacaccactgttgtcctcggtagaaagcaacttctaacgacgagtctctaatgaggaccttttagcgaggatttgtcctcgttatattgttttaccaaggacatgtgaagttctaacgaggacatttgtgctcgtatagaccctattttttgtagttatatacactactattggagtttaattttataaacattagctaaaaaatacatatacactacatttatagcatttcattaaaaatgctctttgaacactgttatatgatttttatatatattgatatgagtacactactcttgatgggtattacctatgaatgatattcttagaaaaaaattaagtttctatgcttaattttactatctacttaaaataaactcttcaatttcacatatatggttgaggttgtttcatctggccaagagaaaaataaaaagaaaaaatgagtttgagctagagagatgaataaaagtaaaagtaatattaaatataaatatattttttatatagtgtaaaaaaattaattaaatagtaaatttaaatacaaaaattagagctttggagcgagtgtatacttactttctcaaaaccgtaatagaatacatattaaagatgaagagctagctttgttgatggttttcgagctgctggcaatcccatcactgaggaacaactcattctctacattcttactggggttgggactgaacatgaatttgtggttattaatttgacttccaaagatcgcttaactcttcaagaagttcaatacatgtttcaagatcattaaatgtgccttgaactcactcactccacaacattgttggatctcagtcctcctactgcgaatctcgcgcacactcaaaagcctcctccctttggtgcctctcaaaatggtcgatcttacacctttggatcatcacaaaatttgtctcacgatcgacgtcaaggttgttacaatggctctggagtggtgtgtcaactctgtggaagaccagggcataaagtgcaaaagtgttatcgtcgatttgttatgagtttcactggcttaaaagattcatcgtctcaacctacaactcaaactccacagacctttatgtccacaacttcctctgcccttaatgacggttggtacttagacagtggtgcctctaatcatgtcacccctgatgcctccaatttaatgcagaaggcttcctacaaaggcaaggaaaaattggttgtaggtaatggatctcaactttccatttctcacgttggctctagttcttccaatgctaatagatcactataccttaagaatattttgcatgtacctgccattactaatcttattagtacatccaaatttactaaattgaattcacccctgatttttattttatcaaggacaagagttcgaagaaccctctacttcagggcatccttaaggatagcttgtaccagcttatctctccacaatcaaatgcatagtccaatcctctacatcctaagtttaagtcatctactcatgttgtgtctatgtctgagtttataaatcaatcctcacagtcttgtaataaaaaagtcaagtcttgtcaatctatggcgcaaaagaattggtcatcctaataaagttgttttgaataaaattttacaacattttaatatttcttctactgatgttgatttctgtcatgcctgtcaatataaaaaattgtatcaatttacctttcttgtttctcaaaacatggctactgctccatttaatatagttcaaaccgatctatagggcccttcccataatgaatccactgaaggatacaaatattatatgcattttcttgatgaattcactagatatacttggggttttaactctcaaacaaaaatctgaaataacaaatattttcctacagtttaatgcttatgttgaaagac

SEQ ID NO: 70165 - DNA, 1233 bp, Cannabis sativa
ttgcacatattttgtaattaattaaaataatgtatacaaaattgtaaaatgccctttatattatgtattgtgttaaatttaacgtaattatattttgtcaagatgtactgaaaaataccatttgtatagcacttcattgaagatgtatttttaggtgggcagtttgagtttcttataattgatactaagattttggaaaaatttacaaaaatatttatttttcataaaaaaaaaattataatttacaacatattaaaaaaaatattgctattatattataatatatttaatcataattaatcatacaagaatacagtctcatttaaacacatatgatagcaaaatacatattattggtgtgggaggcatgactattcctctccgtattgagatctcaaggattctcaagttgtgtattggtagtgttttgtgacctgtcctttaaatttgggggatttaaaagatgctttgggttgatcctgttattaccttttattctagctaatattttggattgccattttcaaaattttattaaataatatttggctggttgtcattaataggtttgatttgtggtgaattcattttggttgaaaatattttcactcttttgatactttatcagtggcttattagtcatttagttgaatgtgctattaggattttcttccttttatttgtaaacagtttggttaacttatttttcttgatctttctcaatgaacaatatcttcatgtatgtaattgattatgtttaatttatctattaataaaaatttctatttacttttttttttaaaaaaatatattagtgagacgatctctaatatatatgatttaacttgtttgggtaaaattataaaaaatttattatatttaatacaacatttgcaattatgttgtaaaattgaacaataacattcaatttttttttttttttaaaaaatgaaccataacattgttacagcttcaaattaataaaagaaaaataatttgaataaaataatattctacagattcatcattaatttttaggagttttcttattttttacacttcaaaataattatttttaatattgttacggaatttcatacagaaatccctatagcagttaacgaagcaacctaaatcgcaattaaaatccgtatagcaacccacataaaaactactgttgcaaaaattataatcactacgcaagtatacgcaatcaagtagtaaactcacaca

SEQ ID NO: 70166 - DNA, 1398 bp, Cannabis sativa
accgaactacaaaacttgcaagctacactggggaaaatacaaggccacaataaaacttttaattacgaccagcaggatactagagcagttataaatatttcttttgtagaacaaagatgccagtttcaagagtggagggattgagagatggaaatcatgagagcccaacaagaagtgattgacaattgttccaagcaggccgttatactaattaggagagtctattaagtcaccgaccaataacttgtggtagatacttacattctaactaggccatagcacgggccagaaaagcatccagtagaaaacactcagcaaacccaagttaatgggctatctaattcgaggccacagagtaaaactgtgggccacacgatagatgagaaatttttgccaactcattacttgggaggaaatgatcagcataacatctgttctcagacgaatatgctgagtctacccattattaataacagccagacgcaaagacctctaggagaatcggtcttcgatcgattaggcaccatgcatgatcttaagaatgatttaaatcgtagaagaggattagacgagcaggacatccttcctactatttagccaaataatacagattacccgacccttttctaagagatcctcacgtgacacatgttggccaacaggtaggtcaagttgatacattggtgcaagcccaaataaatcaacttaagagcctcgttcaaggcctaactgacctaaaactcacagatctagaacttgaccggaccagaggatcatcattctcaccagaaattaatgctctcgacctaccgcctaagttcaaaatgccaacatgaaaaatgtacatgggcaagaaagatcctttgtctcacattaaatactttaaaattcaaatgaatttacaagcggtgaaaggtaaggtacggtgcagaattttcccaactaccttagcggaggtcgcccaacagtggtacttcaagttagctctaggaaagtttagttcattgaactctttcatgtcagagtttcatgcaaagttctcttcttctcggcaactcccatctcacttagaggacctggtcgaagtgaaacaaataccaagagaacccttgagagcttacattagcagcttcatgactgaagctacaaaagtgaaagggttacccgaggaagggaggctggttgccatcttttgaggtattgagcctatagaagaattgtggaaagacattaaaatacttactatagggtcaatggtagaattcttggactaaacagatggatttataaagctcgaagaatcaggtcaacgtgtggacatagctggaaaaaaaaaacaacaatacaccaatactaccaatacgttcgtataacaaaccaaaattcctagaatcacag

SEQ ID NO: 70167 - DNA, 1052 bp, Cannabis sativa
tttacaaattatgtatagttttagattaggataccaattttaatccctaatatgcatataatttcaaatttccctattataattgctgggaaaaataataatcgtttaagggtagcaaaataataaatatattaagcaaagaaatttaactaggtttgataaacttaccaaatctataaagagatcgatataatttacttataactcaaaattatatatttattatcttaggatctcttcatctaaatctcaatacactctttgtttcttccatattctcacaacactacaaactcacactaaatttttttttcacaattcactcctcttctcacacatacaccattctctcacacacacctctctcacacatacaatataacattattgacgcgcttttttgtcaactgatctaagaaaatcgtaaaaataaagaggattgcaatggattagtttgactaaataaagatgcaataaaataaaatagtcaccagagatttatactagtttatccccatgtcgcgatgataatagggctacgtttaattttgcttttactaattagatctgacacaccagaattatgttctaaaatatgtgtagataataatacaaaagaagtgcatgagatttgatcaccattttttggtagtagtataatatgccattagagcaattaagtaatatagagctattacaccagggccttcttaaaatgtgttgtgtaaattgtaatatttttgttagttttaatgaatctctgatttaacttggcgacttctttgagatttggtgaaatctaaatttaactatattgttaggattaaactcacttaacttgtcaaatcagtatgtccatctatatgctcatcttagatgaatttgaagaaagctgctactagttataacaattggttttaataccaacttaaaagggaccccaccaacaattttaaataggggttcctttattctcaaagagggagttctgagttttgatatctaatctccaaagctcatactttagatttagtttagagagagagagagag

SEQ ID NO: 70168 - DNA, 2692 bp, Cannabis sativa
aatttttctcctgcacaacccaaaaattctggtttttgcagtatttcttgagaaagcattccacccaaggcttctcatccttatttgcgacactccaggcaagcttagccatgagagctcgattcatatcttcaaatcttctaaaccccaatcctcctgacctcttaggttgacaaatgctatcccaggatttcagcgccatgaacctgtccttctcaacattcccgatccaccagaattttcttgctaaagcatccattgaacggcatgtggcaagtggtattctgtttgtagacatagcatagataggcattgatgccaccattgatttaattaaggttgttctaccagcaaaagaaagcaatttcatcttccaaccttccaatctttgtttcatcttttctcgtaaatagtcatatacttctttttttccgtcttttgaacacaaaagggttgccaagatgtagttcctcacccgagctttgactaaccttgagaacattcagtaaagactccctcctggactgtatcaagttgtttgaaaacagaacacttgatttaaatttactgcataactgacccgaccaactttcatacagcgataaaatcttcataatattaatatcttccctctcatttgccctcaaaaataagattgtatcatcagcgaacataagatgggaaatggagggagcagaccttgctatctgaataccatgaatttctcccctctgttctgctttgagaattaacctcgacatcacctcttgacagagaagaaagagaaaaggagacaaaggatccccttgtcttaatcccctttgaagagtaaatttcttggaaggactgccatttattaagaccgaataagacattgtcgacacacaggacatgaggagtttgcaacttttttcattgaagtcgtttgctcttaaaactctgtgaagaaaagaccattccatccgatcatatgctttgtgcatatctagtttaatagccataagccctcctttgccttttttcttcctaatcttatgaactaattcttgagtaaggatggaagattcaacaatccatctacctgggatgaaaccagattgcaaaggggtaatcaaattttccatgagggggcttaaccgattagctagaatctttgcaataatcttgtaaataaaattgcaaagactaattggtcgaaactgttccaccttcaccggattgtcaattttaggaatgagacatatataggtgtaattcagattatgattcaattctccagaacaaaagaattccttgatcgcagaataaaccgaatctcctaccacatcccagtattgacgaaagaaacatcccgaatatccatccgggcctggggatttaagatgatgtagcatgaaaaccgttcttctaacttcttccatcgaaggaataaaactgaattgaagattagtctccaaatttatagattcctcaaataacccatctaaagactcaggaatctcaggtaaatcagaagtgaacaagtttttgaaataatcatttattatacctgagatacgactcttgtcttcccagtaagtcccatggctatcctgaagagcccaaatgtagtttcttcttcttcgaatcatagtggacgaatggaagaactttgagtttcgatcacctagtttcagccaaacctccctagacttctgcctccacatactctcttgtcttctgtattcctcttgtaacatcatgtggagtctttcctcttcaaagatcaagtgttgagaaaagtcttgttgttgaatccacccaatcctagcttcaatcctttgaatgttcttatcacagttgccaaaaacctccttcttccatctttgcagttctcttctagtattggcaatattatggagataattagaaactcctcctagatcactgatccgccaagccctcaaaatagtatctctgcaagagctttccctacaccaagcttcataaaaacgaaatggtctgaagcctttgaaagactcttgctctgagtcaagaatgataggagcatgatcagaacaagtaattggaagattggtgacacatgcttttgggaaaatgccaatccaatctaaggaactaactgctctgtcaagccgttccctaattaaacctccattgaatcttttattctgccaagtaaacttccctcctttataaccgatgtcaatgcttcctgttcgaaagagaaaatctgagagccatctaaaatcattccaatttgccttcgagccaccttttttctcctccacgcctccaattacattaagatcaccaataatcatccacggacttatacaattcagcactctatcttcaagattcctccaaaagatatctttcttgttttcataaggcgtgccatatactccaaaaagattccaagtcacatccttcttgacatcccatattgagacttcaattatgttcctttctacactcataatttgtagcttaacatcacttttccacatcatacataaacctccagaaagccccgaggaagaatgactagcaaagcctgaataaccaagctttttagcaactccccccattttgtccttattaaccttagtttccattaagaaaatacagtcaggtctatattttctttcccaagccattaaggcttggactgccggttctcttgaca

SEQ ID NO: 70169 - DNA, 1883 bp, Cannabis sativa
acttttatttttttattttatttaaatcaggtctacatttgagtttagggcttcagatgtggttcgagtctagattagaatcgaagtctaagtccgaagtccaagtcctaagattaaggttagagttacagcctaaaatattaattaaggaaaaaaaattaattaaaaaattttaaaagtaatttttttttgttttcaaaatttttaaaattttaattttacagaatatattttttagaaaatatttttacttctctaattaaaaaattaaaaagtaattaatttttttattaaacaatcttacagtaattcatttctttggctaatcaatcatgctaattatttttctttttcctttttcaagtcaataatttaacatgattactaatgagctattatccaattattggggttagccagatgggctgttattctcaataagctccccaaccccaagaccttcattcggatggatgccacgtgtaccgacagtgaggcttggacggtgattgttcaatgatacatttgggcggttgatgtgtgatgtgtggtggttaaattttcacaaattattaatattaattattatatttatataaagtataaattatgagtgattggtgtctgcatgtgggtagggccgacatatatggaaattaagatcgctatctttttactaatttattaattttttcttttaaagggaaagctttttgtaatttgtacgcccaatattttttgctttatttccctttcaaatatatattttttttattagataattggtttgagaatctccaaattataaaaaaattgcttagcattacttatcaatgctctttttattattattctcatttttgtagtaactagttttctataaaagtaaataaattaaagaatggctttcaatattattttaggcttgagtaacaaattattaaatattaggtaggtgtactttgttttttttaactataaataatacttatttaccccataactataaaattatcagaaaatgatatttttgccaaatttatttaccaaaattacttatttcgtaagtgttctaactaataagatttaaccactttttattatatgatacacttcaataataaaacaactaataatgttaatagtaatattaatagttattataatattattaaaatattttagttatttgattattagagttgtaaaattattgagtgattcaagttattaaatatttaaagtagtttgtgttcagagtatacagaatttactgctattactaattgcatttaacaagataaatgttctaattttccactgcttatttgtagtgaaaatttattataaactttataataatatcgatttatttgttataatttttatttattttcttaccaacatattttttttatttatttgtagttaaaatattttttctcactaagggaattaattctcacaagtataaaattttaacatttatactgttaagatttccctcttgtaagagttgttccttgttgagttttttcgtttcctttgtagagagtgttgctaaagacattgtcgattctgtccattctttttttaagagtgtctctgattgtggttgttttctttgatatattaggtttttgttatttgtctttctaagtgtatgtcttctacatgtaatgcaaaatggtattgccagaatacatgagttaataaattatgcactatagatagaaactaagattttttggttggaattttttttttctaattcaataactaatgtattatttaactctcaacaataaattaattattatattaaaaagaaaaaaaaaatcaaaactacaaagtatctgtaatgttttttccttagggaacta

SEQ ID NO: 70170 - DNA, 1002 bp, Cannabis sativa
tatatatatatattggttaatttgtataaaaccaaaattttgataaatcttttggtaatcctaaataagtttaaatttggaaattaaaaaaaaataaaatcaaaccttcaaaatattacatttttttgttccttccaagaatttatcttgaatcaaatcaaactaaaaaaaaaaaaaaaaacataaataattatgaagatgaagaagaagaagaaaaccctaaagcttgagctatcaacttcatttgcttcttaatcaactcagctttcctactcattaactcagcttcttccattctcagcaaaacccacctcttctgcaactccttcactttctcttcatccgaacactcccaccatttcccctttaacatctctttctctttctctttctcttcctttgcatgttcttctttgggtaattgctgagctttcttgccccaaatcttgcgagcgatcttatggagacgagtatcgtgaggggttttgatgagtgacttagtccttgcttcgcggtggtacttaattcgtaaacggcggagcttgtcgatgatctgactgtgagtgaatttgtgatccaatcgggtttggattcgctctaggtttggagatgtgatggctgaagatggagatgactgtttggagagcttgaggaaggatttcaggaggtggatctcgtctgactcggtgaagagtcgccgggaatttccgtttgacgatggtggtggtgactttgtcggagatcggaggttggtggtggtggtggagcgctttggcgttgacataattttgatttttcttttttttttttgaaaatggaaaaatggatttggattttggcaacttttgatttaaattgtaaaaatagttttattattttaattttttttggcccaagcccaattcactggccctggcccaggcctaagcccaagactactccaactaagtggaggtttcgtttattaattaaaactaataagcttcttttatataaaaaaaa

SEQ ID NO: 70171 - DNA, 1518 bp, Cannabis sativa
ggttaagtctagtgaccaatttgaaaattatctattttgcaggttgttgaagagggagaaagaattggagcaggtgaaagcattccatgtgaaacaagaaaggacattgaaacatttgttgatgcttcatcaattaaggaagaaggcaaagacctggatcccattgaagctttgataaaggagaataaagttgagggcaaattctctaccaatgttttgaatgacaatgatagcgatgaagtcaaagaatcagaaagaccactagagctagcatcaaaatctgaaaatgatcatcaacaggctgtacagaaagatgaaccagaagagaaatttgaatgtttgctacaagtgacacctaatgaaattgggacagaaccatctagtgaacatgctagaaatataacctgcgtagaggtatgacttctaaaaatttttaatatattggttccttgtgaatcgtacttgcataatgttcccatgcttctgtaactagaaaagcaaatgattgagcttgaaaagcttatggactataattagctcgagaatatcaaataaaattaactatgcattgctgcatatttccaattataattttctggtttcttcattaaatatctagtacatcaaaagatgtagtgaagaagataaattgtactctaattaaacaatttattctgcagatcttcgaggagttagaaacaactggagcaagtgacagcattccatgtaagacaaatgaagatcctgaaaagtttgttgttgcctcatctgtgaagcaagaagatcaacatgaagtagataaagagctagatctagtgcacaccttggaagaggagactaaacacgatgactcattatctaccaaatcaatggaagaaaatgaagacagaagttcagatgtagcatcaaaatgtgatacagatcaacaacatgctctaaaggaagaagaaccaatgaagaagcttgcagaattgctacttgcaaggcttgaagaaactgagaaagagccagcaagtgaagatggtgaaaagtttgtagttgccttgtcaatgaagcaagaagatcaacatgaagtagttaaagagctagatccaacagaaatcttgaaagaagagactaaggttgatgacacattatctaccacaacagtggaagaaaatgaagacaacaaaatcatcactacagacaaaagcacaaatatagcatctaaagatgataaagatcaacagcatgctttgcagaaagacgaaccaagggagaagcttgcagaattgctattcgcaatgccaaaagaaattgagacggggtcagcaagtgaagatgcaaaaaagtttgttgttgccaaatcattgaagcaagaagatcaacatgaagtagatacagagattgattcattggacaccttaaaagaggagactaaagttgatgagtcgttatctaccaaagcagtggaagaagatgaagacagcaaaataatgactgtagatagaagtacaagtataacatcaaaaggtgaga

SEQ ID NO: 70172 - DNA, 1776 bp, Cannabis sativa
  modified_base (1702)..(1704): a, c, t, g, unknown or other
  modified_base (1736)..(1742): a, c, t, g, unknown or other
aaatttaaaatatattaataaaataaaaattaaaaaaaccttcacctgcatgggattatttatcccactcttctggatggaataaataatccaagatagatgagattagctagattagttatccagactttcaacacgcccaaacactggactggacaaattagcttgtctaatctagtctaatccagtgtaccaaacgggtcctaaggtgttaactagtgatgcatcaaatactaatactatattcatcaaaccacttaaactgtctgcaccacaccacaccgcaaaaaaaaaaatgcggtttgaaattttttgcagtgcggttgcattttgaattttttaaatcgcatggtgcggtgcggtttgcagttttgaattattaatatgcagttcaaattgcactgcaccgcacattataaaaatactaatttttatatttatttaggttcaatatttgaatgtccaacccaaagcctactaattattgtattattgaaccttaattttttttttttatatttatttctaagtcttatggtagttttgacaagtgttgctcaagttttattgtatttgtgatagtttaattattggtgattgttcaaactgcagaaactgcaaaaattgcaccgcactatttttttgcggtgggatttttgtaattttttagtttcgcatgcagtttgggaattagaaaatatcacatgtggcaaattgatttgaaaaatagttaaaaattgtatcacttgtaccgcaaatacttctaatttatagcattgttattaggtactctatgatgatcaacactatactaatatagtaatatagtgtattgcaattaattaactggttttcatattatttattatatttaattatgagatgtaatattaatttataacataacaatacatcacctcttactatcgttagcttcgtaaggtacgcatttctcgtaatactaatccaagtaatatgttaagtaaaatatgacttctctatttgtttattatcatttgaagaactatattttatcaactgcatatatttcgagaaactaatacattaacccgtacagggacagatatgatgaataattttattaatttaattataatttttttctctcgaactttgacatgtaccaaatcatgttctttgaattttttttcgttaaaaattcttcctaaactattgagattgttagatttaaagagaatttttaacggcaaaaaaaattcagtaacataatttggaacatgttaaagttcagacaaaaaaaaatcataattagctattttattaaactttatatccactggtgattcgacaatccatatcatgatggtcaataatctgctaatcatttcaagtgctccactaaaacataaaaagaaaaatagcaatgacgtaattataattttaagtaaatggggcatagtgctatatatattgtggtcggacttttcgacatagtacaaaatccgcaagagcttggaaggaacaggtgtaaaacggtaccaaaaaaaaaaaaacaaatttaaatttggcatgctacaaaaaaaaaagtataagtttgagaaacaaaaaatatataaatttaatcacggtgcaatattacgaaaatacagcatcgaagcactaatatgttatattatttagggtaaatgccattttaaactctgtgttttgtaaaagttannnattggaccttatgttttattaaatgacaaaannnnnnntgtattttctaaaataataaaaataagaccctga

SEQ ID NO: 70173 - DNA, 2998 bp, Cannabis sativa
tcgagtactcgccattctaggtcgaatactcgcacttgtcacttccctgaaaattctcttttatattaattaaataatacattttggtgttgcgaaattcactcgacaacacgattgtaccagattatgttaatttggagttgtgtcagcaagttacagatgaggaggtgaagaaatctttatttcaaatgcaccccgacaagagtccaggccctgacagaatgaccccagcattttatcaaaagtgttggaacattgtgggtggtgatgttattgactgtgttcgtaagttctttatgagtggtagcttcgagaatggttgtggtgaggccaatattattttgatcccgaagaagaagaatgttgaaaggatttctgatctccgacctatagccttgtgtagtgtgttgtataagattattaccaaggttatggtgaatagaatgaagcctttcatggacactatcatctcggctaatcaaagtgccttcattccaggtcgtttaatctctgacaatattttggtgtcctttgaaatattgcactttctgaaaaggaaaagaaaaggcaaagaaggctacatggttcttaagtttgatatgagtaaagcgtatgaccgtgtgtagtggagttttttggaagctatgcttaggaaactgggttttgctacctattgggttcaacttattcttagttgtgtgtcatcggctagttacaatgtcatccatggtatccacgagatcggtcctattgttccaactagaggtattcgctagggagatcctctatcaccatacttatttattctgtgtgctgaaggcctcacgaccctcctttgtaagtatgaaaattggggttggttgcatggttgcaaggtggctaatggggctccccgcatctcacgcatactttttgcagatgatagttacttgtattgcaaggctacctacgaggaagcacaccgaatcaaagaggtacttcaaaagtttgaattggcgtctggtcagaaagtgaattttgccaagtcatcaattttctttggtgccaattctggtgaggacattaaagacaaccttgtggcattgttaggcatgaatatagctccggagggtagcttatacctgggtctcccaagttccatggggcgtaataagactgtggcgttgggttatctgaaagaaaaattaagaaagcatcttcaagcttggggtacaaagtttctctctcaggcgggcaaggagatcctaataaaaactgtggctcaagctcttccaagttatgccatgagtgtgtttttgttacctactgtgattactagagatatggagagtatgatggctaagtattgctggcaatcctcaaataactcatcttcagatattcatcggatgtcttggaaacggctttgtggtcataaggataagggaggaatgggatttaggaatttgcgagattttaatcttgctttgttgggtaagcaagggtggcgtcttttgattaatcctgactctcttgtggctcgtgtgtttaaagctagatacttcccccatgggtcattcttaaatgctactattggttccaatccatgctttgtgtggagaattattttggaagctcaattcttagtgaaaaggggttctcgatgggttgtgggagatggtacaaatatatccattttaggtgagccatggcttccggatgatgaaaatcctatgataatttctactcatccaagtctcactcatgctaaagtgtgcaatctgttgaaagtggatggttctggctggaaagaagaaatcgttgatgatttgttgctgccccgtgatagagagttggtgtgatccgttgctgttcactcaaggcctttgaatgatgctctctgttggagtttggagctgtcgggtttgtacactgttaagagtacttacaagctattgcagcagctcaatggagagtttgatatttatgtttcggctgaggatacattttggaggaaattatggcaattaaaaattcctccaaagatgaagaacctgttgtggcgggctgcgaagaattgtctcccaactttagtgcagttgcagtccaaaagggtgaatgtgagtgtcatttgtccggtctgccagttaattgcagaaaccattgcgcactgtttgttgtcttgtcctgttgctgcagcggttccggatcgggtgggcataggtacaacattgcaacaagaaaccacttttcttggctggtgtatggaacaatttctggtgttggacaaggataaagccgggcttttggtggcgctgtgttgggcagtgtggaacgcaaggaatgataaagtgtggcaatataaaattgtgggagtggaatctgcaacaaactaccttaatcaatggcgtgctgctcaaagttctaataatgagttgtcattcactggatacgttccatggaatggagctaagcaatggattgctccaaatgctaatagaattaaggtcaatgttgatgcggttgtgtttaccgaaacctctaattatggtgttgggtttgtggctagagactctagtggtttattgctggaaggcggtactaaactgtttaatggctcggtgtctcctgttgtggccaaagctattggagttcgggaggccttgagttggattaaagaccatgcgtggcttcatgtgacatgggaaacggactgcctctcggtggttcaagctattcgaagcactacggttatgctttctatgtttgggaaagttataagtgattctaaaaccttgttatgtactttgcataatttcttttcattttgtaaaacgatcagcaaatgtagtggcttactcctttgcgagagcctctatatcctaccctgatcgcctctttaacttagacactgttctggttattttagtttggtaactaaattactcgtttaataaaatgatgactttcatttaaaaaaaaacaagttatgttaagttatatatgttggaatttattt

SEQ ID NO: 70174 - DNA, 2199 bp, Cannabis sativa
caaaatatcaagattctttgtgtgtttatcaatgcgagtagattgagccattattaacaaagctttgatctctgctacagtgtagtcatctttccttataataacaaaggtgacaaacacatcgtactcaactggtaattcattgaagatagcttcaatatgatcttgaggtgtgtgtttgtgacctatcatggtaagaagatcaacaatccctttgatcttgagcagatagtcattgagagaacctgtcatcttggtgttttgaagttgggtcttgtacaatcctatatttgttgtattaagagttgtatagtactcactgagagtgtgccatatctaagcagtggtgtcacaacctatcatcattttgtggtcttctcaaacatggacaacagaagccaagaaactaggagattgtcatgctgttcccaatcttcgaatttacggttgatagtgtgagatctttcatctgcagcactaaggtactttggtagagctttgtcaggatcgaggtatttctgaagtcgcgactgcctttgatcaatgctagaacttgatgtcgccatgagaggtaattatgttcatcgaggttaatcgagagagaatgagtaaaagaaacaaggtaagattttggcagtaatgctttgtgattgttctctatctgagcattgttcaatcctgatgctccactgttagaggtatgagaaatcttcattgatgaacgaaagagaaagctctgataccatgtaaggtttgagacaagaatagagagagattgaaagaaagagtgatctatattcattgattaatgaagaaggttacaaacagtttatataggcatcagcgaagataacaaccttctaagaatacaatcaaagaacacttaactaatagagttagttatttaacaataacaactaactaactaatgagcttccttaacaatgataattgaaaaacaaaatgttaatttaatttgttgggacttactaatgaaaatgatggtataagtgatgggggtttaactgaaaatatatgacataataattaattaaagaatttgagtgactatacaagaccaaaaatgaaagaatactaaatatttaaaatattaaagtagtatgattaaagttattatgttatttgaataattattcttaattaaattaataactttaagttttttattgaatattacccttaaaattatcttatgtgtaaaattttgacaaaagttaaattataaatttaagtaacatatgaggttattattgtttttcatatataaatatacacaatttgaggtctttcagttagaaatgctcttaggatgtaaatggtttgtggagtaataataattttttgatttattatcaaaaaaaatattgttttttatatatattattattattaaaattttgacaatttaatttttttatccaaaaacatttgaatagttttttaaattaatcctagaaactaattagaaaatagctttataattcatttctttactactcattccatgaaccaagttactataaacattaatatttacttaattcatccatcttttggttataattattaattattaaaccatttgtatcgtttatatatataaaatgtttaatagagattattatgtaagtatgcttatttattttaacacttactttgcagggtttgatgattcatacgaacgtactgagaataagcatgatatatatatatatatatatatatatatttatagtacagattatataattatatgtatacgttgatctcaagtgttagtgtgttactacactttggtgtttaaataaaaaaaatatggcatgcattatatatatatatatatgtatatatataacatgcatgaactaataagtttgtactatttgaatgaaagtaaataatattaagtaaattaaacaaaaaagttttctttctttttgtattgtgatgataggcataatttaatgataataaattaaatttcatcaaatagccacaataagttttgaaatgtctcaaggaacacacttttagctagcaaaataaaattgcagttagaaaaatcaatgttgtgacagtggtaggagatcgatatcgcaaaaactgtccacaccgcatcatactaaaaaatttgagacatctttaattaatgttcgtcgtatgcatgcacttagtagg

SEQ ID NO: 70175 - DNA, 1722 bp, Cannabis sativa
ctaggtatcactggtgccttttaacatttctcataaattaatagctacattgttaaagagaattggtacgagacacttagtacttaactttaggataatttgttagcgattttttataatatttattaaaataaaataagtaaaacttaatactaatttatactaatagcgatataacaccttaaaagagtgatatcatttgttaaaaatatgttttgatataccatatcaatttcaatttttagtatactttttttttaataatcatgtaagttataattatttaggattcatactatattttttttttaaaacaaaaattgagttatttacaataccgaaataaggtaaaaatattttgttgcacgcataactattttttttatacgtgtggtaatcggtaagtaactatttgaacattaattttggcattgtgatcaaatttattattgataataataataataataaaagaaagatcgattcaagtggattaactaaccaaattgctcgatttattaagtgttaggatttataaccttaaaaacatgtaaaaacatttatgataataaatattagtgaacattttaatatatgcttcaatgttaatttatatataaatattgaaaaatttcttactcatatatgaggttgtgactctcgtattgtacaaagaattaagactagctatgaataaaatagtcagtaacatattaaagttataaaatatttaatcaacggttgctagtatggttcactgacgctcgttattctatgcaagcaatcctaggattgctgatgtagtatgacaattaagtgaagatgttgtatataatagagattatatataacatgaatcgatatataattaagttgtctttatatatcaaacatgtcgttcattataaaaacttaagacatatcacaatgatgatcaatagtataatgacatgaatcctaatagtaatcgtgaactcatgttcatgttattagtttctttgattccctcttaaagtttctcagagaagatgattcttaattacaacttctgttttgggaagctaataatatggatggctacaaacttgatttacaatcatggaattttgactttcctaacgaatcgaatgttggttccctttaagtgttaattctagaactaaaaagttgtgcacaaatttagattggatataaattatactttcattgataaattaatggtactaaaagatgtaaattattagaagggtaaaacgataatttgaccaaaactaattatgaactaacagaagaagggttaatcactcgtgctaattatatcaatggacactgcaattaaactcaatatatataattctataattactatataagtgttcgattttatatttatagtagagtaattatgaaatttataaatatgactatttggttgatgagattcaatatataatataattttatatcagttatttatttaaatatttaaattttattatttaatgtttaaataaataaaaatcttatttaattaaattattattattattttattagtttgaattataaaatgggtatattctaaatcattatatacgtataaattagggaaaatagcggcataagtatcaaaagtttcatatttatatgacttaagtacccaaactttttttttagtggcaaaagtgcacaatgttcacttctgttagtatttttagtacc

SEQ ID NO: 70176 - DNA, 1310 bp, Cannabis sativa
  modified_base (38)..(42): a, c, t, g, unknown or other
ttaggatgttaaaccacatacatggtagtaaatctagnnnnnggtaaaatatattccaacagattcttacaatttctgttttgggaccttataaacaacatgagtagatggaaacatgttatacaataatagaatctaagctgtccgaaaggattgaatattagttcccttatattgtcaactataggagtactaacagttagattaaagtctataactagattatagattaactgttcacattgaattaatggtacatacagaattaagagataattagaagggtcaacgataattttgatcgagtctaattatgaattaatattggagggaggagtacttatattgattatatcaataaaagatgttattacatatcggtcaagtcatgtataatcaaattatacacaacacttttaccacatatatatctatccacatatgcgatgtcaatcaaaatcacacaacctagattatagtagatagtaatccgtacttaacagttctatattaaagattcttttactttaatacactaccgactagttttattcatattgtataatcttaattctcttgtacatccttacaagattacgcattctccatatgaataaagaattttcagatatttattaattatactattataattatttattcatttgtcttattattatccattaattactttcttttagggcataaatcccaatacggggtctgggtctgtgttttggtcctgttccgagtctggttcttgggtcaaggttcgagttcaggatttgggtttggggttaggtctgagtccaggtcatccagttttgggtccggggtctgagttcgggtttggttttgggtctagggtcttagttctgcttcgggttagggtttaaggtccaaatctggatttggatcgagatcgggattagggtccgagtctcgggtccagggttggggtcgggtccagggtcggggtcggggtcaaggtggatagggtcggggtcggggtcgaagtcagggtccagggatctggtatggggtttgggttcgaagttcaagtgtgggtcctgggtctgagtccgggatctaagtccaaatatgtgaaaaaaacggtaaaaaataatatgttaaaaaaattatttttgaaaataaaaaacaacatttttatgttttctgttttctaattttttaaaataatattttcaaaaaaattattttttaaaaatttagctaaacacacttattagtttttaaaaattattttctatttttaaatattgaaataaatttttaaattataaagataa

SEQ ID NO: 70177 - DNA, 1433 bp, Cannabis sativa
taaatcagttgacaaaaaacatcatcaacactaatagtttccattttttttttaagataatagtatccaaaaaaaaattatttgcactagtgcctatctttacttattaattgctttgccaaacaagttttgcaatagacatccagcaatagtgtatatcacattatctattatatttaaaaattataatgcaatcatataactaagtatatgtgtattgtacgtcattttagtctagtattttttttttttttgataagtcattttagtctagtataataattataaatgtgtgtattttataaatgtgttcatctaatttaatttgtactgttttacttatagtgcatctaatttatactgagtacatgccactacacaaaaaaagatttttgcttcggtaacctgtttggtatactaacagcaagtttgttttccccacttctctccatttgttgatgcactactctattggggtttagattcattatatttattttggactattagcttcgtgtattgctgttctttgttctttgattaatttttatttatgtgatctgggtagaaacgtttgttagcattgtgactatgtaattgtagctttattacacaaattgttaatgtgatcaagaacttgtattgggtatgttttcatatggtctcttttctctatttctgagcatttgactaagggacattgagttagtctgttaatgcagaaagtcaggcttttcgatttcaaaatttgcttttttggtatgtttagtctaatgtattatataaatttacagatgggaataattggagaatgtgcaatttcaagaaccttgacattttaggtaggatttatgatttacatattagaaataataaagttccaccctatgaatacatgggaaacataatgttcttgtgcaagaaagggatgtcccaacatttcataaaatttggttttgaatgttcccaacatttcataatgttctgtgttgtagatcaaaaagatgaggaaatgatatattaaaatcattcccattcacccttacctgtttatactatgcagacgaccaagctttcaaaaaaacttgccttgcgaattgatgggatggttagagatttttggtggggccatgagcaaggaaatcgaggtatctgccttaaagcctgggatcagttgtgccttccaaaatctcacggtggccttgggtttaggaaaaccgtggagatgaaccaggcctttttggccaaatggggatgggatctcctaaatgagaatcagtccctttgttgtcaggtcctaagtgcaaaatatatgaggggcagaaagttttttgattgtacaattaggagttctgactcctggttctggagaaatgtcgtgagtacaaaagaaatcttgaaaaagggggcttgtaaactaattgcgaatggga

SEQ ID NO: 70178 - DNA, 4910 bp, Cannabis sativa
  modified_base (4610)..(4616): a, c, t, g, unknown or other
tagggcacaaaacccaacagacctattcttccaaaacccaagaagataaaaaaacaatgggaatagaatagaataagcattcattgcattccttgccgcaacaattattttggcagtcctcaaagaattataaaaaacaaatatcatttcctcgttcaaatctagacggccaaaaacccaatggctctctttcctaagatttataatgaataagatatggttgacttcataccaaggcttagaacaaggaatttgtaagcttctaatataatgggctattgggtgagcaacatgaatgtgagacattttcgtttttaatgacttagccttgtagaatctatggtataaagactaaatagaatcatcaaaaagacaatctactgtagcaaaattttcagtaatagtagaagaatatttttctttttttctaaggtaatagaatatagtgttcatgtgctaaaacaacacaataaagaaacatagtatgaacgtgaacaaacattccaataacataataacaaaagcaaaactgaaaaaaaaatgataaaacaactatattaaaactacaaaaactataaatggatttaaaaatattaccgagtcattgataaacatgtcacagcaagataaaactaagttttatcttcaacataatctacacctaatctgaaccccggggaaaacttcttcgcaccatcctcataaacattataagccccatataaaaaacaaatgaatatgaaaaaagatgattcaaataattggcaaaataaaatcaaattcatacaaagaaagataaaaacagaataaagaaaattatcacgtaggatatttaagcaatcctttgctaatccaatcatcaaacttagtctcaatttcaggagagacgagatcgaaaaaagaatcagtaagagcataaaggccttcacatacgtaacaatcttaacatccatctcatctcctgtagattaagaacttgaggacattacctctattggactgctcttcaaatcagcagacccaaaatcaataaaaggagattttaatgtcagggcacactttctattgtccaatagaggattacaagcgccagtgtcatcctcttcttcattagaaacattggcatctcatttttgaattacctcagcatgaatggaatctggaacctgatgaaaagaaagataacaagaaaaaattaaaagtttcaaaactctacaacaactgtaaaacaactactagacaaaacacaatctgaaaaaatataaataaatataaaaaaaaaattcaacttacattgattttttcaacaacctccaaaccaaccgaaacaacttggtcatcatcaatctcatgcaagcttaagctcttgaaaaaatcatctccctttacatcaacttctttgtccttgacattatcaacatccttggacttatcttcactacttacaataacatcaccttgaacctccccaatagtagaagcatctgcaacaaccttatcatcacactgattttcatcaatagagccagcaccaccatcttcacccaattcatcaccatcaatagactcagtttcaatattctctgaatttggtaatcctttgtcatcattagcatcctcagaattagggtcatcaatatcataaaaagtctttacctgtttaaaaacagtaatgtaactgaaataaaacaagaaagaaaccaaccataatagaataataaatagaataaaaacaactaaaactatgaaaagatatacctcaacagaaggtcggtcataaatgacagtaacctttttctaaataccttgagtaacagttaacaaagacttgaagttaagatcaacaaaacaccttaacgaaataaaatcttcggccaacgattcttgattggaaataactaattccaacttagcttctaacatttctatattgtcagaattagattgttttgaagaatcggtctcaaaggttggctttaatggagcacgatcatctagagattcatccaaaaataatcaatccaatttcaaagacttcatttctttattagaaggacaaatgttcttcaactttaagtacataaaaaagttgcaaaaattaaaaatcaaaaacaacaaaaacataaacaaaagaaattaacagaatgggaaaaaacaataataaaacaatgaagaaattaaacatcacctgctttaacgacaaataaaatatcttgcctttgaaatccctaaaagttggatttttaggcccgatatcattgatccaattgagaattgtgggaataatagaagcaacttgtttgcaaaaaaaaatttagcatcgcgggacaacactcataaaaccatacaataaacacccacgggcaccccaaagctctgtaccaaccatcataagactgaaccccctttttctctttcttatttttcatcttgatactatgttcaactctacccttgaatgaatcaattgttaattcaaacgactccctaccccagcaataatcatcccaccgaccgctatcaatgatatctaattctgacctaagaacttctttttcaacagtgttacttagaagaaacagtgaatgaaatacataacgatcaatttcaaaccaacaaattcatcatggccccacctagtgcccaaaaagcatcctcaagatgtatggtcaattgttttagttacaagaaaccatacatcgaccaattggtttgattcctgggtaaataatttattgcaatcatcaaaacattccagaccagaaatcaaataaaactctactacattaaactgtatacaacagccagcaaccttagcccaaaattctttcgaattgggctgattaacctcccgtaaaagatggctgtgcaaaatttggggatggaatctgaactcgggaatatccaaaaatgaccaaactgggtatcttcgaacatcttcaacaaagtacccgagatagtgttcttaatgttaagaataacagagtaagtgcatgtagaaacacacttggatcgataataatctctaggactaaatttgtatacccaatcctgtatacaaaaaaaacgaaagataaaataatgaatagacaaatagaagtttcaaaactgtaatacaactaaaaagcaatcatgaaaaaacaatcatacatagaaaaagtaaaaaaaaaatacataacataaacatagatgaaaacaaaatatataaaacacgtaaaaatcataaaaataaaacaaaaggagtagaccgccccaataaagctccttaaggtaattcttatatttactacttgatgttatatatatatggataccacacagaacataaatgattaaaagatgtgaaaaatataaagagaaacatgatcaatactaaaaaatattgtctattaatttatagtgtttaaactgtaaaaaaactacaaaaaaactgtacagaaacggacgcacaaatcaaataaacaaaatgaaaataaacacacaaacacatatagaaatcaaagcaaaatataaacgacaaaacagataagaaaatttaaatctggaaaaacaaaaaggaagaacataataacctaaacataaaccaaattaaaataacggaatgattaaaactaaaaataacaaaaaagcataaaaacaatataaaaaaaataacttagaaaatctaaaccctaaaaaatcaaaataatatacaaaaaaccaaaaaatacaaccaaaaaaagaaacaaagttggggaaaaactaaaaagaaactaaaaacaaacctccaacccatgatcatcttaaacattctccttcttgttcttagaagttgggaaaaatttttgaggaacagaaaatttagatttcttcttcgcaggtctacaatcttgtttcaataaaggaggagcaaagtcggagtcatcatcttctactattgggagttttcctttggacttatttgctacaaatttaacacccattatcgaatttttttttgcaatagagaaagggaggatgaagaacgagtaatagccatgattatgttggaaattgttgtgctccaatagaaatatcaaatcaacaagattatagctctatgacaaataatacaaaggataaaaatatagattaaataatcttacaacactaagcaaaatatacacataaaatagagaatatagagagaatagaaaaattacaactcaaagcaataagctacacataaacacaatatataaatagcatatatacatataagagatgtgagatcaatctcaatatcacatacaccacaagtgtataataggggaatcactaaacttgaacaagatcttacacctttgtccaaaagcttatttccccctaccacaagcacttagggaaaagaaaagaatggaaataactttctggatttatcaagcctaaagtgtttctggaaatgtgctctcttgatagaaacttcttgtcttccaaaatgaacccaagatctctatttatagtattttgaggatcaaatatgaaaatcaaagtctctccaccacatggctgttacaagcactttaattggtgtttaatgggataaaaatattagaacaaagagttggaaatgttaattccatttttggcannnnnnnttgacaaaaatattttattattttttattaattttggatggagtaattaatatggttttcttattttgtgtattcaaacatagaagaaaagttatctagctttcctatttttggaaaaagggtaaaaatggtaagtttggttactcatttcttttttatcttacaagctggtattttctgatcttgtatgattttcccattttctcatatcagatttcttgaagagaaaacaggagctaaactttccttctctataaaaggaaagttgtacttactgcccacgattctgtaggt

SEQ ID NO: 70179 - DNA, 2387 bp, Cannabis sativa
  modified_base (1983)..(1990): a, c, t, g, unknown or other
attggtttaagataccatcgacgatgtcaattgtcaaggctaagatccaagacaaagaaggtacttttgttgattctgtatttctgctcatcaaggtcaatcttaactttgaaaactcagaaaatttagttgttaaagagttttttccgccttctcttcttgctggttttgaacacagaatcaacctaatacaacgggacaatcttagctttttttgctgcattgtgcaaatgaggttatacttgttcccaacattaaattttccattctattaactttgtcagctgtgcttttttcttcttttcagttgattttcatgaatggtacatcatacacatccatcaccattatatctatttcatatttctcgtggggttagcccttttcatgaatgaagaagttcaactccattggcttgtagtttttttgctttgttttcacatgttggctatatctaggattcttttgacttggaatggtttgatcatagtttctagtgaggaagattgaagaaacaatttggtgtgttaaggtgaacttctcattcattttttgtgaagtaataatttttgttaagcacggcccttaggatcacattctcgtggatctcttcaacccttactaatctttcttgttatttctcatattttgttgattttaattttctcgtttgttatttttcgttagtgtaagtgaaatttgtttttttaattaggattggcaatgatgagagattgagaatgtcatgcaccactctgatttaattctgtgctgagactctcctactacccattattttctgatgcctctcttcaaacccctaatctttatatggttatctattttttctcctgtttgggtgattttcattttctcgatttgttatttttcattattgtgcaagtgaaatttgttttttttttagtttcgattggcaatgatgagagattgagaatgtcatgcaccactctgatttaatcttgtgctgagagtctcctactacccattattttctgatgcctttctaaaaatacttatcaatttcatgtcacaaatgctagtagttagttgcacatggaaacaaattgttgaacccttttttgctagtataatttgcatctgagggcatcttggtttcctaaaccaatctccatttttcaagtttgtcaattgtacttttgtcgtgtgcagttgaacttttgcgttggtacatcagaacgcgcaactctaggacagagtatatgaaccaactcttgattcgagcagcccctacctagtaaatcgaatctcacagcttctccacagggttactatccatgcataaccaatttgactcccaaatcggggccttagattggcgattagggagccacatcaagttatcccacaaattattgcatagtatcccatacctcttgccacagggtacgctgaggtaggtaaggagcttggccaggagtggacccatcacctttatagtatttagacaacaatatcctggtccacaacatcatgactcgaagccaacatccatccaagtttggcaaagaggtgaaaattcattcaaatatccaaaacgcctaatatcaagaccactacacctcttaggcttagaaatggagtcccaagtaggggtgtccaaaaaatttgacaaactgtcaaattaaattgaataaattgacaaaagatacaacttgaataacctaactaaaaatctaaaacgcttaataaatacatgaggtgggttgaataaactaatttatgtacttttactaaaagcccaccgtagtccgatcccatcgcaaattagggctagctatggtcatagtcatggtcatcatcaccatggtcatggtggtgggtgttgttctggtggtgaacccaagaatgtggaggctaaagggtttggtatgagaagaagacgaagaagaaaataaagaaaattaaaaaaaaattatttttaaataatttatttatttattnnnnnnnnttaaaaaaattaaaataataatttgaactaataatattttaacacatggtaattttaaaaaagtaaattaacggacaaataaagtatcaaactaaacttatctaaattttaaatattaaaattaatactcaaatataattaaaattatcaactataaaatctaaatttctagttaaacactataaaatacaaattatacatgtaaaataatttagctactaaccgtaatttatgtattggcactcgttgatctcttcctctatcttggcgagaccgtatctgacgattcttccattgtagtcttcggctacgtagaggagttcgagccatgagaggatgtggtagaggtagtattcacttttaaagttctatgtagattcttttcaaaaaaaaaaaa

SEQ ID NO: 70180 - DNA, 1592 bp, Cannabis sativa
aagtggttgttctatttacaagtttgagggttgaggaggaagaggtggccatgaatgttgttggccgagctaagaccaaagatagataattggaaaggaagattgatttcgccattgccgaaatgagaatggtgaatggtggtctctctctctctaaaatctgggtttaagcatggttttatcagcaaactcgtttgttgtttctggtgtttatgaaaagattggttttttatttttttctggtctttgggcgttttatatcgtttgttgcaaaagtatttataccttttttttaaaaaaagaatcaattatttatttttctttttttgaaaagcaattatttattgaaaaatttttcattttcaaaaatcagttttacgttataaatatttacttttaacctccaattataaataaatacttaaatttaatttttaacggtaataatattgaaaacttcagtaagtatataattgttaaattttaagtaaattgttgtgtcttttaagtgactgattatttggttcgtttttctaattgtagtttgtaagctattattttagctaaatgtaggaataacaattcatatttatagatcgtatttgtattgtgttgagacttaggtattacaagcaaatgttaaatccaaaccgaactcatttattaatcttgtcaaaaactaaacgtcaaacttaaaccgtttataaatagattgacctgaccgacccgttaatccgtgtatataaagaattatacttaattttgattaatttatcaacttattaagatatttatgacaagcttaatatatttacaatcttatattaacactttttatgagtattttaacatatttttatcttatttaattaaaaaatataatttacttataataaatttaagagtgtatactcttacctaagttattttcctattattttattttagagtaagagtgtcaattcaaaataatctatttaataaacgttgtgttaatccaaaaatgagccaaacacatttaaggcaaacctaaatccgtttattttgtacaggttttgaattgtattatcgtgacccaaattgccacccttagctaaatgttattaataaaattttattttttgtccaaaaaagaaccaattatagtttcttttcaaataaatattaaatattctcttaaaaaataataaatatatttatttattgatttggggccaaaaataataaacatatatgtcttctcataaaagctactcccaaaacttttgttgcatgaactgttcttaataatataaattaagcttataaaagttttctctcttccacttccacacaaccgaaccaagaagccaagaacataatctcattctcatctgagactttgcccgtttgagtacccaactgaacaccctaaccagattttgaacttcataccccaaccccactctcttctctttcaatttattttcacgattttaccatttggggctttttttctcttgtgggcaatggagtccacaaccacaccatcttgggaagaagatgaatggaatctctgcaacgacaatggctttgtctataagcgctggagg

SEQ ID NO: 70181 - DNA, 1518 bp, Cannabis sativa
tgttgtaatcaatacaattaatatataaaatattgtaacagtctcattacgatcgaacgactgtaagtgctatctcctacctataagtaggagctttcccctccattcaaatggggttgggttggctaatcttaacaaagaaacagagtaagagatctctttcagtattggactacacaagtcgaaacctactgaacaactatatttttatatttttgttatatattatttacatactcacatatattatacattatattttttgagtactcgctattctaagtgagtactcgcacatttatcttcaggtattcaaatgacctttgaatgctcgcatattttcgtgttgtctaaattccttcgacaacaatgtcctattcttttatatgacattgtatatattgtatctacaatagacattctatatccatttttgagaaattaaaaatattttataacattaaaaataaattttaatttaatagtctattgtatacatgtaaaataaagaaatttttacataaaaaatacaaaaccaaaaaaagtttccaattaaaagctcgtgattctctctgtttcttctgccatggcgaagaagaaaagagtcggtcggaagccagcacttcgatctatgacttcggcgactgcggtcgaggaaggagtggtggagacagaagatatagggtccatggatggtctcaagttgatagcagaggctgttcattcaccaaattcagtagttagggcgcaagattttgagatgaggtcaatggttcatacacctaagacagggtttgattgggcaaaagaggatgagaatgagttaggggcggaacaggatcaattcttagcttcagcgaagaatcattggtactcattatcaaaggggcgggttttttccaaggattcgaagttgatgtatacagagccgatagtgaggaatggagtcaggatagctcgtatagatcttgaggaggtggttcgacaggcaaaaaactggaaatcggtagttatctatatggttcttggagctaaccctcctatggcagtctttgaggggttcatcaagcacatctagggacatctaggtataatgaaaattgttagaatgaaaatgggattggttatggtaaaattcaatgatgaagctataaaagacaaggtgctcgaaacgggggtgattcaatttgacaagaaaccagttattgttaggccatggttgacggacttgaacacggtgaaactaattcgtactgtaccgctttggattcgcctccacgatcttgggttgcaatattggggaaataataacttgagtgctttagttagtacgattggaaatccgattatggtggaccaacatactatagattgcacccgagttcaattcacaagagttcttgttgaaatggacattacggatgatccacctcgcgcatgattccttacctgaatgaacatggccagctagttgaataaagagtatagtacgaatggctccctgttaagtgtaagaat

SEQ ID NO: 70182 - DNA, 2043 bp, Cannabis sativa
tgcacacaataaaagaacgtcttgattggtgttttgttaacaatcattgggagaattatttcaatacaccacaagtccatcatcttgattactatcaatcggaccatcgagctataaccactgcctttaatcttctctctgcccaaacttgcaaagctaaacgtagaagtcattttcgatttgaaaaaatgtggctggcagaccctgaatacaaagatattattgttgatcattggttgaactcaaccacttcagacccgattacagttgtttccaacaatctgaaatcctgtgctgaaaatttacaaagttggcatgaaaggaagtacggcagcatgaagaagaacatcaaagaatgccaaaaaaaggtggaaacactcaacaactcctacattaattctagcagccaccttgatgaacttaaacaagctgaaaccattcttgatgagcttttagaacaagaagaaacctattggcaacagtgctcccgagtggattggttagcttgtggagacagaaatacaaagttcttccatgccaaagcgaatgctcgaaaatccaacaaccgaattaatttccttattgatgatatgggactcaaagtgaaatcaaatgctaaaatttctttggttattcaagattattatgctgaacttttttcgagctggtgacataaatgatttggctcttcaaactactctggaatgtattcccaatatggtgtctgatgctcataatgccactttacttgcacccttcacagctatggaagttgaagctgccatcaagaacatgggatcggataaaagcctgggaattgacggaatgtcagccatgttttaccaataaaattggtcaattgtaggagatcttgtaacttcggctgtactcagtatcttgaacaatggagctgaccctcacagttcaaccgcaccataatcactctcataccgaagatcaagaaaccacaacgcatgaaggatttcaggccgattagcctttgcaatgtcatttcaaagatggttaccaaaatccttgtggctagattcaaagagattcttcctatggtcatttccgaatcataaagtgccttcttacctaaccgattgataacggacaacattttgattgccttcgaattggtccatgcaattaaaaataaaacatcggggcgccatggtattgcaactattaaactcgacatgagcaaggcttttgatatagagttgaattgcgtttcttggaagaagttatgaggaaaatggggtttgctaattcttggatttcactaataatgggatgccttactattaatagcttctccttcattgtaaatggcgaagtcactagtcaagtaactcccacccgaggattaagacaaggttgccctctatctccatatctcttcttgatatgtgctgaaggcttgtctaggctgctccaatatgaacaaagtattggtactctacatgggttccaactcacacgccgagctcctaccatatcacatttactatttgctgatgatagtcttctattttgtcaagctgatgaaagctcctgccttgctatcaagagagttttagacacttatcatcaagcttcgggtcaacttctcaatcctgaaaaatctgtgatgtctttttctccgaatactacattggctgcctaagttttctttcatcgacacctttccatgccaatccgtgagtgtcatgaacgttaccttggcctaccctcctactcgggtagagacaagaaagagctcttcagcaacattaagaaacgaatttggaaactcatgcactcttgaagtgaaaagatattctcttcagaggtcgtgaagtcctactcaaggctgttgttcaatctattccaacatatgccatgagttgttttcaactaccgggttacttttgcaaccaacttgagagtatgatggctaatttttggtgggggatgaatgcaaatgggtctaaaatccattagcgctcgtggaatttgctatgcaaaacaaaaggtgagggtggaatgggttttcgg

SEQ ID NO: 70183 - DNA, 1431 bp, Cannabis sativa
gtgtgaattgaattggatgaacactctttttatataaaattatgtagcgagatttacttcataattgtaaggaaggtatatttatgggcttaaattttatttgttttcatgtattttgaaactttcgtgtgtgactcccaaggaagcctactaaaggtggagcgagaaagtaagactgtttggaatgaattaatgctaagagaatgataatatgaaacaataacttttgtttgttttaagggtttaaccttgaatgttattctcttataagtaaaataactattttaaaaaggaataatattgatacctaaaaaatagtgggattgaattattcacttccattatactaatttagatagtatttttaattattaaataaatttaaatactattaatatcatgaattattataaacaaaatattacgatatatatttagtatatgagattatttttttcgactgagttatttttatgttattaacaataatatatatatatatatgtattatcttaatctttacccacatgatgtgacacctctacgtgaccaaaagcaaaagacacgtgcaagacaagtcagcactaaccgaccagagtagtgccgtgcaactctctaaccctcaagatcttagggttgcgagatggactcaaacaagaagagcatgaatacttacaagatccacatcttcaaaattatgagacaattaagttcatcctgatattgaaatctctaacaaagctacgaggatcatgaacaatttcataaaaaaaaaaaacagagatgcacaaagtattgacaaggccttggtcaaacctctagttggctggccaagggtgacaacccatatactgggcaacctccaaatatggctgaccggccaatcgtattacgccctaacatttgtagattttctcgtgggccttgtaaaagattccaaatataggaacaattcaaaacacccacaaaagtagaaaagttttgccaaaatatatctgccctatattctatttattatgtatttcaaataacaacttgtaatgctctaacattatataaagagccttaaccctacgtgaaaggaatctttatcagttcattcattatatacatgcacaatcaagagttcagaagcactaagaaatcagactctcctcttcacaagtcttctcatgcttgttctcatttttgtatctcaacagagtaaatacaaaaatgagtcattacttgatcaaagtgacagaacctctataaatcttgtgtctttcacaattattatcatttaactcatgacagttataaataaaattagatcctagtcagactctatgttagttggctaaattcacagtcaataaatatgcattatacataaattttatgcgaaaggtatacaaaaatgacacagcgaacaaaaataaataacacagt

SEQ ID NO: 70184 - DNA, 1580 bp, Cannabis sativa
tgttgttgttgattgaatttgaaaaatatcttagagttgagagtttttttttagtgttgatttaaaatcgacaattataatagaaaatttgatttttacgctatagctgctggttttaaagggttgcatagcaatgacgactattaaagagggacgggtattatgttcgcgtcggtggacatgcgtcgattttagaaactgcaacggtaagaataatagatagggctatggattaggaaccaaatttttgtttatatgatagtttttaaatatcacctattttctgcaaatgttatttttgatatttttaattatgattaaaaattagttattttttaaaaactatattatatattattattttaaaaataaaagttgatcatgttatgatagtacataatattgtacacataaattatagaaaaatatgacatatacttgtgcgatagatcatttcaaccaattattttttatgattgattttcggagcaaaaaaacagagagtaagatgcttattattaatggtaaattctcgaccacatttaaagttcgaggaacagaaattcaaaaagcaaattacgatcgaactgttccgatccaaaaatctaaagtaccaacattaaaaaagaacaaaaaaaaaagaaaaaaaaaaagaaagaaaataaaaggatctttcaaaagcctaaatacaaatttaatcagagagaccgtagacccttttgctaatatataaatatatagctcagaagagggtgtgatgaaccactttacttagctatacaaaacgacagtgtttgacttagactgggggcttgtaggcaatgaaactgatgcattgcacttgacggttgttgtcgaagccaatgattctgatatgtgcgtcggggtactccttcgccgcctcctcaacctcagaaatcacctgagttgcgtcagtgcatccgtacatgggcagcttccacatggtccagtaacgtccatcgtagtaccctggggatctattgttctcacgggacacaaaagggtcctatatacatgtatacattcattaattataaaataataaatgtaataattacaattacggagactaattaattaattaactaataaccatcagttttacttacatcgatagtgaattccaagcagggaatccatccatttcttaggaggtactcaacttccttaagcaatgactcaactgaaagtggtggaagataggaaagggtctcgaatttcttcacgttccttggtggccatacctttttaataaaatttgttcacaaatatatatcactaattaattacttcaattaactaattataaacaaaattagcctttgtataatttttttaattaaaaaatcttcatcatacctgcatgcactgaactcttccaccgttgctggtgatggaggtaatatcgttgttggccttcttggtgctggggaaagcagcagcagatttgaggccagtgaagggtgcgaccatggtggcctgtgctgggctggcacggcttacggtggcgacggtggcagaagacatcattgaagaagccatagcttaatatgccttct

SEQ ID NO: 70185 - DNA, 1701 bp, Cannabis sativa
gttaacatgtaatcataaaacaagtgcagcagtttatcgctattgtcattgtggattaagtcactttcttatatacaatacaatgcaagaattactcatcattcatctctctcgctctgttctttcaatagaatgagaagttttaatgtgacttgtgttaagtgtttatgaagtgaagtggtgtgacttgtttcatagttcatatgctaaattgttgttataattggattatgtagatgagtttttggcatgttttcttcaatatgtgaaaatgtgatgatgcttcaagttttgtggacataactactattccaaacaagttatttgggatacaattttgtagcatactaagcaatagtgagattaattgttttttattacccaaatttatgttagtgtgtagttcttgaaagctttttatctcttctgttgaattttccttaggtaagaaagcaaacatcggaatgtagttgatcttggttaaatcaagctgttctcaaggttaatacaatgatttctttcttttttaaaaaaaaatgttaataatgattttttatttccttgtatattcattcatttaatagaaatgacaaatggttattatttttttaatcaagaaggaactaacttcattaatcacaaacaaatgcaatctttacaatgcaaagccaggaaaaacaacctgctttttacaccaaaatgctctctatgtatctcttctcatgggctttcaagcttctatttttagctatttgtaatctatattatactataatctttatttcctgtgtaacttttgttgttgtactcgagtaattgttgaagaggcagttgtttctattgctcaaaatgctgtaaatcatgacagccattatcgaaatatgcaccctttgcctcttgtctttgctggtttgcagcagccattgctgccaggaattgaaaccagtcggccaactcctaactcccagccacaaacagacctgctccaccacctactgtgaaaaatagcagtcaaaaaacagatgagcattgctctcagctgctgtgtcacaaaccgggcatctaatgttgtcaagagtgatttgaaattgcacaaacttgtcacgagttaaaagctgagtattgatagcttaccaaaaaatgaatttatgcttcggcatgtttagggaattctagatacttttgctgaactcaaactgagtttggggaaggcaactattaaacaataatgtcgatttaaacctgttcacaccagcccctgccttttcaatagcttcccaagtgaacttgctccttagatgacataataaacgattgttacttgtacctgcccttttcatatttggaaagagaaaaataattgtgatactcatgcacactatcatatacatcttacgtgttatataaatgtatatttatgttgtggttaatagaatttattgtgtgaaatctgttagttttatataaataacatttcaagtaataatacttatgattaactagtaaataatataaaaattaatttgttaaatacatataggaaagcaaatgtgttatgctagtactaatacttaaaataaatattaaacaattaaaacaataattctaagttttaataattaatatataaaaattaaagaaatttttacatgaaaaatcctttttacacactttattacaaaattaccctcacacgcctat

SEQ ID NO: 70186 - DNA, 1013 bp, Cannabis sativa
tatgataactaatgattcaattaattaacttataacaaatgattcacttatgtacaagtaagttacgataatgacatcaaatttaaatttaaataattagttatatatgtatatataaaaggattctagaaaattaattattttgtattttttttggcactgaagttttggataaaagaaagcaataatatggagtcgatttctatagaagatggcgaatattctaatcacgagaacaccttgaattttctcaatgcggtgaagtccgacaacatagactggattcgagatctcataagtttttcatcatcatcatcattacgagctctaattgagaccaacaacaaaaataatggtgacacacccttgcatgttgctgtaatgttagggaatttggaggttgtaaaactcatcctagataacatgaatattaaaattattcgtgatctattacaaaagccaaataagaggagaaatacggtgttgcatgaagctgtgaagaatcgaaacttggatattgttaagcttttacttgaaaaagattcgagtttagttaatttcaataatgaagatggagaatcaccgttgttcttggctatcgatagagagttttatgaaattgcttttcatattttaagtaaaatcaacaatgtgaaaggaatattatctcaagagaagggaagttggtctggaaggaatggtttgaatgttatgcatgcagctgttattcgcaacaagggtctaaccgctattgagaaacgtaataagatcaaaggtacgtacgttcttcatattatgattattaattataaggtaaatactattttagaccttgtaaaagttatcgattgaaccttttattttgttaaaggacaaaatgaattctgtattttcaaaaatggtacaaataggattctaagtttaatttttgacaattttttttttttaatataaccaacttctgaaaacaattcctagctagcacaaatagagcagagaatataaccaatttt

SEQ ID NO: 70187 - DNA, 1076 bp, Cannabis sativa
tgatgaataaaagaggcatttttcaacttaccccatttagggtaatggattacaattcatcaagcattttcaatagtgggacctaaattgggttaaactttttagatttaaatgactgaaaaatatatatattcttatttggtgttatgatgatttgacttttaggcctaaaaattccaatggtttggctgaatttgtagtgttaaaactaataaaaccgtgtccaagccaccaagaaagagacctctctaacatgtttgtatctaaaagaaagagagacaagactcttatcatcatactacaccactttaaagaagtaatctcctgcatctttaagaaaattttactttaatttcttttataatgacttttattgtagctatttaaaattatttgtaaatttttttataaaaaaaattaaactaaattttttttatattataatttttaacttagaaaaattacaggtaaattgtaatataagtactcaaaattttaaatttgtaagtgatataaaaaatttagaagtaactgacataacatatttttgttcaaatctaataatatagattccaagtcttatatgtattctgtttaagtcatttgaatacttatgacgttaaaaagatcattgaatttttgtcatttatcaacttaaaattttagatatttatgtcactatttaccaataaaaaaaaaagagtaatatttgattacggttttagttaaaaacaaacaagagttatataattatatgtttttttttttgttttcctagtcactgtttggaaaaatagcagaaacaaatagatagtttagttattattattattattaccatttatttatttatttatttttccatatttaccccgacctagaagaatttttttaccaggctattttgtatatagataagattttatttttcattttttttttttgtggacagaatttgacaaagccccatcgaatctaaaagtgagagttagatatgtatggaaggggatttttgaagaagaaacaattgacataatttgtacaaattttccatatttattaggtatttttgcaaa

SEQ ID NO: 70188 - DNA, 1914 bp, Cannabis sativa
aatgtacgttggtaaaactttgacctttttgccagcgcagtttgcgaaatgcactagtaaacttttaccagtgcatactaactgtgcaagtaaaagtgacatttctttgttctttgttctacaatcaatattcctatcattattggtattatcattattagcactcataaaagatcaatctaataactaattagacagtcttcattgttttttgctacatatggatttgaatgtaaaatgaaaattgaaaaaaatgaatatataatattagatccatgtaaagataattttggatatgtgcccttaattaagggagtatgtttattatatatagaaattaagaagtatgaggaatcatgcaaggataaagctatagtggaggttgggaccataacgtggctgtataaaattttgcagttcctgcaagaaacaaacaaattaagaatttaaagagttttgttttgtatctacaggtgcatttactatacaagttggatcctagtcctattaaataaatgaaaaagaaaacaccaaaatcaaatttgttggtacatacacagaacaacataacgtcatgttacgttaccttaccgcatatatgtttatgatagataacgacagaattacagtatagtcaaattcaatcttgaataatttcatcacctttgtataacattatatatatatatataaaaaaatatttttttctcattcaaatttctcacaatcacattaattgaaatctcgtattagctcgtattgtattgtattatattaaattagattgtatatcatatttttatataatattatgttaaactttaatttatactaaaatattatatatttaagtgtccataaaaattaataccacacataattttatataaaaataatacataaatacaatttaatatataataactaaaagaaaaaaaaaaagaaaaaagtaaaccaagcatattgatggctatatatgtgagagagaatgtgggatgttttgaattaaagttgaggtttatatagattcggatataacatagggttagtttgatagatttttttatttgtttatttatatattttttaaaatacttgctattagaatttcattagggtacaatagttatataaaatattttaatttttcttttaattttcataatcattcaaaataatattttttaagatttaaattaatttgttaaaatttattaaaaaaatattaaatttttctatttttattttaagggggtacaatttgatagttgtcaaagtttaggaagcaaagttatttatttatttatttatttattttgaataataggaggcaaagtacttatatattaatttacaaagacacattaaaatttgaacggaaaaatgggaaaaacctaacagaatgactaaatttctttaaatgtaaaagttcagagaaatttttaacaaaccatatatattagggagaaaattaatattgtccaaaatttagagagcaaaattactaattattcgaaaagaaaaaaatcaaaactaaatttcaaataaaaaatatatatatatttttaatttcatcatcttcattcattacatttcattgaaaaagtaactaaatatttctgaaacaatataaaccattcaatagcactgacatatgcaatagcatataatcttcatctatattacattgatttgcttaaaaaaaaaattattggtgtttggaaataattactttactggttggatttatgaagtaataattatatataaatttttatattgtttggcaaaatagtttgtaattacacaaaaaaaaaaaaaggaaaaagccagaaaaatacaaaaaaggaaaaaaaaattacaaaaatactttgggccggcccattaaacatttatacagtccacatacaaata

SEQ ID NO: 70189 - DNA, 2006 bp, Cannabis sativa
caatctcaatagtttagggggcatatttaacaattttaaaagttcaagaggcatgatttggtacatgtcaaagttcatgaggtaaaaatcccaattaacttactttttttttggctaggtctcatgtcaagaaaaaataagggaaaaaatgggaattttttttttttcattgatacattttttggttttatttacatttttaccatccatatttattttttacaatttatgaatttaactaattaaaaatataattttaaagttttaaaattccaaaaacacaaatacggctttctccttgaaaaaaaaaacgtgtagaaaaacaattaaaactaactaaaaaataacatgacaacatgcaaattaactagaaatcaactataaaaaaaaaattataaaataaaaacattaaaaagcaacaaaaaaaaacaaggagcatattcataccatacaatatgtaaatcaagtaaaaatcaactcaaattaaactacaaaataaccaaaaatcaactcagattaaactacaaaataactaaaaatcaacatcgaaaaatttatcactatattttaaatatgtaaaaaaaataaaataaaaatagacatcaaaacaactatacataaattaaacaattcaattaaatgtatatgtttaagtcaataatggtttataaaaaaactacaaatcacttatttaactcaatatattgacaacaaaatatacttaactagaaataaactagttatcgagtatatataacaacaattgtattttaatataaaaatcaactacatatttattaatacattttaacttaaataaaacttaaaaataacacttaaataacttctaagaaatatatatatataaaaaaaaaaaaaaaacaactacactcatatattaactcgttatattaacattataaaagatagacaaaaacgtaacaagatattaatctcaaataatatcaattcaaaataaactataacacaattaccaaaaaaaaaaaaaaaacaataggacaagtaaattttgtaaataaatatacctataaatataagaggagattatatgtaatgaacatattacattcttacatattaaagttggaaaataacattgattttacagtattgatgacatgaatgttagagccaaaaatgagctagttatcaacatatttgtaatagatgcacttgtcactcttattcacttcaaagccatttgaaatgactaaagtatcagatttttcatgttactacttcagtgtctactttaggtcgtatagaaatttatctaacttgcaaaccttatgcttcgggcctaggatcacgaacccttcgggtttatccttgcatgttttctcttctaattcactattaaggaacacaatcttaacattcatatagtgcacaactaaattgtgtatggtagatgggcaactagtgaaattaaagccctaataaatgttgttctagagactagtgaaaaagtgtcaaataaatttatattctttctttgtctaaaacccttggctactaaatgagccttatatttgtcaatagtcccatcgagtttcattttcttttttaaaatccacttacaacctatagccttgtagccaggtggtaaatctactatgtgttgatttttgttagatacaagataatctattttatcatttatggcctctcgcaaaatgtccacatctaataaagacagagcttcttagaggttagcaggatcctcctttaatgtgtaagcacaaaaatcataaccaaagcctttagctaccctcactctcttacatcttctaggttcattgtctaagtcttcagtatgttcatccctcctaatcattggaatgttgctagattagggttgaggagcatcggtcggtttttttctaattaaaaattcaaaattcggttttccgtttggattggtgcaatccgaaaaccgaccgaccaatccaaaacctatcttaaaccgaccgttttgaacctcg

SEQ ID NO: 70190 - DNA, 2561 bp, Cannabis sativa
actgtagtctctgattctactatcgcaaagagccaaaccaccgggttgactaatcttggtgttgtgacttctcctgccccctcgacagcacctgcaccttcaacctccccaactgcttcgccgatccctattactctaccagttcctgctactccggagcctccagatcttgctcacgaggtgcccttaacctcaacaccggccctttctgtgcccaaccactctgccaacctcttggacgagaagaaaaaatgtaaactcatgttcccttctgtgcaagcctctagagaaaagagaagcactctagtatctgattctactcctgcaaagagccagaccaggtcattaacttctgtcccgtcaacaacacctgcacctttgacctccccaggtgcttcaccaatccctattgctctaccagtcactaggacaagcacaactctgggtgatcaccatgctgactccttagcttttccttccatcaatagtgggagtgcttctgtgaactcaactactgttggtggtagcaggaatctttcaaaataccagctggagatgacccaacaatatgggaaggccttcatgcaagcgtctcgagggatttcaaaagaggagtggaagatcgctacaagcgtggagggttctgatcttacctcttatacagctagacatgctttgctggttagcttttaatatgatgagttgttttcacagttctttccattcccatttctaacattattttatacaggcggcagtcgggatcacgcgctcaatgacccttgccagtgaggcagccgaaggggaaaagaatcatctcaagaacgagctgttgaagatgaagcctttggcgaataaggccaaagagtcttttaatcagatttctttagagaaagaggagttaactgtccaatgcttaagccaacaagctgaaattgaatccttgaagggtcagaatgctgatcttcaaaagatgcaggttcgagttgctaaagttgaagctcgtttagctgaagtcaaaacattgagacatcagattgctgagcttgaagttttgcgagctcgatctgctgaagttgaggcccgtgctgctgaggccgaggccctgaaagctcgagcagaagaaagtgaggctcaggtcgctttgttgacaaagaagatttgcagcctggagaggaactgcaccattctcacaaagaagacaaacgacctggagcgtgatcttgagcaaaaagccaaaatcgaggaggaagggcgttgtgaaatcgagaagggacttagagagctggagtcttcgcgtgattgcattttagctttggctactcgcaatggagagctcgaagctgcacttgttgcagccaagaataactctgctcccgctcttgatgaagttgctattgaggagcgtactgtcgagagcttgctctacaccatatggctccgacacccgaattttgatttctccttccttggagaggctgctgttcagactgtagcgggttggaaggcggagaactgtagacccagagatgctgactcttagccccaagcttttttgctattattattattattttgtaagggcttgtctttctacaaatattattttagtaaagacatatctttggtgctcaatgctcataaaaaagagtaccctttttgttataacttatatatatgttatatattattggatatggtgcttgtgcttgatgaggcttctttttattcaaatgctttgatctttttgtaattttgcggctgacaaaacttacttcatcttaacattcatccttctctgttttggtataacattatgccaaaataatattttagatttttgttttatttgtgatgccaagttaggttgctcgtagaattcttttgtaagtttcagtactcttttcgcctactaatggttaatattgtgctttttgagtttgaattatgataagagtatttttgagtttatgatgtggatgaaatagtttctattttgaatacataggtgttttgctcatatactttggctacccttgaactatgttaaatagtctcaatgaactatgatggctagtgatatatgatacttctagtagactttactagaattgtttttaaataattaaatattttactctcgaatgggatcctcatcatattttgcattctgaacttttaagtactcctaaaaggaataaattaaaggagactttaaatttaaaaattaaattagtatatattatttttttcaaaaaaattaataaaatgatcaaatataataaattaattaataaaaaatataaaaatatatttactatatattaatttttttaaaaaaaataaatacataataattaaattaaattatataattattttagtattacataataatatattgtaacacaaaaaaataaatatattaaattattaaatatatataatgcataatatatctgaaaatttaatataccgtaataataaaattatatatcataaagaaattataacaatattaaattaatactcaataaaaatatatcatcctaacaaaatta

SEQ ID NO: 70191 - DNA, 1192 bp, Cannabis sativa
attgtcttcaagttgattatatttaaaaaaaaatgtcaaaaaatgaacttagagtcctattatattattttaaaaaatataaaattatttttactatttaacaaaatatataattcaattaataatttttgtaaaatacataatccaaaataatattaatcctacttgaaatagagagcatacccaaaaaaaaaaaaaaaagactgcattagagtgtcatttttgaagtgatttagataatttgataatattttgagataaaattgaaagttatggatatccacttcttcttgccttatatagttatatgccatgttgttggcacgccttaagccccattaatttttgtaacataatacttttgggattggattacataaaatgaaaatggcatcatatcatgtggaatacatttcattttatactttttttttttaaagaaaagtcaacacaaattacacaatccttaattaatttatatatattacattccttatattcgttaaaatattccttagcttattttttctcttcctaaaattagtactttcaaatatattcattcccaaaactaacatagccaatatacatgacattgattttgagtatgatagtaaattttttcttaaaatatcaaaatataattatataactactaatttactaactgaagttatattgtatatcaactttattttacttattttaatttttactttttttttttatatatattctttaaaatatactcacttttatagataatattcttattatatcacttacattaatataaattatgtgttagacttaaatgaaatgtgatggtatattagacaactcacttacaaaagtaaatatattttaataaaatataatatgagagtattttttattaataaatacaaaaaaaatatttctcaacttattccatttactaaattgtccaacataagcaactctggcttaatctaggacccaccaaatttaggggccgaaaagaaaaaaaaaaaactgtttaaaatacatttacttttttagtattttttaaaaaatacacctattattttgagaaaattacattctatacttactttaaatttttattttaatttttactttcattttattattctttaatttatactcagctttataagtcatatcctcattagtactttaattataaaaa

SEQ ID NO: 70192 - DNA, 2016 bp, Cannabis sativa
aaaatatacaaataacctcacataatctaaccaatgtgagggataaattctagcagtttatgaaggactacaccaaaacatgtaacaaacactttgatgggttaagaagattacttactttgtctataatcaaaatggatctattgtgcaaatttctgtggagattgctgttgtcaacttccatggctaagtacttttcccaaccactggtgatttgaagtggattaaacatatcacaggtaacttttattgtttctgttactccttttcatttccaagaacacaataatagatattttgagttaaaaaatgaaaacttaagtcagtttcataatagtagtcttataaacacagattttgactatgaaagttacatctaacatattatatcacttcaaaaaaaaaataccatattacaagaacaatgtcctcaccatagattttgcatttatttaatagtaataattaaaattaaaataataaaaaaggtttataaaatcaaacaaaaattgaaaacagtctggaaactcaaatagagtatatcgaaatagaaatttgtggaatagactaattaaaaaagtagaaattatataaacttaccttcaaatgggagaaggtttagtcccattttttcattcatgggccttcctttgtccattaggctaatcctattaccaaagtagctccaatttattggtatataaagttagaacacagtaaacacacaaacatatatatattaagtttaaaaagaaaaatagaaagttgagaagaaaaagaaataccttctgctactaagaagagagaaaagagaatggttttctttgtatagctcagttcaaaatgagaaatgcaaaataccttctgctacttaatattgttaaccacttttttgttgtttgttctttttttctcatttatttggctataaatgatagcatgcgtgtacagtgtagtggaaccattttgggtgatacaaagtgcagtgcatggagttgatagtgtgggaaacaaaaaatttgcatgaataaggaaatgatcagttcagacctccaatctgaaaaggctatgtatttaattaagctcatcctattgctaatataattacaatcaattccaaggatgaggaataagctaaagctttcctttgtcaaaaaaaaaacattttgattttcaaagctccactataaggtgtgtttggttgtaaggaataaacagatgggaaatgaatgagaatatgaataatatttttaaaagctaattaaacaatagcttacattaattgaaattttgtactggtaacagagtataaatacaaattgatagcagctgagctgaggacattttggtgatacaaattacatatggacattgatactttgaaagacaaggaggatattttgcaggaataaggaaatatggaaagtttcagcaaataaaaaaaggatactcagaagatgttactacaaagatggtaatgtcaagttagttgggcctgattcagaattgatcttttatgttgttttggctgatggtgttgctccggtcatgcgtccgtgtgcctcgatgtatgggacgaggcttgctttttctggtgaagtttctctttcgggttctctggaggcgagaaaggctcctgcttctttgcctaaagagcaacaaattttgaatattggagaaagatattaccgttggagggaaagaggtgaggaattgggttgactcggtcaacccgtgccctttagtggagaatgtgggccctgtggtttgtgagggtaatggaggcccaaagaacaatcttttatccctctctctcaatgtcttaactgggccgagtgccaggcgggccaagtaatgccaattatttgcatgggccttcttcctcgacttttttaagagcaaattacctcaacatgcgcacttaataaaatattagaaaattctaccatgcacacccttaaaatggatacattgatgcacccttatttgttttagcatccgaaataatttttcagt

SEQ ID NO: 70193 - DNA, 1299 bp, Cannabis sativa
accatggcttgtgaattcttggccaactggcctgaaaggaaacatggactggttaaagttcgcaataaggaagtcccaaccacaattgatgcaatcaacacactctatgaatttcccgatctcactagagatgaacatcgattgagggtgattaaagaggatgaacatcttgatttagtggatgtagctgaaacagttgggttcctggggttgaggttccatgataatgatgggcaggatgggtcgccaaattttttgcatcggtgttaaataaatcctatggataaaaaatatggttgtattttgtgagtgcctggttggtgcctagaaagcacttttcttatgtgcaaatggatcgtttgaaatatgtgtacgccatcatgaaagggtacaagattaatgtgggtcaagttaatcgaggtagttttgaattgatggttcaaagcgccttgggaggtggacttgggttggctgggattattactgatttgtgtcaagcttctgaggtgaatgaattgccctttgacaacaaagtagtgccgcagagaaagatggatgtgagcatggtcaatatgctcaaggagccccatccctatgggcagccactaccaaaagctcaaccacaaggcagaaggcgtcctggtgaacaaagtgcaaaggaggaggaaaatgtgccacaacaattgcctggcccaattgatttagcgatgcagtacacacatgcacaacttaactacatcattcaacaaaacaaccatatgcagaattacatggttcagaggagtatatatgatgagagtcaagtcactcaacttaactctcttatcactcgcatgaacattgggatcgaggaccccaattatttggcgccacctcctcaatttcatccatatgatcatccgccaccaccgaaccccttctgatgggggtctcgagtaagtctctttcctttaagttttatttgcacatttgggacaatgtgaatttcagtttggggggggggacttaaaaattttaattttaattttttttgctttagttttgtttgtttttatgatttggaaataagctgaagatagttgtatgctgctgttgattgtgaaatgtcctgaaattttgaaactgtgttgtgtgcttaccatacagtttagtttgagcctttcaagcctaccataaaatgaatatccttagtgaatccttttgagcctaaacctgtctcgtttctttacccattgaactaaagatgtatgcacactgttgtttttgtcctcattacattttgaatggtatcataagcct

SEQ ID NO: 70194 - DNA, 1653 bp, Cannabis sativa
  modified_base (33)..(51): a, c, t, g, unknown or other
ttctgatctttattagtaagtaaatctgattannnnnnnnnnnnnnnnnnntagggcacaaaacccaacatgttgtgcgcatgcacacaagatgcagcgggtcatatttttccacttgcgttctgtgtcgttgattctgagaatgaccaatcttaaaaataggttttcaaaaacttaaaagaagcgtatggagtgtgagaaaatcagtgtctaatttcagacaggaatgagagcctcatcaaagcagcaagagaaatatatccagaaattacacacggatattgcgggtatcacctgttgagcaacctcaaaacaaccttcaaacaacatgctgccgagtacaaccttccattctttggagcagtgaaagtctatacaggaaagcaattcgaattccacatggtttaactagatggattggaaaaatgcatacgactgtacttgaaaaaagtcggttatgaaaaatggtcaagaattcacagcaaaaataagaggtatcccaccatcacctcaaacatattagaatcattgaacgccgcaaatttagaagcaagggagctaccaattagaatactgttagaatgcttgagagcattggtgcaacaatggacacataataatacgataaaagcacaaaacacatactaagctggcaccacctggagaagacatactgccagaaaactacacatactcattgaatctggaggtgagatgtacatttcaaatttatttcttatacgtaaacatccaggaataggttaggtttttatggtgttgttttaatgttgttataatgttgctctataaatacaataaatacttgattttttaaaacaaaaaaaaaaaaacatgttaaataaacaacaaattatttatttgaggtaacaagaatgaaagaatcgtggacagtagacctcaaagaaagaacatgcacgtgcaacgagttccaaatagataaaatgccttgcagacgtgttgtggctatgttgaaggagatgcacatggacccatacaactactgtttagattactacacaaagaaatgttggctagcaacttatgcaagaacagtgtacccaataggacaccaaagtgagtggaaagtactggaagatgttgttaaatgccaaaatattacatattttatagtgtaaaaatacaaaataaaattaattttgtataatactttcatgaaattaaagttttatatttttatattaaaaatattttatttaagattaattttatctttctttgtaaataaaaattagtatttatgacatagcagagaaaaagaaataataagttaagaaaatacattgtttttatttaaagaaatacaaattcattagattttaaataaatatttttattaaaattattgtgacatattttatgttgaaaatattttgtttggatttaattttgtttgtgtttgaagaaaaaaatagcagttgtgaaaataaaagaaaagaaataaaaaaaaatggcaaaactatggcccaatgccataaaaattgcatttttgaagcacgaaatttaagcccaactaaagttatacaatttttgaaatacttaaaaaataaattaatctttactaaaaaaaaattcaagcaaaatattatctatctagattttctttgactaatt

SEQ ID NO: 70195 - DNA, 2465 bp, Cannabis sativa
aaaaatagtttttaaaaatttttactaaacgacctctaatagtttttaaaaattgttttcagttttaaaaaacagaaaacagtttttaaactgtaaagccaaacagcctcttaattttttttaaacaagtgcactaattaactatagtattctccctaaaaaaaataactacacaagcttttttatttcaacggtattaggcctataaaaacgaagttcatttttttaagggtattttataataatttttaattatatatatttattgattatttaaattttgtatcaaccatagtaaattttaataagttcgccgcaaaacataagttaaaaataaattttaaaatataatttacttttgtagtttataaaaaaataatattattatttaagcattttcaattgttctttttcttattaaaattatattaccacatatttataaatcaacaataaaatatactataaatggtaaagtataaaaatatgaggggctaaacttctctctagttattatatgtgtccgctagtatttatcttttttttcttcttattattaatccatatgaatataataaattaaagtattaaaatattaatattaatataataaataaaaaatattaatataattatttttcttaaagtattaaaataaaaaaaaattatttaaatttaacacaaaaacataaattatagtaaataaaataaataataaaaatgtcaatatttaatagtgggaacttaatgttgctaaaaaaataaaaatttggggattaatttaccaaaatataaagtttgaggaccaacttaccaaaacttatatagtttgaaaactaatttgccaaaaaataaaatttgagaaccaacttgccaaaacatatatagtttagagtctgcttacaaataagctattttttttatgagttccacacttttcttactcttctattcaatgtttgcaagtcattcaatatttcaatattttatgttttgaatatctcctttctccttcctccatactcttctacttttttttcttgtgagttctactcttttagtttcttgtttatctgcaacatacatttttttaccccacacatgttaagtgttcatttctctctcccttgtttatcttcttttttattttttattttatattttcttatattttgtgtttaaaaaattacacatgtgtttgttgtttaatatgcgctattcgatgtttaatatcatatactttatttttatattttttaacagttgtttttagttgttctgaattttttttttaatgtatgtagggtatggggaaattttccaaggtgaatgttccctctcgtaatgttatggtagtctcacactgacaaaagagttattgaggtatagttttttttttttgtgattttatttagttttgttttgtagttttatttttgttttacagttgttttagtaattttttatgttattgttttaggattgaaattttttacattctaactgaaaaaatagttgttttccaactgttctagtgttgatgtggtggttcggtctgtaagtgttgaagatggaggtttcctatataatttggggtatattcaatataaaagaaataaaaaacgtctagaacagtatatttgtaaaaaaattcgtgtggcagtaaaaatgtaaaactgtccccaaacttcaatatttttttatcagtataataatctgtgtctctataatatatgaactacaaactcttttaattatgaaatgataattgttgagtttatgtgataaaatgttcaaaatagagatgaataatcatggtcggccatgagattaagcaagctaggcgtgtgttttggaccccgaacgctcaagttctaaaattatgaaaaaataatttaatatatagataaaatattaaataagaaaaaaatataatgattattgtttagtatagaagtaaagaatcttataaaagttaagagattaattcccaaaaccttagagttcttaataatttttaaaaaaattatcgaccataaataattgaaacactatttctttgaacgtgaaacaaagttgttgagttaagcatcaatacttaaatgcttgaaatggaatatcaacaatcacttacaataaaaattgattttttttagtcttgaattgggtataataatcaataaatcatacgaccaatcaaacaaaaaatcatcacaaattatataaaaatttaggccatcatcaacagaagcaatacaatcaattgctatagaaaacttacgtaaaaaaattaactaatcaatatattatttttattataaaaaaaaaataaaaattattggtcagcgtagcttgttaaacctcttggccatggatgaaccagatgaatagcaaaacagagtacgaagagagagaaaaaaggaaaaaggaaagaaagacaataaaagagagagattgaaagaaag

SEQ ID NO: 70196 - DNA, 1096 bp, Cannabis sativa
tcttacatgcaatatatcaactagtatattttaataaactacaattaattaatcctattatttttattctttatatgaccgcatggataaaacatatatccacttgttttgttttattattttttttttatgaattagcggtatatttattactcattaaaatatttacattacatcttaatagcattttcaaaaaaaaaaaaaaaaattcacttcccctatacataaaatattcgctatttacaaaaaaagaataccattttgtatcgctatgtttaactttctttaggccaaacacaagaaattctagttttaacatccgattttattttaattccttcgatacacaatgaaacatcaaactaaatttcttcatatcgctcgccaaatatgatataccaaagatactaacgcagttaagaaattgagagctagctttccacctagctagacaatgttggctaaacgaacaagtagattagaatgttttaattttaaatataaatatattttaagtcttaattaataatatactagttgatatattgtatatacataatgaacttggtaggcaaaattcattgatgtatcatgttcattgactttcacacacattacgttatgggcaacatatctattaaagagattatatatatatatagatatatttatatatatatatatgcatgtcaaaaaaaaaagtagttgtctgaaattaaagtcgaaaaaagtgaataagagatgaaggttttcattagtggcaccggcggctaaatagagaaaaacaaaaatatataaataggcctttgcttttatatattatatataagagtatttcatgtattcaatagaaattataaattatattataattgtatgaaaattttattgaccacaaatagtgctgtaggtaattaatatacattattataattgattgtatattaataattaattaatgaagaacaaagatagttaaaggttaataattaaaagaccgcactccataaaaattagctggtcaatattaattattgaattataatgcaaaatcttttcctctttttgtttttcaccttaatggattttttgattg

SEQ ID NO: 70197 - DNA, 1712 bp, Cannabis sativa
tttctgatctttattaattaataagtaaatctgattatactgaaatgagttttatttagggcataaaacccaacaaacacaactcccccaatctcatgacctcattcaactcccaaatatatataatattaaatattaaaataaaatatctgtcttatatctatgtcaaaatcaacctaacacactattgattttgctatctaaattattatcatatgaattatattatttattattacttattaaagaagtgtaaattatcactagactcaagcaaacaagtttttggtgttatgttcaagttgaactctacattaatgacttaatgagtaagcgcaacctcaataactaaacctaaattttcttaaattttcatgaaaaatatcaaaaaatatctttataaatttttaatactaatatttttatggagaatcatttcctataatattttttaatttttttttatttttacagtttaggttatctctatatgaatttgaattgcgatttaaattaccttgttaatttcttggtgaattgctatgtgaatttccgtaataataataaaagagctttgaaatgtatgaataaaaaaactcttatttccattggcatttctattttcttcagttgcctttagcattaaaatttcttttataattactaatttattatttaatcgatcaattaataaatgtggaataataaaatcgatatacgctaacaaatattctatagttacagatcaagattctgtaactacaaaccatcaaactagtaaagaattactaaagtgtagtaaattaaaaaatacaaagtttttatatgtggtgtcagcaattctcgcatattgctagtagtccataaagtacggcaaagagattagattcattagtaagatctcaaaaatagactctctctaattatatgtcgcaaacttgatgtattccaccttgaaaaatgaaccttgctgaaactccaaaaactctaactcccttcgatatgcttgaagagtcccaaagcaagacttgaaaaaccttgtatgcacttcgttcttccttcttgtagacttgtttgatgactcaaaacaattacaaagacactgaatatagtagaataggtgaacaccttattttttacggaataaagacttttttttaaagatttacaatatatgatcaaaggagaaagagttaacctaatcatagcagccaatacggtctaaatcgaccctactctttttctaatacatggtgtaaaccggcctaagcccatataaaaaggtttcctaaataaacattcaatttgcattgtttgtagactttttttttgaattaagcgtttatatattacaatgcataacttgggactcgaactaggacctccaacatacacaccctcctatgaccacttgagcaagccttaagtggttcattatctgtagactataaaagcaagatcctttttttgattttaatgaggatcactttcattttttcctctttaagcctcatcacacaataaagcttcaatatttaatcagaaataattaaaaataatcagttagaaaaagaaataaataaataattttatttaaaacttaaaagaagaatatattgtcaaactttctaaaaatagaagaagattgacacatattttacttttattatttaaaattaaataaaaaatatatattataaagggaaattatc

SEQ ID NO: 70198 - DNA, 2109 bp, Cannabis sativa
aacaaaacttgaggcgtggtcctagacgattgaacagtagaaattttcgaacagatttcaaaggtttagggaaagtttgaaacaaaatttttctagaatccaaaggttttttgatgagaaaacttaagagcgtttgagaatgagagagaaaatgaaaaatcctattttcgtactgtgagggttcttaaagctcttaaagtcacttattgagatcattacacgtggcagttaaaatcaagagatgcttgatccaacggttactacaagttgagcttacacagaccccgtagggttcaatgacatgacatcttaggaaggcaaaactataattacaactgtcattttaaaagcctcgacaagatacccaaacgtcaaaggaacatgacaagttaactagcatgtccctcgagatagtttcattgcgtgacacatgcaaatgccaacgtgaaactaagggcatgtgttgtgatacttttttccctagaaatataagtacaatctcataaaaagttgacacgtggactcattccttgatggaaaaggatgattgtcgacaaatagcttcagtagagctaacctcacatgatttaaacttgcgagaaggtgcaaccgataaggtctaatcgcagcatagtttataaaatgcaagactaagagaagttagtactggtcacacatatactgattatatgcaatgagaaagtatatctctcttgcgacacgtaaagaccgcatctttacatatgtttagtccgaaactataatgtgttagacaactcattaggatctcacaagttctaagttgtcaacacatgaatgtccaaatacacgataagtgtaaatgcaagcagtcaattatctaactgcagttatggacctgaaggcccaatatgcgaataacaccaaggaacctgcgacctcatgttttcaaaatatggataatcaatgtgcgacttaacaagttgcgtacattcaagaaattaatcaagaacagtcaaaattgttctttcctttcatttcatttattctttaaatataatattttttactattaatttgtataattaatgtaataacgatcctgtctgaccagttatgtaaattcaaatgagcatgtgctttctatataaaggagtaatctgaatcaaatagactaagctaaattttttcctaaaagtagactaaacagatcaagtactgactgaatcactataatctcgtcttatttataatttttgtttttgttctttaacttccagtctatatttaagtattcatcattctaggtgaatatactcacaattccgtacgtgtgtgtattaattgaatactcacacgtttatggtactgtcaatttttctccaataacatatacatgtatatatttattcaattttctctcattaaagttttccaaatataaatatttaaaaatctatttaagattctgttttgagaaaattgaaaaatttataacaagaagtagcctatacttgaaaacaacaattaaaaaaaatgtaattacatattttcattcgttttttcaaagaaaagacaacgttaaaagaaacaattaattgttcctaaacattctttcttaatcgagtggaacattaattgttgttatactaggctcacttattcaaataacaaagaaaaatctcatattaatttgaatgattgaatcgcgtgttttgaatagtgtactgagagttatatacaatatctcaatcaattgcattaattaagataataaaatcctaattaagccacttcatgtgttcaatcatcataatataaatacatcaatcatatataacaacacaatatggtttatgacatttcaaaatgtcactatttctcctaatttgttagaaaaatatagagtgtaccgtaacaaaataacaatatatttaattaattgaagaacataatatataaattataataaaataaatagacaaacatgaaggaaaaacgagatgtactattctaatcctactaaggcttataattattatagtatctttgattagaaaaattatatctctaaaaatttgactaaattgtactgatttatatgtaattaaattaaattttaaactccaa

SEQ ID NO: 70199 - DNA, 2195 bp, Cannabis sativa
gcacaaaagtcaatgaattgatcattgttgaactactttccattattagacaatattttatctggaagtccatatttgcacacaatatttttaattatgaattccatgaccttcttggaagtcactatgttcttgggttcagcttccatccatttagtgtagtagtcaacaacgacaatagtgaatttgactcctccctttttagttggatgtgatcccactaattatattccctagacatcgaagggccgaggactgttcctaagggttatctccgttggtggggctcttggaactttcgagtaattgtggcattgtttgcatatgcgaacatattcaaagcaatccttcttcatggtaggctagaaatagcctcgacgaataatttttttggaaagactgggtccagatgtgtgatctccacaaaatctttcatgtatttcatgcatgacaacgcttatctctgttcaagccatgcaccttaggtacggtattgataatcctcttctgtataatttaccatccatgatcacgtacatgggcgcctgatattggatctttcgcgaagcagctctatcttccgggagtgtacctaattctagatacttgagtattggagccatctaggaagttgagtgatcgatggtggacacgtggaatctgggtcagcatccaagacccatcagtgggtccctcagtaaaggtaaagtgggccaagcccatttggacaagtccttccacgaacgtatctcagctccacaataataaaacctttcacgcgccttcagcgaaccatttctagaagcaagtacggtaccatgagaccagaaggatgaggtagcgtattcttaaaagactcatcttgtttcctttttattcctacagacaaataagaaaactacaactgccagattacaatagaatatcgtattaggttaaatggaaaacttcctataacgaacattaagaaattaattcataaatgaattgcccataatcaaagcacacggtgttgaccaaatcaagccaaatttgatgtgcctagtaagcagatcgtctccttcgtgggttggacttcatgcgaaggcccaagtgtattatttaccgttttttggaaggggaactgaatgtaattctcaaactactataaatactcatcaaatcttatggaccaatggttgaattctcttgtaaactttgctccggcaaacttgagaacatatattctttgtattctcaaagactttttcaagctaaagaactttcgaataatactgactagtggactaaggctaattaataccccaaccacgtaaaaaattgtttgtctcttttcactctttctcttctaattatttgttttttctgctctttgtttatattctattttccaaaaatcttgataaatagaaactaatatgtttccataattacaataaagagattgggaaatctaagcgaattttctttactctcttaacatacaaattaataatcccacacatgtagggattgtttttatgacatgcaagcttgggaataactatgtcaatctctgaaatttccaactcgcatccattggtcggtgcatgcaagttacttacgtgaccaagctggtcagatgtccatcagttaccttgttcggacatcctaccatactagtatgactttgagcttcaattcaacttgcatggcctgctaggagtataattatctcctaggttatggaatgtgagacacgtgtcacatagtcagatgccacatcatagtgcaaaaattaggataacagtaaatttttcacgattaaaagtaactaaggtgtggtttgtttgggatgaataaaaacacaagagtaagaatgataatggaaatggcaatacaaatgaaatggaataaaatttaagagatgcataaaaaaaaaaagagatttttaatattatacctaaaattgattttatttataaaaatacctttaacaaaattatttgcctaaatatcattatgccacgtcagcatacataccaaaattcaaaataattaccaaaaatggaaaaaattagaaaaatctcattttcaaaaatttttgcttttccggagagttgaaaaaacaaccatttaattgcttttgatgtgaataagatatcaattggttacttttctattaaaaaatttatttcataattttacacatatat

SEQ ID NO: 70200 - DNA, 1361 bp, Cannabis sativa
agtaacaatctgaaaggattgttgaaactacgtacaaaaaccttgtgtgtttttattttttttacactgtttgtttttctagtttcttttggagttacagagttgttttctgtagcttcaaaaaactattttcaataccaattctattactccgtatttaattaaataataaaaataagaatattaaaatacagaatttcacaatgtatattaatgttagctaggccaggacttccattacttttctataaaataaaattatgtgatgatcgttaattcttccagtatactttatagttgtattattatatattaatttgattttaattacgtaccaaccaatgatttgataccaatcatggaacatcggcagctaccagaacaagcagagtctctctgcttttatagaaacctcttacatgcttgcacatctcagtaaatgaaaattaaataaatacacaaatgcctactaaaagcttatataatcaataaatatttatttatttttgaacaaaatatatcctataaataactcatttcaaaatacaaatatgtttaattaattattttctctcttttttcttgaacttttaccattatcccaccattgcagtttgcaaaatggttatttcatttggttttggtattttaataagaactatagctatatacgtaccatattacaatggtataattaaatgcatacttataaaaatgcctacatttcaaagaagtcaattatagcaaaaagtccctggttggtaccaaaatgagattgtgatcttctcaaaactttcttatatttattaatgaagtgtatgtacagttatttgatgtccccaccaaataagcccccaccacaccactttatttacaattaaaatttataaatgaatatatatgagggtaacgtttaccttgagtccttgactatatgtacatacgtttaacgatgaacgtgtttgaaccggttaaatttattcttcgcatgacctataagaccaaaaatagaatacataactaattatagaactttttttttttttggtttgtttgtggcaactaattatagttattatcaaattcaatacatatatatactagatagatattacgtgctaagttacgtatattaattttattttagttttaaatttttttaatattataattttaaaattaataatattcaatgtagtaataattattgaaatttgaaagaaataaataaataaaaattactattatattttgtaatagtaattaagaaaaaattattattaaactatcaaaacattcaaatttaatttaaaataatatttaaaatttaactaattttaaatatcaaaatttgaaaataa

SEQ ID NO: 70201 - DNA, 2873 bp, Cannabis sativa
attttttgcaacaaaaaaaattaagggataaaactctacaaatatcataatttaagagacaaaagtactgattataagttacataatttatggggactcatagtcacataatttatcctatttttaaatatttttaaggattataagtttttttttctacaaaagtagattattttttattttttaaatgactgattaattgcaccaccgagtgtgtggtgtaattggctagaaggatttgcataaggttccttatttagttgtttttcaaattttgagtcccatagtaacacttatcttgagccttaaaaattacgctattttaggaacaatgagtatccgtgtgccttattgtttcgtgtataggagggtcttgactggcaatcatcttaaagtgtataaaccccaacttacaattaagccacggttctcttagatttctattaagccgaaagaattgaggatatgatgtgcacaaaccacctgattccattcatatattattatttttaaattgtgtttttatgtttttttatagaattctttaaaattgtaattgaaaaaaaaaaaacatataaaatgaatttatttatttatttttaaggaaataaaatggatttatttatttttttaaaatgtgaaaatttgttttgaccagataaatattaaaaattacaccaaaaattatgatacttttataaaaatccaataaaaatggtctctaagcaaccaaaaaaatctttacaaaactatacaatattatcaaattataataaatatacatatgaatttcacatctaccaagtggaattttttttttatctatttatttaaatttataagatattacatttaatggtaaaatttgagattttttcgcttaagaaaactatagtagaatattgatatgtttcattctattctggtaaatttatttaaaaacttgaatcgtgtgcaatagttcattatttcttatcataagtccataatttggctgaatgagcataatgttttggtgttggatttagcaaattgagatgattagcaatggagtgctcacgacttgaagttgatgaacttgaaccctttatattttgattaatgtaagagacaattcattaaaaacggtgacttttattgaccatatctgttataattgttatttgcacatcattttaactacataaatcaaacattgcttcaattgtgtttctatgtgggatattttaagaaatttctttctacatctaatgaaaggaaaaaatacctatttacctacaccaataactcaaaagattaatccaacataaggttaattttgacatttctctttaagcaaaatcaaaaaagagaaaaacaacactccatacatacaaaactacattgtgttttgataataattaaaaaaaaaaaaaaaaaaaacaagaaacacaaagcatgttcacctactcatgaatcgcacaaaagactccaaatctagaacattcaaacactaacagagcatgttcaagcttcgaacacctctgaacacacaacacaaatcaattatcaaagttcaccccgattaaagactacgtctctgtcaagctctccttagagaagagattgatttccactataaacaatggtgctaacacctggtaaaaccttggatttctagccacagaggtaagactagtaaaccctaaatttctctcgatttcttccttttcttttacgtagtgactcattctcttttctttcttttacatgaacacacttggcacgaaggccctctctctctctccccatttctctttccaactgatgcagaatgattctaaggttaaaatttcaatcttgagtttagcttttacaggtataaggaagagctcaatttgagttggcttaggattgtaattgatttttgttgagttttgtttgttcaaactgatttggtagttgagagttgaacttgttgatctggcatgtaattgattttaagagtctttaagcttgttgtaaattaacttaactgtgaaaaatgatttggtctcgagtcagaattagggatgtgcaatttgaggggagtgattccaccatctccatccgtgtcttaatgtaaaaataaaatttattttaaaaatttaaatgtataaaattattaaatcataaaaattaaaatattacatattatttattattcaatataataattattataacacaactgaataaattatagaaatgacactaatataaaaatattacaaatacattgtaaaatataaaatattaataaattaaacggattcctgtggaagtgccatccctatccaagtcccatttaacatttgaggataaaaaatgatctccgtccccgtcccattccccaaatagacagaaaatctctgctccattcggagcatgtaccccatagaaaaaatgtgtagttagaagagtttacatgggaatttatcaaacatttaataaataaacaattaaagataggattgtagattggtcaatttaatgagtttgtgtcatatcaatgtaaaagcactttcatcatgtgccctaaaataaaaacattttaaaatatttaaagaattaaactaaaaacatataaacacttctaattaaaagttcttttaaattttttaaattgtgtttgattgaaaataataaaatggaaataaatatattataactataattattacatggacattacataaatatatataattgcatgttattaatgtttacatctagtaaataaataaagcttcttcaaatgagctctagcctaatatgcaaattcttccattaagggaaactaatacatggaagatataaaagctttagaaatgaaaatggactagttaacatat

SEQ ID NO: 70202 - DNA, 1346 bp, Cannabis sativa
  modified_base (175)..(183): a, c, t, g, unknown or other
cctaaactattgagattgttaaatttaagaacttttatctaattttattcaattttactgtttcagtgattgtttatgtactaaccatgttccccaaactttgatattgatcaaatcatgtccctcaaactttgatatgtactaaatcatgtcccttgaactttcatccatgttnnnnnnnnnttattaaaattagacaaaagtctttaaatttgacaatctcaatagttcggggggaatttttaacggccaaaaaagttcaagggacacgatttagtacatgtcaaagttcggagagaaaaattactaattaaccttaaaattaagggtaaatctatactacaatctcaaatgaaccgagtgttttggtagattctcttccttatttattatgatatatagaaaaaaaattagttaattatttcttttaattgtttatgttataattatataacaccacttgtaaatttttaaaagatttcgagtaatttataatgtcaaaaataaaatgtacatattttattatacgtatgattatttttttttttttaattttttgttatacgtgtggtaagtaactttttaaacttaatttttggtgttgtaaactacttagacttttttaaaaatttataagtgatcataagtacttacaacgtacgcaatcataaaaaaaaaataagaagtatttctgaatgttaaaatagatagatagtctactataatgaccatttaagagagtctactacaaaattttcttacaattaacaaaaatatttgggatataaatatctaaaatttaagtttgtaacagatataaatttagaatttttgtaaaattaattgtttagttttgacaatattaaaacaaaagttctaaggatcatttttttttttatatttaagttataattataatgaatatttacatataaaaaaaactactatataaggttagaatagtagttttttttggcattatccctaaattataagtgataatattcttttcgtgaatcacaagtgacacttcgatttttgactctacttttttaattaattttttagtggctctgttagaaatttttgtttttactctgataccatattagaattgtgagattcatgagtaggtatgcacacgggacggagaattggcggggagtgctcttctcgtccccattcccgttaaaaattttaattcccatttccgctaaggattttaatccccatccacccttatttcatatcgagaatggggcggggaggggcgggaaattccctaatagaaaaataaaatttataataaaatttttaatataaaaaatattaaaatacataaaaat

SEQ ID NO: 70203 - DNA, 1066 bp, Cannabis sativa
  modified_base (986)..(1004): a, c, t, g, unknown or other
cttgtctctcaaggttttccatttctgccgtaaaaagatcaaaatccgcccaaattggaataacagcctataccataagcgaaccatgaattcattcttctctaataaaaattttgccctcaatttttttataaacttactcattcatctttaaaagcacaatttattctatttgaaattgtatgggtgtggaaataatttaagtagaatactcataagaaaatgtatatttaaatttaaatgttatttaaagataaatttaattaatgtataaaaaaaatatttttttctccaaaaaaaaaaaaaatagcaaccacatatcaattctatggtttcattgcctaaacttatgtaggaaataaattaaagcacatcctattttcgttttccataaattcaaatcgaccaaattaggaggaatcttactaaatgagcggatattaaatcttctagcttcctgtgatacattcattacctaaattattttaaattaatttccaattaaatttattagagtagccacggagaatcttgtggttgaattatgaaaacttaatataataatactataatttgctgcataaatacttaaatttaattttcggttggtacttaattgttaagtgtttaataaattacatatggtaattcttaatcgtaatgtttcggctaatttacaagaatgctaaatttcaatgaaattgatattttattttaaaaaaagattacatatggtaattcttgattggtttaggtcattaattttttttttaaataatttaaatataccaataaaaaaataaatgagattttttattttttatttttacacttcaaaacaattttttttttttcatttttacggaattctatataaaaattcttattgcaactagcgttgcaacttaaattgtaacaaaaaattatacagaaatctctattgcaactagcgctacagctactttaaaaactcaaaccgtaaattnnnnnnnnnnnnnnnnnnnaaaaataatatatgagataattcctcaaaaataaaataacttaatatttaattaggtattat

SEQ ID NO: 70204 - DNA, 1872 bp, Cannabis sativa
  modified_base (649)..(651): a, c, t, g, unknown or other
tttttaaaaaaaaaattcacttttttacttttaaaaacaaaaaactgattaaaaaattgttatcaaacgctaccaagataaataggctactcttatataaattgtcatatataagatgaataagtcactcttctcattaccaattagttttgagataaaaccttattgatcttattccaaaccgtgattctgatatttacaacgataaagtatttaaatttttataaaaaaacaagaataatacataatatgtataatatacactttcatataaaaaatattaatttataatttatcaatataccaaatttaagaattatccttaggatatgctgtcaccaattttttttttccctatatattattagtaattagtgcgcctgtcctttccgcatgttttaatttttatttctttcaattatgtaattatagaaattaaagttttttcagataataatttggatatcaatgttatattatttataacataataatataatgttactatcattataaaaaaataattacttttagtgataactttttagtcacatgaattttttgtagctaaatgtgatttttgatcgcaacaaaaaaactaaaatatagtatttagacacaagttgtcactaatttacttttagtcacnnnaagtattgtgactaaaactaaatttaatcacaacaaattgtaatttttgtgactaatacatttaaccgcggattttttagtcacaatataaaaatgataattaataattattcacaatttttttatttttagttacaaattttattgtcactaatttttttttttttagtgtattattattttatttttctgaaatatgctagattaattgcggtttgactagatctcttaatattttttctcttttttgacattggactatctctcattgatgatatatagaaaaagacttacagtatttaatttattagctatattcacatgatagatcacaatcacatgtatatctaataaatataagtaaataataatttgcttatatatatcacatgtacgtataggaggtatgttgatgattgttcatgatttttgagttttcctgtaacataaatttattttaattaattgtgttttttattaaaaagaaatacgtgttatattcaaattttaatttatttttcatttcacaagtaatatattctcttgattaattttttttttcatgccagttggcatacatatttacaaagagtttgttcgtgcatatgcatgtttgttgaaagaaattaaaattaatagatggagacttgatttttgatgatataaaaaatgactagattttatattattaaatacatcgtgatattctgactatttttcttgatagataactgatataatttgtaagtgagaaaaataactctgggataaaaaaaagtaattatgaagtgattcaaataaaaaaaaaatgatattatgtgataggtctttgaaaaaacacaacgttttattaaaagggagcaaaacaaaatgtagaaggaaaagagaaatgagagaacatacgcttaaataactccagaaatgagaagaagaaagcacgaagagaattaatccatgtggaccaattagaataagcaaaaagaaaagagctaataatcgattgcacctataaatagaagacttatcatttgaaaaacgaacgaattcttgcttacataagactagttaaaactctgttggaattcttcaagaacacttcaagctcggaagaagacaaaccaaagaaattgagagaattgagaaattgtgtaaactaagagagattatattttgattagacctaatctggtgtaaagattcaaagtctgaatgcaatttgtt

SEQ ID NO: 70205 - DNA, 2381 bp, Cannabis sativa
agaaaaagtattgagtaacttacatctggccaggtatctgtaataaattccacaatatcataggctatgtccccttgaacatcaacctgttccttctcagttggcccctgaaacaaattattcagaacaaaattgaaagtactagtcagacaaaaacagactagtttccatgcaagtgcgacagccaagacgtatttaaaccttgacaactgaggctccagtagcaaactttttcccaagcttctttgaggcttcactaagtttgacacctgaggcataatcacaggaacataattaaattatgacaacaataacatcaatagtttagaaagggtaacaatgaaaaataacgtcaaagcattaatttgctcaccaaaaagctccagccctttcacagtggtgatacattttcgcttattccgtgtgaccttttcaatgataacttccggcttctcctgcagaaaaataaaaataaaaacaaattcaacctcatctcttcaagatgtcaaaaaatgatacatacacacacacacacgcatattaatatcatatcactggcttccataagaaaaggctgttggtacttagttcaatctaacattttttcgcttacctttttctttatcttcccaccaggaagacgtttgacttcctctggcttagatgctgaaattatataacaggaaacacataatgagacaaaaaaaaataaaaggccattgtagattatactttttttttggctaatgacaataaaaccttttgaaagacattgaatcaaatattttataccgaagatgaagatttccaataaattcagtggctacacaataaacattatactttaaacatgaggaaacgtcaggatgtgatatggaacaggtacaccagtagtgtgatacatgttaaagttacttaacagaagtttaaataaacatcacagaccaaccttctatacccttttccatgggctaaattagctaaagttcttaaatatccaagcctaagatataatttggatatccatatataagatttttatcatagtaattgaaatctgaacatgaaataagtacgcattataacatagttacccaaaatcacatctacttacataagattccaccatacatacacctgcagtatcagtattcaacaaactaaatcgaaaatgatatatgtttctcttcttgctatgagttggcaaatgataaagctcgaatcaaaggttccatgatgacaaacaatgataaaacaagatatacacaatatataacgatacatagatatatccacacgaacaaaaccaatgcataaataataaacgctgtataatacacatatacctgaagaagcagccccatcaccacctctcgatgaaataccagtagattgtaacttctcggtaactttgtcagcttcattcgagttagattctaaacaatgagggggaaaaattaaatcaaaacaaaaaagattgtagaagataaaggaagagaattagggtttttgagcgacctttgataagatcgggatagaggtctggggcgttttggatcaaccagggcttgcacttttcgaaatcgggtccgaattcacagtactcggcgggtaaactgcatacgccacagtaaagcactcgtaccggttggggcttctccgccatcggaactcgaaaacttcaactttactactccccacttcccttttgtgtcctctcggcagtgatagcgaaattcgaaacgctgcgtttcggcaaccacagactttgcttatggcaaatggtataagtggcaattggctttggaaggcttaagttggcaagaaaggggataaaaatatacccgcaacgcaaatatcggatatgaattattttatttttctttttttttttttttttccttcttattttccttacaaaaattaaagtgttttttttctctttggcatctatcaaaaatgtttagtccaatttcttttagttagtgacttttctattttaggctatttgtttttgctcctaaattattacttatgtactattgtcttctcccagaatttgtttctaacctcctattaaatcgtattatattatagtatattgaattcaattatatattatatttttatataatactatcttgaattttaatttatactaaaatattatatattttggtgtccgtaaaaattaatattatatatagttttatataaaatttaatttaatataatattatacaatacaatatggtgtaatacggcatatcaaacgaaccctgaatttataataggctaattatgatttttgcctcttgaactttgacatgtaccaaatcatacccctgaacttttaaagtcattgaaaatgcccctgaact

SEQ ID NO: 70206 - DNA, 903 bp, Cannabis sativa
gggtatgagagtgagccgacccgagagagccagagccgccaatcagaaaagtgccaaccaaaggtcgttccaataaatcgtttcttcctttggaactcccatcaagcagctcatcagattggttgatagagatcgagttgtcatctgatgattcttccaccgcaaccttagtagcatgttcctggctaggtgtatcctaaggaaattctcgaatcacccccaagtgttgtcgtggtatcttatgaggtctagagcaaatagaggaagagccatcaaataactttcttttcttgaatggagtagctctagcattaattttagaggtcggcatgatcccaatgtcacctctaatattactaatctcatataggtccaagcaccaaaattgtttaagcttttgcaataaagtagcttgggcttgaaagaaattagataaaaccttttcgtcatcatgctgaaagttgagtatggctcttttaaatgtaggacatatgtattttccaaaaatgagtattaaaaaaatataaaatcaaactacttcaggagtagggagcaatacaaagtttcatttcaacgtacgatattatacagaacagacagaacatcataaatcaatcactcactctcatctccttcctttcatggcggctatatcggtctccgcctcaggctcagcctcactctcaacttttcacaatcccagaccttcttctgcatcggatcatcttcttcccataccgaaaaccgccgccttcttcttctcttcttcctcatctttccatggccaccataaactcaccttctctgcaagaaccatcgaccccaagattgccgatgccgctttaccagtcaacggctctcttccttcgactgcgtcaacaaccctatcaaagtaggtctatt

SEQ ID NO: 70207 - DNA, 1400 bp, Cannabis sativa
aagtttgaaggtgggatggggttttgaagcttaagagattttaaccttgctatgcttcataagcaaggttagagactcttagttattcatgattcccttgttcgtaaaatttttaaagcaagatactacccccaaggaaattttcttactgctgatctggggtcaaacctgagttttattggagtagcatttttcctgcgagggatgttgtcaaactaggtttgagaaaacgtattggtttaggtatgactctgaaaatcactgaggatccatggctcttgttgcaaaccaacctacaccagaactttttgtcctaggacaagaaaacttcactatgaatagtctattccaagttggtaacttctattgggatgttgatgtggttagagactttttttttctccaactaatgctactgtcatcttaggcattccaattagtcatgccgtccatgaagacacctggtattggctagttgagaaggatggtttttattcagttcgatgtgcttacaagctcattaaagagcagaattttgtctcggctcctacagaaacagggggatttttgaggaaaatgtgggctatgaaagtgcctcctaagtctaaggatcttatttggcgtgcagcttccagttgcctctcaaccaagacaaatctttgcattaagaaggttttatctgaagacatctgcccttttttggcaatgtgtttgctgaaactgagttccatgttctggttcaatgcacttttgcttggacttgttgggagttttctggttttgctatggctggtagagaggctccctcactccttgattggttagacagaactttgctgctgtatcatggtgactctgagaactgtgtaatcatgttatgttgggctttgtggtcagcgaggaatgatctcatctggaatcatcgtactcgaaatgtgagagatgtggttgtgtttgcggattcaactcttgatcaatggttaaaagctcaaggaaatgggaacctcccttcgttgtcccctcttcaaaagggtgatggtgcggagctatgaacgaaatcgattttaggcatcaaggtaaatgtaggcgcaaccatatttgatcatgatcacaaattcggatatggttgtgtgctgaggagctctgatggaggccttattgcagctactgctggctgccaaataggaagagtttcgtcagagttggcagagattatgagtattcaggaagccttgagttggcttaagtcacacaacttctcccaagcggtgattgaagctgacagactggtttgtgtggagcccattcgaagctttgctgctcttgtctctgcgttcggtttggtggtggaagaatgcaggaacatgctcaacaacttgtctcatgtttcacttgttttt

SEQ ID NO: 70208 - DNA, 1148 bp, Cannabis sativa
aagccaaaagagatttcaaccattttaactcacatgtagtagtggccatagattgatactcggcttccgctgaagatcgagaaacagttggctattttttcgttttccaagagataggagaagaacttaataaaataaagtaaccagtcaatgatttacgagtcagagggcaacttgcccaatcgctatcacaaaaggcatagagttggaaatcactatccccacacagcagaattccttgtccaggacaaccttttaaataccgcaaaaatctcaaagctacatcccaatgttccacacgaggatttctcataaattgagctaaaatatgcacagaataacacagttcaggtcgtgtaattgttgagtagattagacgcccaacaagtcatcgatacttctctggatcctcaaagacaacaccattgatggtggcaagatggtggttctgttccatgggtgtagaaacaggtcgagctccaagtaaaccgacttcacttataatgtcaagaatgtatttgcattgtgaaagaaacaaaccatcctccccacgtaccacttcgataccgagaaaatacttgaggatgcccaagtctttcatacgaaatctctcactcagttgttgcttgaattttgtgattgccaaagaagaagaaccggtgattataatgtcatccacatacacaagaacatgtaaagcaccgtcacccttggaatagctaaacaatgagtaattagcataagattgttgaaaaccaatattcttcaaagcaattgaaagcttagcaaaccaattccgaggtgcttgtcgtagtccatacaatgacttacgtaatcgccacacctttcctgaagcattagaatcgaaaccagtaggtagttgcatgaatacttcttcatcaaggtctccgtgtagaaaggcattatgcacatccatttgatgtaggtcccactttcgtgctactgctatagctaaaaatgtgcgaatagtgaccattttagctacaggggcaaatgtttcattgaagtcaataccgacaacttgtcgattcccatacactactaggcgtgccttaaatcgttcaaccgtaccattagattgatacttgattttatagacccacttacacccaatagctctcttcccc

SEQ ID NO: 70209 - DNA, 1339 bp, Cannabis sativa
aaggcttgactattttgaaggctacaacttaacttaggtggtattatctgtgtgatagaaactcgtaaggtagttaccatgacccatttaaggctgaatgaggtatcagaatcttaactaacacgtggttcttaagattgctaatatgaccgaaaagatggagaaagaatctgcaccacgtaatcctctgataaaaaatattgttaaatatgttcctttggaaaataaatcatataatttataatttgctaattatgattttttatttctgaattttaacatgtacaaattatatttcttgaatttttcaaacagtttaaacttttctcttgaatttttgagatatattatattgttgaatttatagatttctgtcaaaatctatacagttttacaaacacaatgattgtctatgtattaaaacgtaccccctaaactttaatatctgttaattgtgtctccaaaacttaaatatatgtaaatattaaatcatgtcttcctgaactttaattcatatcaaattgtgcctttctgaattcatgtcagacttccgttaataaaattggacagtctttaaatccaacaattttaatagatttggaaaattattaatgacataaaaaataaaaaaataaaatatgatttggtacatgtcaaagttcgagagtgaaaaattctaattaatctataaattattactatagttgatcaatttttttcaattaatttgtagctagatagggtagtacgctttgggcatacaataattattatatgaataaatgtaataaaattgatatgttctcaatttatataaaagaaaagaaaaaatgtttaacaattgcttattgcaaaccattggtatatatatagttagtgttatttgaggtatatattattcgaaaatatataagatatggattaagaaagaagggtacaattgtatgttttccatagttgaataatcttgacttaagttgttttttcttcgtttttaaattatcatttgttttgaaattaacacacatttgtttgttctgaatacttgacacatatttaatggtctcttttaataaggagaaatggtctcttttaataaggagaaatgttaaaaaatattagtagtgattaatactaccattaaatgtcatactactaaaaaaactacctttaattagtgataaattttcagtcataatataattttttttatcactaagtatgatatttacttacaacacaaaattacttgtgattaaaatatagtatttaaatacatgttgtcactaatttatagttttagtcacaacaaattgtgatctttgtgacagttaaaaca

SEQ ID NO: 70210 - DNA, 1101 bp, Cannabis sativa
atctttaccttttcgtttttcgttttcgatgactaactagtattcctatataatcaaatctccaggggatttgattgaaatgattttgtcaaagtattatttatcaaatagcattctatattctttcacattataagtcttgatatgtttgcttacaatatttttcagattttgtaatcaaaataggatatgtttgatttcattcttttggctaaagaaattgttaaagatgaatatctgtctgactttaaagactggaaagtgttgctgtccatttcaccaaaagtctttgatatgtgcacattgattacaaagatatggtttcacatacaaaaaaaactctcaagaaagtaacatcacatgatcctcttaagtaccaaatttggactttacttcaaaactagaaagaatttataatactagtcttcattggtacaaacctagctattacaagaaggaaccaatttcctcccttttctactcactctttagtgaacaatcattaaacttgttttccaacttcagcaaaagtcacttataagatcctctaagataatgccattttatcacactcaacaaacattaactacattgtgcaagtaaagtagcaaactgaaacattgccattataaaacataaaacaacaaataaataaaagaactcaaatcaaagatccaatctttttcactaaatcatcaattttattgataatccttctaattacatgaccactactatgtaccctatattgcctcaacaaagagcttcaaaaccacagctgttttaaagctaacaaacaaaaattaaattgcctaaaaaaacagaaacaaaaaagaaagcaaattagggtttcaaacataaccttcaacaagaatgggtctatcttcatcttccccatcctcatcatcaacaccatcattcttctcatcaatctccaaaccctgcaatccctccacgcaagccttccttttactcttcccctccgcaatttcatcattattcccagtaaccacatcctgcccacctaaacctacagcttcgatacccttctcggcggtgcaaggccccggatacacggcctccgggattccagtcgcaaca

SEQ ID NO: 70211 - DNA, 2450 bp, Cannabis sativa
ttatttggccaactggaagtatttttgtaatattgttatttttttttgttaaaactgaaaaaatcccttatatatttttataagtagttatttatattttaatatttacttttttttaataataatttgttttacatatctatgaaaataattttattttaagaaatttgtttttacaattaaaatgtttttcttaaattttaatttgttcagaattaaaaattattttttattttatttgtaaaaagtgataaagtgttatcatgtatgactatatgagcattttttaatatatttttttctcactttttcaaaatttctttatgatttttattgtttcaattttagaatatagaacttaactatttctaaaaattaagtttttttttggcatttttcttatatgtttttttaaatttagtttaaattattaaaacagtcaaattcggagatataaataagacttttttcaaccttaaaaactaatttttgtagttctacaatataaattaaaaataaaaatatgaaaattaaaataatttatttatcatcccatatgaattttagttgatattatttgttttctcaatttttctcatttcattattattttttaattaataaaacaaaagtaaattaacgaactacgtttttaataaatataaataactaataataataatctatatatttatataaatgaacgttaaagagtaatgaggtgacatctcatattttttcaatttatttttataattttgtaacagcataaagtttacactaaagaaaaatatcatatcactttttaacttagtaaaaaattctacattgttgaaaagtactttaaatgttggtcatgaagtctataataactttttttactttgatgtgacacaatattacttttaatttatttttacttatactggtgattgattaatatcttaccaatcagttataaaaaatttagttcaactaatatattatatatatatatttaaatttaatgacttatatctatattgtatatatcgattatttattattttgctgcgtacctaatttagtaccataaaactaacatgaagaataatggaagatggcctctcagttgccaagtcttggtttaaagttcttgacctcaggttcgtcatcttcgtctcccttccatcatggaaagatgcaggttatggtggatgctgccttctcggagtcctaaactgctgttggagttgtcgtcgtggatgcaaaaggccatgcaaaagaagtttttgctaagaaagttgatgtgtcatcggttctccatggttaattgtcggtagtgtggtggagagctaaggttattcgtggcgttcagggcagggattcgaatttgttctctggttgtttgtctctggttgaaacaatcaaaaaaggtaaaccctttgagtggaagatggctcttgagttctttgagctattggagatgttttttttcttgtaatatttccatgttttggtttaagagggattgtaatgtagcagcccatgttactgctatgtggggtttgtccaatagctattacgggttgttcaatttctgggaagtgagtctccttgtattcaccaaaattttagcttcttcttaataaatttgatgtcgtttcagcagaaaaaaatattataatatcttttgtaacattattggatcttgagtgtagttattagacgatcaacaaacaaagttgcccacttcgtggctaggcgctcttgtttttactctgattgtagcattcatgatgttgatgttctggctgattttcatgccattttgtaatttgaatgctttatttcaatgatattaatatttcatgtaaaaaaaaagaatttttttattgaattttcatacttattataattttgttttaatagtaacacaatttagaaattatcttaattagtaagacttgcactattcacgaaacatacgtagctttcttatgaaatcaggcgttgcagacaatataataattcattcacttataaatgcaaatgtatattgaccatatttgaaaataattttactaaattttactttaatgtcttaattttaacctatttcttagaaaaaaatttatttatatataaggtccttatattagagtgtaggatctaaaataaactctacttataactgcaaggtatttttgttatatttaaaaatattttgacactaaggtcctaaaagtaattttttacaagaatatatgatccaaaataattttttaaaataaaaaaactaaaggtaaactagaaattagtcaaaacataaaactcaaaatagtataaatatttaccttaattttgttataaagttataaatacaccccattttaataatttttattttatataaaatatatatttttaatttgtactatttttttaaatttttttcttccttcttatat

SEQ ID NO: 70212 - DNA, 1009 bp, Cannabis sativa
aaccattatcatatttttgaaggataaatttgataattatttgatagaagtctcatatttcatgaaatgcttaaagctgagagggagaatatttaacaatttattaattgaagggggaagatatatattgtatatttaattctcatgtttttgtaatttttgtatacttacaggtcgaaatcaatgtattgaaaaagaagaaagcactgctagtgatttttcgaccagaaatgttggagtcagatattaacatcttgagaagaatttactgtgagaagataaagaaatataatactgaaaaagagtacgcgatagtttgggtgccaattatagacgaaaccttttcatatgagcacaagactttcaagtacgaatatgagagctggcttaggtcaaaggagatccagtggtacagtgtaagtaaactagtttctcacaaggctggactgagattcttaagagaggagtggaacttcgaaaccaatccagtggctgtggttctaaacgtggctcgtgggattgtcgagaataaaaatgccatgcacaccattcgtttatgggggctggacgccttcccttttgaccatgagaccgagcgaagaatattcagtgaaatgaattggctctatactttcttcacagattttcctcaccagtacggaaagttgaccaattgggtaataataataaaaaaattatatgttatttttactataaacgccctatagtatgttttactatgtatttgaaaatcatgatgagaatattttaacaatcgaaacaggttttataaacaaaaaaaaaattaaatacttctacttaaaaaaaagtcgttaagtcgatctttaattttatttgtttaaatatttttaaatattagttgctattgttacaagataaataaataaaaacttagttggttttgttttgaaaactcaagcgcttgggagaaaaagaaaaaaaaaatacaaagaaaattattaaatgataaaaactttggagatgttta

SEQ ID NO: 70213 - DNA, 1255 bp, Cannabis sativa
ataacaattttttgtagtgtttgttgaaccactatatttccctttgctatttacttttattttcatttacttaatctttcaatagtcgctactctaagtaagtaattactgttttggtgcgtgctcttgttttgcttgaatattcgtacagtttagagttgttactcttttctttaaagattagtgttaattacaacctcttattataacctcttaatctacctccacgctcgaaattacatgtcaaaatatttttattttaaaaaaattcataacagtatttgttatagttacaatattattcctataaactttgaaaaattagagtagtttacaaaataaaaaatagagtttttgatatttcagtttaccactcatgtttaaaaaaatttaaacctattttcgacactataaactattcaaaaaattttaaaaatttatatggatggtgttgtagctataacgaatagtgccatgaaaaaatattttgatatgtgttttcaagtacgaaagttgacgataacactccttttctgtaaaatttttgggggaatgtttcaaattcttacatgtaatttttttttttggataatttaaaaaaagaaaaaaaatttaactgataataaattatactaaaataagacttttgtcttttatattatttcattcatgcgagttgttaaaaactgagttattaactaatgacttttgatgaaattattacaactatgactcttttgaagaaattatttgttatatttatgatgtcgtttatttaattgctaaacaactaagtacgtacgttcctttattatattaatttataagtagttcatgataactgtattcatgattttattgcaggataaagtatattgacttttaacaagtattcagtttagtgcaatcatcattaattcaaccttcactccattattatataagaataatgagtattattattggacactaagagtatctgatactatttagagatggtgttttacgattagttagcgattttttttaaaagttattatcttaatatgagactcaatacttaattatactcagagacggaaggactttagtctatatgtaggcttaagcccttacttaaatatataaatcaaacttttcacatgtagatatatacatatatatattaatttacttcacttaatttgtccaaaaataaaaaaaaaaaaaaattcacttcacttaatttattaaagcccaattcacaaaagccctc

SEQ ID NO: 70214 - DNA, 2647 bp, Cannabis sativa
tgttttttaaaataatttaattatatgcctatgagttatatttatgtattaattattgcaataaaaatgacaaatttaacaatttcaagttatttaaaattcaatttattaatatattaaacatacaaatattatttctcaaaataaacatacagattgttatttatgtatttattttttactagactctcaaactaactaaactacattatcatcacgttaatattatatcaacgaattatttaaaaaaaaataagcaaaatacaactgcaacatggagaattgaagatatttgcatcaatttttgtaattaagggagaatttttacaacataattttttttaagagcataattttataaagattataattccacagaataaattctatttatttattgaattatataaatgaaataataagttgtaaatatatatatatatatgtatatataccttccctgagtatcgtaggtaccagagtcacttccatgtttacccaagtgtatattttttatctctattggaaaaagtggatgaataaattttccctatcacaccaacacaaaacattaatttttaatttaaaagttaataatttctactcaaatatatgatcattatatataattctgatatacaaattacagattataatataaccataactttttatcacacaaatatttctcaaaaaagaaaagtaaaaaagtagaataataacatacattgagtacacgttaagaaaaggtattgccaaaattaataaaatttcaagatgtcattatttttctttttttttgggctaattattaattataattaaaaaagaattaagaaaaacatactggtcgagttttagaactgagaccaacattgatgaagattgcagctactgttgacaaagcaattccacacccaattgctcgacaccctatcaaaaaatattaaatatataatttttaaaaaaaaaattaaaaaaaaaatcaagggttaataaatttataatattatatatataaataaaataaagaaaaataattatggtaattagtaccttggaaagtctcccaaggataaataattccatcatggtttcgatcaaagaatgcagcatgtttttgcagaacaaattcttgacttggtataaattttccatcaacaacttgatcatgatctgcatttataaaacatttatatatttcaatatagatattaaaaaataaaataaaataataaaaattaaacatttttatttgggtaggaagaaaaagaaattgtagagacaaaccctcttggatggaattgttgttgctaattagagatgaggaggaagccatatattttataaatatatatatatttaggtataaattctatgaaaggaaaaatgaagaagatgatggaatagagtggaaggtttatttatggattggattgatttaatgtgcaaagggtattctattataagatgcttttataaaggccactaattaaaagtgcatagctatatgctttatgtgaaacacatttttcaaccatttaaccacttttgtcaccacaacttaacttaactaagattgtacttaatagaagatgtaaaaattgtattatatttagtacgaaaaattattatttgttgatatatttgtatcaatatttttatactgtactccaatacaaaataataaaattttgatacaaaatttaatttttaatcaatatttttattaaaatataaaataataagagtaatttgtggtataaatgcttaaatttaactcccaaatataaataaatatttaagtttaatttttagtggtaataatatctaaattatatttttggaactccgtaggtaactggccgttaaatgtcaaatcatcatccacgtgtcattttcttattggtatatttaattaaactatttttttaaaaaaaataaaatttaataacatggaccaatcagggattgtcacatgacaatttatttaacacttaaccgttaggtacctaaaaaagttctagaaatatagcttaagtattattaccgtcgaaaattaaacttaggtatttatttgtaactaagagttaaacttaaatatttataccacaaattactcaaataataataatttatcattaattttattatgtacaacaataaaagaataaatgtaataggtttgttatgtaatgctaaagctaaatataataatcaaaataacataaatgtaaatgaaaaatagctagtgcatttagactatcttcaataaaacatgtaaaagttgagttatatttggtacaaaaaagtaattttgtgatatttttacatcaatttttactattttattccattgcatattgtaaatcttgatccaaaaattaatatatgtcatttaatactcacttaataatttattaaaacatgtaaaataataataataatgtaaaggtaaatataaaatttgataataataataatacaagtcgtcatttaatgtaaaggatcatgttaactaaatttaataataaaatatttaaaatggcataatggtaaaaatatataattaaaagcataacatttattgtgatgtaaattttacattatattatattgtgattctaaatttgaataactttttgtt

SEQ ID NO: 70215 - DNA, 2121 bp, Cannabis sativa
atcagttaatgtgacacgttcaactaattacaccccacaatttagaaaatgttctttctgttatattatttcaatccactcatctatataatctatataatgcgattgagttgatgagaaaaatacatctttttcatatcgaaaaaaataaacacaatttccactataaaattccatctgcgatattataaattttagggtgtatttgacggttcagtgcagtggggaaaaatacatcttctttccgttatattttttcaatccattcatctatataatgcgattgaattgatgggaaaaattatatctttttcatatcgaaaaaaataaacacaatttccactataaaattccatctgcgatattataaattttagggtgtatttgacggttcaacgcagtggggtttcgtaaaaatgcataaaaaattgttttgaagtgtaaaaataaaaaacctcccattttttattatattttatgaaatataaaaaaaaaaaattaaaaattcaagtatataagaaaaattctaagttgatgttgtttgctaattaaaacagtattttatagcttcttatttttttttttaaaaaagttattttttaactgcttactaaacacatttttatcaaacaaacctataaaagagtgaaaactcaacattttttaaataaaaatgttatttcataatatgttgaagatgcgcaatcaattaaaatatgcaatatggatgtaaatgctatgtgattcgaaaaactaatgcaacagttgagatcatagttaaattattccagtaatctaaataaaatttgatttgataacacaatataactacggttgaaatcgtgattaaattaattcaaggattgagattaattcgtcaaatttttatgatcaaattttagaaaaggtatgattaaatgaggatatttacactacaatatggataatatcatcaagttttccaaaaatatatatataattaactttgataaaaataaatgtattttatattagatcaacaccaaaacaacaaagacttaggagctcaattcttgatcatagttattagatgaattaatgctaattgttgtactcaaaaatgtgttttaatatttatactcgtaaatgtagtacgatgtcgaactcatgaaagttgactaacatcaaaagaaactattttaaacaaagcaagaatattttaacttagttccaaatatttgatgagatttgttttaaaaaaatgaaagacaagtaataaaaagatttaaaatgaaaaatgaataaatataaaaatagttttgaagtaagatgtgtaaaataagattattaagatatttgaactcacataatgtaagttcaatagtgtttatatgtatattgattctcaagttatatagttgaaataaattatattatattttctatttaagtaaaagttatttgaaaaaggtagaaattttcttcacttgtaaaatacataatttctaagcagtagttatgtcacaatcttataaaattacaaaaaattaaaaaaaaattatgtgtaggcaaaatttagtacttatattttaagaattagatgtaaacaatttaataaaagacatttaatcaaagagtatcatatatttgcagaatgaaaaattaagtgaaaacatgttttaacaatcaagaatacatgatattgaagatgaaaaatacatatttttgatagaaaaatccatggacaatgttgtaagggacatcaacatacaaaaataaatcttatttagttacattttgcttcatcattatcttaataattttgaaaaaaaagaagctcataactagataaaaatgacaaaataatatacttgacatgctcttcaaaatataaaaatagtagaaagagaatgatgtagaaaagaaataatagtagtgaagaggagagttgtgtggaatgaagagtgtattaaaagtggttttctaacaccatatttataggcaaaatggagtgattaaattaattaaaataaaataattaatttaattaatgttgagaagagatgagataaatagaatacatataagggtattagaaaaaataaatattttgtgaggatgtaatagtagtgaaagataaag

SEQ ID NO: 70216 - DNA, 2444 bp, Cannabis sativa
cttacatcaaaaaataaataaacaaaagaaccaacaagaatgggagaaaccaaagaaggctaaagtgctatcaacaacaacacatcctagtttgccaaaaggaaatgctgaaagctcaagtaactctttcatagtgctacaggaacaaaaggaggatggtgtagcttctcaggtagctactgaacatagtgactctattattgtttttgatgcctatggatagaaccaatatagggtgttggaatgtgagggggttgaataaaatggaaaagcagaacacagtttttgatttgtgttgtttgaataaaataggggtttgtggcttattggagaccaagctaaagagtactagtggcataagagaaatgatggataggaaatttgctaattgggagtgctatactagtactaccattgagaaacgtattttgatcatatggaggaaaggttacactcgagttattgttgttagagaggaccctcaatttgtttattgctatgtgaagatggccggtgatgcgaaagctatgagcattacatttgtttatggttataacactatagatgagagaaaagggatgtgagatggaatgcttaatcttagtttcaaggccaaatcgtggattgtgacaggggacttcaatgctctttttgaattggaagataggaagggtggtaatatggtaactttgaatgacatcagagatgctactgattggatggcacaaagctacatggaaaagcttcttaagactggatcgggttttacttggaccaacaatcaagatggggacaagagaatataatcaaagattgatcatacccttgtgaatgaagactggacaaacaactttccctcggtgctaaagctcactatagctgggagactatatctgatcattgcttgtgtgttatttcgatggctcctaatgaggaaattgggcacaaaccgtttaggtattacaacttttgggcagatcatcctaaatttaaagatgtggtgcttgaagattggcataggcggatgaagagagagggaatgactgcgttgtacttagagctcatgcgtttgaaacacactatcaaaaggttcaacagagagaaaattagggatgttggaaagaggtatcatgaggccaaggagtattatagggagactagactgcaagctcaagaacatagtgatgacatgtcctaccagctagcagagaaagaggcagctatggaatttaatgcccaagaaaagatgtatcacagcaatctgagacgaaggagcaaggtcacttggttgtgtaaaggagatgagaacaatgcttacttccttgcttttctgaagaaaaaaaggaggatggaaaatagcattgttacttatacagatgagcaaggagtgatcatagatgactttaatgaagtggttaaacacttcattcagcatttcgaagggtacatggggactagttctatcacaactcagaacctgaggtcagattgtattggaattgggaaatagactcaacttggagcagcaattgagtttgataagacctttcacaagcaaggaaataaagaaggctttctttagtattcctgatttaaatcccctaggccagatggatatggagcagattttttcaagactatgtggcctaaacttggagcagaattcactaaagcagttgaagacttcttcaagacaggcttcatgcctcgggaattacatgctaccatgatcactctcatactaaagacagaaaaccctactaaggctgtggatttcagacctatagcctattgctcaactatgtacaaatgcatctcgaagttgttatgttctaggcttcctcaagtgcttcctgtactgattaatcaaaatcaaggagcgtttgttcaagggagatcgatagcccacaatgtcatgattcttcaagaccttttgaagaattacaaaaggaataacatatccccaaggtgcactctcaaagtggacatcagtaaagcttatgatacagttagttgggaattcttggaagtgttattgaatgactttaaacttccatcgagattcatcatgtggataatgacttgtttgaaagctacctcctattcggtcttgatgaatggaagagtgccaggcagcttcaaaggcatgaagggattaagacaaggagatccgttatctcctctcttatttgtcatgataatggagtatttgaccaggagattattgctagcagcaaaccaatcaaagatcaggtatcaccctttatgcaagaatattaaagttatcaatctttgctttgcggatgacctgatgtttttccacaaaggggacttaagttcaattcaggagttaaaggaggttctggatgaatttagtgcaacttcaggtctggccatcaatactaacaagtctcacctcaaatttttttttttttttggtatct

SEQ ID NO: 70217 - DNA, 1286 bp, Cannabis sativa
aatggtgtttcctttaaacaaaaggattgtaattaagagattattcttataatcttggatgggtcgaacttaaaaaaaataaaatcttatgctataaattagcataagtgaaattgtgttttgaatttattttaatattctaaatgtaaaatttttgcttaacactgcccataaatacgtccattccacacgatcaaaagctttacttatgtccaacttgattgcggaataactttttgctcctcttgttttgtgttggatgtggtgaataagttcaaaagcaactaaaatgttatcgtgataagtctattggagaggaaggtactttgtgtttcggaaattaccaaaggcagagcttccttaaatctcatcaccagcatctttgaattgagtttatatatgacattgcacagactgattggtcgaaaatcacccatacttttaggagacttaatcttcgggattagagtgattattgatgtattgatcaactccatactgtgaccttcattcaacactcctaaaaccaccttgttgactattggacccacaatatgccaataattttgatagaacgtagccgacataccatcactccctaggtttttatctggactcatagatttcaaggcatcaagtacatccaattcaataaagagaagaagaagtgactcatttaatttagcagtaatcattgttggaattgttgcagtgatgaattctaaagcttcattgtccataggagaagctgtgaataaatcagcaaaatactttgaaataatggcagtcatactagcttttgatgtcatcaccataccattgctatccttgagaaacttgatcttgttgttggctttccttgaggatgcatgagcgtgaaaaaacttagtattttggtcaccactttgcagccaatctactcgagatattttttgtcaatacatttcttcttaagccaaaagatcatccaatattttctatgggtttttcaagtccaccatgacagcaccagatctgtcttgttcattgttaagtgcagaaacatctttttgagcctatgtaattttttccttgaagttaccaaacttagttatgccactgctgcaatgacttggagcattccttcagattatctaaaaaacaatctatatcaatccatgcatgtgaagatttccaattttgttggataatagatgcttcttcctcctgttgcagccagaccttttcaaatctaaatctggttttccttttctgttgctattttgtgcatttggagagaaaacatc

SEQ ID NO: 70218 - DNA, 1880 bp, Cannabis sativa
atctctcaattttatcacttcaataaaaattcattatatttggtttttgaaaaagatttctataactataaagtttgctgcaaatattccttttcatttgctcaattttttaatctaaatgaattattctcattgacaaatttaaaacaacacaaaaataacaaaaaataataaaaaatataaaaaatataaaaaatatattttgtacgaattttttaacatttttactgtttttagagtttatttacataaactaccgttttttggtatatttttatgttgtacttttgttattttgttgttaattttttattttttgtatattactttttatgttatttttattatttgttactttcacatgatttttttttttgtatttttataaaatattgcaattttttttaaaaaaaaaactttaaacttaaaaatataaaatttataaaaattggtatttgatgtaattatctcatttatttatgtcgctatgagtcatataattattattacagtactagggttatttattgacaatttgacactaattaaattattaagattaaaagagtgtttgataatacttttgttttttttttaaaaaattttttaatcacaaaaataaaagtaaaattattgtttttagaattttatttttaaaaaataaaaatgtgttctataatcactttgattttttaatttcaaaaaaggaaaacaaaagtgtgttctataatttttatttttatttttatttttcgattttacttaagttgggtccatgtctaagtctagggttgggatcgtgatccgtttggaattggagctgaggccggagttcgagtcccaaattagttcaagttgggatgagagtctaaaatattaattaagaaaaaaattatttaaaaaaatataaaattgattttttttaaaaaaaattttaaattttgattttcaattaaaaattataaagtaaaaacaagtgtatataacatgttttttttaaaaatatttttcacttttctaattaaaaaaataaaaaactaattcaaaaaatatttgcaaacatactttaataatttacatatatattctaaaattccttttatttgaactatgtccaattaatattacatgagtattacattgataaattactttttcttaaaaagaaaaatacaactagagacatttgcaataaatattaatagttcagaataaatttttgtacttattctatattcgattaatttgactacatgaaatcatttattttcgaagaacaaacagaacatgctagtatatatttttcttgagtatatatatttgtcaaaaaaataacaataataataattttgttacatgaaatcaatttattttgcaaaatcttacaggaaagtactgtagagtctgttctgatccttctaaataaatagtattatgtatccttgagtaatgatacatgtacaaattatgtttattatattatgcactctgatttagcagattatttttaaattttagttagcatttatcatttttagacataaggtaatcatttgtttatttaattattttgagtggtaagtgatgtatacagatgaaaatttaaaaccgaaaagaattaatgtacagtaagaatatacctttagaagttagaggagtgatgcaaatggaataaataaataatgggtgtaataatattgttgattgttttgttaggtatttgtcaacatggttcctaatggattttgcatcaaccatcccatttgagggactctactacttgttcactggcaaacccaaaatcaccctttcctgctacctattgggaatgctcaggttttggagacttagaagattgaagcaattcttcaccaggtaca

SEQ ID NO: 70219 - DNA, 4242 bp, Cannabis sativa
agttaataatgcaattgcaactatatatatatatatatgacattattactcgtgactagctagtagttatagtaatagttgcagtagtagttgacaactaaaattgaacacacactatagcgcatgcttatatatcaggacgagagaaatttgaaaacttgaggggaatcttgggaagatatataatggagcttcgtttctgtcagacctccaaattaaatacagataacaaaaatggcaaccagatggagaaacatagttcatcatgtattgtaatgtatatttataaatatatatatacacataggtacaaacatatatgcaaagatagagagaataagctcatggggttaatataaatcgtgtatatgatgaaggtttaatttatgtgtattaaatgtaatagctacaacaatatatattaattattagtttacaagaacaattatatatttagataaatagaacctgcacttataatggtaactctggtttttttgtgctagctgttcaatagttatgaaaatatacaattagttttcaagagatggggaggtagggtgattccaacttcaaatctccttggtgtgaaatcatagaaatacccatcataattagaacaaacattatatgcatgtgccagcaaattaaagaaaaaaaaaacaagaagtagaaagaaaagcaatccatggatcccatgattttgcttactctcaatctttatttggcacttcaaggtatccgaaccatacagatatatataatttattaaatcaaaatgtgtgagatcccatattaaagtacatcaatatgtgcttacaacatgtctctaaacatttatcttttactaactatagcttgtactcaataatctgaccaattattacagctcattctaaatcataaacccataatagtgttcaagcattgtcttattaagttgttcgggaccgacttttaattttatatatcatataataattttctaaatcatcatagataaaccataatgtatgtttataatgaatcgaagaggtatatatatgatgagaaaaaacaaagtatatatgaaaaatatacaaatgaacatattctatgaatgtaagataagaaaaacatttatattattatacataaatgtaggttgaaaagaatcttgtaaaagggaacaagtttcagaactccattgctgtggctgtgtaaatctacttattgtcagagtataaaagtactgatcagtacttcattatatattataccatatatcactagtatcaggtcgttttgaaaactttcaaggagacatccattcgtgaatatgatattcaagcaggttaatcactgatagtacttcttctgttgaatttatatctacaaatatatatatgtacacatgtttgactaattaaaagtacattctaaggaaagcttataaggtacacaatggtctgatccccatgtctatagctagagacatatgcttgatctttcataaatttatatatattatacatcattggaaataattagtctgatttctcatttcactagcctcacatgaatgaaaccctagtaaattagtcagctgtggagggaaagaagataaacccaggcctatcctaatctgttttatttatacattatatattagcaagggactttatttttttacagtaattatttacttatatataagagcagagggagagaggaaagaaattctaacatatatatttataacaggtgatacttatttctgaaataatgctctaaagcctgaaaagaactttttccgatcgaaagagaggaaaaaacattataacataacaagtattcttcctgtgttttttatgtgtgtgtatatatatgtatatatcttagagagaacttaaggataaaaaattcttaacaaaattaaaaaaaaaaaaaaaaaaaacggacattggatacatgaacatattaccatggcatcactaaccaacagatctaaagcctgtgagagatttcttgttatcatcgaactgagaaaagaaaagaaaataaaaatcttatcatcattcatctcaaaaccctaaagcaacaataaaattttaatcacttgacataacacaaaacagtaaaacacacacatatatatacatgtaaattaagaagaaaaatggagaagagcccagataattaattagcctgaacaaacatatatcaattacataccctttcccctagattttacggaagatgtcttataacgtccctgaaaagagtatataaaaatatatgtatagggagtttatttaatttagggttcatgataagattagggttttttcatgccaccagaaacaggtgaaactgccacatgatctgatcttccttcatcaaggaggaaagttaagatcatgctggcagcttcaactattattgaaagcactagatatcatcaattttaaccaaaaaaaaactatatatatgtatattttatctagggttatagttttcggagagagatatgggagaagaaaggatgaaatagggggtatatatagaggctctgaagtaataaaagaaattatattaaataatgagtagaactaaataacagctaattaaaaggtaaattagtattaacaataatttaaatccatttgtttccccttattgtagaggaaaagaaagatgaaagaaaaaacgtaagaattaattaattaagtagcagttgtggtccccaaaagtgatgcaaattgaatattgtcacgccaaaggagacttagctaggcagtctctctctctctcatctcatgcagttttgacagagagattattgtaagttacatatatttacaaagaaagcattaatagctttttaactatatagatatataggttgggacaatgggacctcagactgaaatatattgagagggacaagctagtggtgggggacctttaatatatatatgtttgtgtattgtgtatatatctatcatgatctctatctcaatctctagctatgaacaaaaggaaaaaccatttttatcagctaatttatttattaactatgggggaccattttgcatggtcttaattttgaaacgttttcatgaacagaaagcggaaaaaggtatccaataattaaactcactaaaaaaatattaattactaaaattttctaatattatgtatacatagttctatatatatttacatccatcgcatcgatgtaattcatggattttttttaataaagcatctttatttatttttgtccatataattgatcacatatggacatatatagtggccgtttctgggaaaattttccatttggccggtgaatttcttgtttaccttttcatccgataaattaatgccagctgcatcatacatatatactcgttataaacatatgatattgacaagtgggaaatgacttgttagatattgatgaagttattaaaagcttttaatttggttaattagtatagtctccatattgattgtttatatatatatatatgctgtataagacctggaatattatgtatgtatatatgtgtgtaatatatacaagctgctatctgggtacaaagcccttgtatactatggttatttgtgaactttataattaatataataaaactagcttatctttatgtaaattattattattttagccgtgctattattttaatttattcatcatacctcaaacaatatttaccttgaccttttttctttggaaagaaatatttccctttataattacttttgtaaataaataaaaactgatttgtgtgatccagcgggccagtatgagtgaattaataatatttgaagatccctagctacagcgcaaaatgtatagatttatatagagtctagctgtttagtctagggttttatgtcctttattccatgtttataggttacgaatcctaggtataatgtgctaaactatatttgtttttgatatcaaaagaaccctaaattgttgagtgcctctactcaaagcttataaagagatactttcattaaatagataccatttctctctacctatatttaaaaggcaattatattattgggtgtcattattgtccttggcgtgttatttattttgtatatgacaatctacagtttataatgtgaaatttcattttctttcttaaaaatacacccatactaatttatacaaaataattcttttttttttttacatattctctccttatttattttttt

SEQ ID NO: 70220 - DNA, 1367 bp, Cannabis sativa
aaactcaaacagagggaagagtagatcaccattacttgagttggtgtagggcaatcttggaatttcaccaagaaaaatcctgcatggtggttgtgactaattgttgtgacatttagtcacaaagattaattgtgactaaaagtgacttttagtcacaacattattttttgttgtgactaaaacttttagccacaacgtcgttacaaaaaaaattgtgactaaaacttttagtcacgatatttttcacttttagccacaatttttgttgtgactaaaagtgaagttttttgtagtggaagaatcacatataattatcaacaatgagaaattcaacaaaaagaaataccatatcttttatgagtggtttacaaaatcaatgtagagtactatggaacatattttaaatcttaattcttaatcttgttggaccattgtctcttcttcatttataataacaccaagaggtagtgaaaaccaactaaagttatctctagtgaaaaattactagttgatgagcaactttattttttcccaaatgtaaaatcgtgacattcatatgttgaatttgttgtatagtcagcaactactctttttttattgtgcttgaaacatttatcatctacacagtgagaattgagtcgacttccaatcatacacaatattactagtttacaaatacaatatgtatgactttcataactccatatagttccacttttgagtggagttttatttccaaggaattgaaagctcccaaaattgtatcgttggaatctcgaaaaacaccaccacaactttacttctttggagctatctcttgctgcaccatcaagattaattttgatgatatttggcaagagaggcaaccagctcacttcttgaatttgtaatttcctctttgtctataatataattttttttctatatattattatataatatatttaattaaataaattttatattgaattgtagatgtattattaattaattttattaatttgatacagaagaattaattatatacctttggaggttttggtaaagaaactaattttattagtccatttcatacccatacatgtatatattgacatttgatacccataaattataaaaattgtcacaaataactcattgtgactaaaacattattgtcattgtgattaaaaattacatttagttacaatttttttttttttttgtgactagaaactatttttttttttttgtgtgtgtgaagccatgtcttcccttactcctccgctacatgttgtttctttccttacaatttgtttttgtctttcaaatacattttttgctctattatatacatttaaatctttattcttaatcttggtggacca

SEQ ID NO: 70221 - DNA, 881 bp, Cannabis sativa
attttaaattttctaatccaatctaatccgcactttgcggattggattgaattggatcgtgcgtattagattggatcgattattttatgaacactcctagttagtatattccccgtaatttagatagtgttttttttttagattctcattttttagcggtcaaaaaatagtcacaaattatagagtcggatcattaatttttacaattttgtcttattgttttaatcgtgacttttcaatctagaaattcaatttggataaattggatactaatcttaaccctaccactggtaccactcaatctacgcatcttgattcagcccctaatccttaccaaactcaagacacaaacccagaattagacaagaacacgaactcaatcctggacctcaaccctgaccttgaccctgtactcgaatgctgacacccgaaaccaaactcggaactcgaccttgaacctcgtaccctaaccacaaatccaaactagacctcgacttcgaaccctgtaccccaacctcgattgaccctatccttggaccccaaacctcaagccagactccggcccgaccaaacctcgaccttgtaccccgatccaaacctcgaccttgtaccccgatcttgattagacccaaacactagatccccaccctaaccccttactcggccctcaaccttgaacttggaccctgatcaagattcgagtgagtttttgtatataactaattaaattttattaaatagaatatatttacatatatattttttatcattagtgcatttggtactattgatgttacgaatatcaataccaagagatctaaggttccaattctgatcttatcttaattctcaacccgttcgcaaacctagtgattttgata

SEQ ID NO: 70222 - DNA, 1438 bp, Cannabis sativa
  modified_base (1236)..(1244): a, c, t, g, unknown or other
gtatttacccttattatattattatattatatatatatatcatatttttatatttttaatataattaatgagctaaatactaaaatatatttgagctcgtcatgttgtgtcgtatacctaaactcatattttcatattatgttgtatggtgcgtaagtttatatttttttttttgtgtcatgcatgtcgtattgcgcttaagtatatttttttttttatatcgaatcgtgcttgtattagtttggtatcgtattataaagctcaatccatattcacagcagtatcagaccaaattgatcgatgtagaccgttgtacataatatctaaattaaacatcaatcatcaaaatatataatactttaaaattaacacgtggtgttgatatcgcaaaatatatctttaaaattaagcaatgatatgatatgacagtaaacaatattaattaagtagcgttatgtatacttaactacatggccacgtttcataacaataatggccaaatcaaattgagtacaagagtatctatacaatattttgagactagcttgtttgagtggagtataaatatttatacatatataatatagctagggagagaatcgtaattccattcaagaaaagaatccaaacacaaaaaagtgaaaagcaacttgtgtctatataatgcatgagaggtttggtcccaaagctcataattaactaagctacaaaacacatcaagctagttttgctttaaaaacaatcaatcaattaatagtgtaatattacaaatatgggaaatagtcatggtggtgagcgtagttcttatcctcatcatcaacaaacaaatcttaataacgtcatagactactcccaacccaagaggaagctgctgcccaccggccccggggtcatagattgcaaccaggcggcccagcgctatggcggctatgtggtttctgaatatggcggcggccgcagtggcaataatggtgaacaaaatggcttgaccaaaaaacaagccgctgctcaaggttatgtaccttactataccaagtaataagggtatagccacttagtgagaacatctttcagttattttaattgtgcttttatatatgtagttatatatatatattaatgaaataatatatgttagtagtacgtacttctcttatttatgtattaaatcagttaagctcctaatatattaatggatgttctcatattctcgctcactctctctctctctctctnnnnnnnnntatatatatatatatttttgatttaattatttttttaacatttctttttcttctaataaaaactctaacagaatattaatgattgaaatatattataaacattaaataacttaacatttgaggtttaagattgaggatatatataatatataattaataaaattctcttaaatatatatccatatatatatata

SEQ ID NO: 70223 - DNA, 1428 bp, Cannabis sativa
  modified_base (1358)..(1385): a, c, t, g, unknown or other
aaacttgttcgaacattacacttgtctggtgctagaattgctgaaataccaaaggagatcaaggagctgatacatttgagatatctttgtatctctgacaactatcatttgaaggagttaccagaacaagtgtgtgatctctataatttgatgactttgagaatctatcgttgtcctgaatttcagacttggccaaaacaaatgtcaaagttgaagaacttgagatatttgtatgttaaagggtgtgataagattaaggctctcgcagggttgacaatttgggatgtcaagatatttcattaactaactctttctttatttgtatcttcttagtttggttttgttctttttgttgtttggtcactcatttgtatcaattacccaatgatgaatgaaatatttgtagcctttcataaactttatctacttgattatcatttgttctcaaacctttgtttttttcatcaagtattctatcagttgaaatcaacatttaatcatgtccattgccaatacttaaaatatgaaccagaagtagtatgttagtctatgcctaagttttagttaatatagttagatttagttagtagtctcttgggtagttaagttagttattggttaaataactaactcttgcaactagtgttaggaactggtctatgtcctataaatggacctgttctagttctaattcattttaatctcttgggcaacttcctttgctaaaaaatcttttcatctcacgatgcaattcagtagtgacggtgggtgctgagttttatgggaattgttctgcgagaaagccattttcatcattttaaaatactaagcttcaggtacacttatgcatatttcaatgtcacatattacttacatctcactatgtttcttctctttttcatttcagacttttttttcaattaaagcttgtatctttttgttgctttatgtataatttgttatccaaactgacaattaaaatgataaagttgaaacatattgtaagttattgacctgagagagctgcaaaagtggaaagccatatgaaatgtagataattaattattaagtagaataacatttgttatccatccaatcatagacatatacttgtagagaaactcttgttggtcactaaaatcaactgaaagaatttataattaattacaatctttcctaattaattacttaatggtaagatttgcaatcatatgttaacaacttaacccaaatcgttcttttagaaaggcatgaaagaggtagctttcacgacatgaaacaagcaatgttggggttggtgggtggtggatgtttttaggggtagtttctaggcagtgtgaagaagaagaagaagaagnnnnnnnnnnnnnnnnnnnnnnnnnnnnagaagaagaagaagaagagaaaggaaagaaagaaagaaaaaaa

SEQ ID NO: 70224 - DNA, 1480 bp, Cannabis sativa
ataatggcaaatctcatctcaaaacaccaaacacatcattaatatcaagttattggacaattatattaactataagcggtactcttattgtaataataatcatatattgacaataaattatgtgaaaagatttggttaaggatatgaaatttagtagttagaatacatgagaagtttactttaaaaaaatttagaatgtatatttaatgttttttaaactttagtttgtaatcttaatttaatattttgtttaattttgaattgaaaatatttagggatatgtaaaataatggttagaatgttattttgcttcaattaaaagtttggatcaaaccttttgttttgagatttgttaaaattggagaaactatgtccatttctttttaatttacatatgagtttttgaattattgaaaagtgtatattgtattgagtttttgaatagttgtagaaatatatatttttttaagatcataagaaggttttggattaaattttttggagtaatatataagtcaacatgtgtaactttagataaaaatataattagtttggaaaatataaaataacgattatgatatttttaatattgtataaatctacttgattagcaaggtaaaatttattcgattgttcattgcaagaggtatatataatgacttatatatgttgtttaataatattatgtaaattttaaaagagtttgaatatattagatatttatttgtagcgaagtaagttttgaaattaaatatgtactgtgatttaataggtgaaatagtatgtatattatagatgagtttgaatatcttaaatatttatttgtagtaaagtaaattttgtggttagctgctattggatgggtaataattttatatttgtcatgttttttttgttaattgagaggtgatttattaaattagtaaatattgtataaataaaggatattctgcatgctgaaatttttaatatttatatttttgtatacttattacttaattaaattgaaaaattttaaaaactttgatagattgatatatttcacgataaattatatgaaattttataaaagtaattgtttgacagattcctcgtaactttgtcaaacaataataataaaatgtatatgtattaaaaatataaccaatacacagtgtatcaatttatacatttatcggttcaataatttttccactaataatatgtggccactattattactacatgactttctatgaaatatggtgtgaacgcattgaaaggtcaaagggagatgaactaggatggcaaagagcatctccatgatacgtgccaaaaaagtgatgtattgctatattttagcatttaataaaaattatgatctaatggtattttcaaaaatttgttaaatttgacatatgttaaaaattgtgctaaatttgacacaaaatatagtattctactaaatttagcctacaataaatattattttttttattta

SEQ ID NO: 70225 - DNA, 1356 bp, Cannabis sativa
aacagagttcctgatattccagtttaccacgcgcgtttaaaaaacttcaaacgtattttcaacactgtaaactattcgaaaattttaaaaaatgtatagggatgatgttgtaagcataacgaacaccctcatgaaaaaatttaaagtaaacgttgactaagaggttataacaggatgcgaacggtaatactcctctttttaaaatggtacaaaaagtactataaactcaattttagatatattttttttaatataaccaatttaaagataatttctagtatgaacatatgtagaaaatacaatcagtcttatcgtaatatctctaaatcaaattattattaatttttattttgacaacaaattaacttagggtactatattttagaaaatacaaagtctgaaataatatttacctttaaatatataagatctaataatacttattttttaaccaatacttatttgcaactaagatagtggattattggatccattaaataatcttttacattttttatgactaggtttcaatagttatattaaatatataatcacgatggttacatttattttaattgttgaatcattattattattttaaaaattaaataaaaataattaataaattacatgtaatttgatactaacatgattttatttatttttttataaataaaaataaaaaaaaatatttataaatattagttgcaaaaaatattttaataaaaaaaattaatttattttaagtatataattattttaagtttaaaaattaaatttttacctattaataacatattatagcatgttatattatagtcacatatataaagccatataaattgtaaaaagtatatcattgatgtattcttgatatatatgcacttttttttccttcaaataatgcatgaatgatatattattgatattttaccttcaaaataaaataaccaatagtgtgattgtttgctctagatatacataagagtattgctatggggtggatgattggtcttaggttaaagcgggttagatctgtatttagtatctaaaaaataattctatttaaaattatacatatatttttttttaataattttcaaaactcaatctcaaagtcgaccttagctataagatattaatgtgtctaccactactataaggtcacattgttagttgttttctataatttttattaaagtaaaataagtaagacccgatattaaattataccaataacaatattatatctcacaagaatattaaatagctgacacaatattaaatgaatatcctttttaacatttcttgatacataaatatataacaatataatttgtttttgaaaaaaaaaaa

SEQ ID NO: 70226 - DNA, 965 bp, Cannabis sativa
attaaagtttaatttgcgcgctaattttattagtaatctcgtttaggggattagggtttcttaagcgttttgggtagcgtgcctaatagttagggcgttacacaagcgttctcttaggttcaatttgccatgacagttggtggatcttgttgcacccatagaccgtatttttccttcttgatcattgttgcgacgactattctctcctgcttgcatggatcaactatgagttatcgtgcacctagcggtaacacttgcctcttcatgcctcgctcttctctcttgggtatgattcctcgcgttctccctattgagatttgtgtgagctcctttcttataagtttggaaagaatgttggcaatctcttagtgatgacccatgtaccacaggttgtgtccccagacttcccttatttctatggggaatttccagttccctggttcctggtcaatcacatggcatctcacttttaaggtgttccccaatttacccaggttgtctttcctgagcgttttatggattccttccggctgcctcctgcccctagtttgcgagtctcgaggtttgccttgcggttctctctctccagggttaggttgattttgggagttattccattgtgccactttggctacagctgcctcactctctaattcagcattacaccaatttgcctcttccaatcgacgcttgagatggcagttttctaattcaacgattgatatatactttttgggtcataggcgccatcctcattaactagattgggacgagacatgtcattgttcattctaggcccttcaagtctggttcccaaattctgggttttcctagaccttgtggtctgttcaaatgataagtcagatgatccttggggactcattggctctaattcgggacgatgagtggtttcttcataaggattaatttcttcgttgtcagccataagaggaatattatttttt

SEQ ID NO: 70227 - DNA, 2262 bp, Cannabis sativa
gattataatattctcaagtcttttggttgcagttgttttccacatttgagaccttataataatcataaacttgaattgagatcacaagagtgcatatttttggggtattcctcacatcacaaaggttatttgtgtgaacacccaagtggcaggatttatatctcaagaaatgtaacctttaatgaaggccacttccctgctacctcgggttctagcagtgattcaacacagcaggtacaatccttgtccaatgttcccacttttagttttccaactaatactattccttcatatactaatcatggttttcttaattcccctaccactcataatgccacggttattgaggaacatgacactactgttcatgaaggacaacaaagtgtacctcctattgatacatcacactcccatcttacactacctacagtacctaccccacaccccatcccttgtcttatgcaacctttgaccacaacacaagacagccggcccacccctatcacacatccctttcctacttgtcctttacctagcctacacactaataccaatgttgacacattacctactccctcaccaaacacatgccccactatacccgatgcacccacacaaagcattaccattcccttaatacattcggccatccccattgtaccagtgtatgataatgacaactcacctttaccaaatgtcactatcccaatgtcacctttaccaacggctataccacctttaccattgagtgataatgacaacccacctttactcaatgtaccattgtgtgatagtgacaacacaactttatccactacatctatcccaacggctacacccaatattcccatccttgataacctcatagcccctcctactacaagaactcaccatatgaagacaaggtctttaagtggcatacgaaaacccaaagcattcaatgcaaccaaatatcctttaccagagtcactaatcccatctgaacctaagaatactactgctgcactcaacaatccaaggtggtttaaagctatgaatactgaatttgatgctctaaagaaggctggtacttggacccttgtcccttactctccttacatgcaagtcattggtaacaagtgggttcacaaggtgaaactcaatgcaaatggtactcttgatcgactcaagtcaagacttgtggctaaagggtatttgcaaactcctggaatagactatgaggatacattctctcctgttgttaaaccagccacagtacgaattattcttacattggccgtttcccttcattggcatgtcaagcaattagatgtttctaatgcctttttaaatggtgcactacatgagactgtctacatgagtcaacctgaagggtttgttgatcccaccaaacccaaccatgtgtgtcaacttcataaagccctctatgggttaaagcaggctccccgcgcatggaatcaaactttaagagataaacttctggactggggtttttcagcatcaaaatctgacacttccttgttcatatatggctcgggtaacaacaccattcttctccttgtatatgttgatgattttttggttactggtcctaatgttcctctcatcacaaagctcatctcagatctcaacaacttcttttctttgaaagatttaggatctgtccattattttcttggtgtagaaatttatcgtgacagttcgggcatgtatttgtcacaaacgaagtatattacagatttacttgttcgtctcaacatggaaggggccaaaccttgttctaatccaacaagttcctctcttaaactttctctctctgaaggagaaccgtttagtgatcatacactttacagaagtactttgggggccttacaatatcttactctcactcgaccggatgttgcatttatcatcaacaagttaagtcagttcattcatgctcctacaaacctgcattgggaagcttgtaagaggcttatgcgctatctcaagggcactatacatcacggtctacatctcacacctgccacctctttgactttagaaggctactctgatgcagattgggcatcgtgtgttgatgatagacgaagtacggggggctatgtgatgttctttgggggaaaccttgtgtcctggtctgccaagaaacagcaggtagtggctcgatctagtagtgagagtgaattccgagccttagcaaatgcagcagctgagatcaaatggttagtctcactcctctccgaactacatgtctctaca

SEQ ID NO: 70228 - DNA, 834 bp, Cannabis sativa
atgagaaagattgttatgttagaacttcttggtcagaagagagttcgagcttttcagagtgtgagagaagaagaggtcaaaactttgatcaaaactgtaactagtatttctacttctttgaattattctggtgttgttaatctcagtgaacttatggttactttggcgaataatgttgtttgtggagttgcttttggaaagaagtacaatggttcttattatgatggtggtgatagtgaaaataatgggaagagtggtggaattcgagagttacttcatgagactcagaatgtacttggtgggttttgcatggctgacttttatccacgatggttaacttggattaacaagtttaatggtcttgaaagaaggcttaacaagtgttttagagacttggataacttttatgataaagtgattgaagagcattatcatcattttgatcctaatcataatcataatcaaaccaaacatattgaagatgttgttgatgttctgcttcaaagcttgaaagattttttgaattgtattacgtgatatgtatatcttcaaattatttttaagatgaaagctatagtgattttttgaattaaagctttgtcttttatctaaaatgtgtataattttgctgaattttttttttctttgaagcatgttgaatttgttaagtttcatgaattttattacaagcttattgatgaatttctttatcaatttttcattgaagtggtatgaatttttccttatgaaaatatttgttaaatggtacaaaatattaactatgttataaatattaataattatgtggatgtccaaatcttttatttattacca

SEQ ID NO: 70229 - DNA, 5153 bp, Cannabis sativa
  modified_base (4775)..(4777): a, c, t, g, unknown or other
ttgtacaattttgaaaaatacaggatctattttatcatttaatataacagaaggtccaattagtaacttttgcaaaacacatagtctaaattagctagtatttactctactctttttatataaataaataagacttttttttgagaaaaaataaataagactttatgtaaagtattcgaatttggaaaggttttcttttaggagatctctttcttgaatattaatagggctttcttttatgtatatactaaaataataaaaatattacacaaatatattgagtaggccctataaatatttatacagttcaccaacaaaaatttacaaaaatacattttgctcttaccattcagtagcatagacaatcttcttcaacaacgacacctttcaccaaccaaattagcaggccaaccgaaaagaaaccaaggcagacggagaatcaccattaattctagcaacttcacctgagaagaagacctgaatcaatccaaacacatgttgtttcatattgatgaaaaaagtgtaaaaaaactagtttgaaactaaaattcaaccctgaattctggtttaatttgtagaaaactaatcctcttaatatcaattttcaaattcctaaaaagtagatctctaacaaatagatttggagctcccaatcaatacaaattaggtattatccaaaaaagaaaaaaaaatgcattaatattatagctaaaagtttatcccattatgttttcgttattttctaaattttgaatagtgaatttgttcatattaaatcacgaatagaatagtgaattcacatgtagatagagtcacgtacgtgtaaacactgttctagttttttatgtttcaacaaagttgcatcagagttgcgtaactgttttgctaacgctctaaaacttgacatatcaattattacaaactgataacgatacaatatatttatcacatttgcatgaatttaatatcgtcaatacaatacaaagttttttaaaaagaacttttataacatggttagttttattaatatactaaattagttaatagaggtctaacaattcttctacatacaactaaaattgaaagaacatgacttcacaagatatctattgtgtgtgatccaaaagaccaaggaaaataagatttctaggtgcatgaaaaataaaaaaaaaaacacaataggtgcaacaaatgtggctaaaaatgtcacaaccggaagacatgccataaccaggcaattagatattgagaaaacattaatttgaattatttaattttttttgtgaacttttacaggcagaaaatgttactttaatacattgttattacatttaatacagaattagttttaaaaaagttgcataatacattcttttgtagttgaatgtcaaatccaacatattatcagaaatataaaacattatcaataccatatttgaaacattaattagaagtttaaaaaacttttcttataatgttgacaagcatgttgattattcaatagttgtcaaaccgttgaatgatagttgtatagcaggtgttacacataacatattgattcaaaaatttaagtgatttctctaactactttcatggatttaataattagacatgttgaataaatattgtcccacagttgaatcaaacattttatatatcagtataaacgagagactcgcacaaaaacataagcattataacccaaaataatacatagtctcaaaaaaagataacaatatgatatccagttcttaaacaaaatgaaaaaacaataatagaactataacatcaataaccaagtcttaacatctagcattaaaaaacaaacaattaaaataaataataacattcaacaggctatagaaaccagttcccaatcactagactctcgttcttccctttaatattcttcatagacttctaaggcttcacatactcactatcaatgttttcttcatttttccttttatcataaataaacaaaaccatagaaagcctcgtgcgataagttctgatatcaaaatcagtgaaacatcttttccatgtataaagaactcagcaaatatgcgcagcaacaaaagcaccacaatcactgtgtaataaaacaataattaaaatagtttaaaaaaaatatactacaccaacaactaaaatgcaacaacgtaataaaatacaattattttcctgactaagtagagaagcaatcatgaatatcaaccaaaaaaattaatgaatcataaaccaaatctaagaaatttatgaaaaataataaaaataacaaatcacactacaataagcattcaacatacttaaattcaaaaccataaaaatcaaaatcaacaacaagtaccataaaccattaaaaagagaaacatggttttgaagttaagaaatggaaaagaaacttataaccaactaatacgaaataaatagatgatactcaataacagacctaaaacaaactatgaaataatatttatcaaagcacaaaaaccatacctaaaagtgataaaccctaaaatatggcaagacaaaaaaaaatgcaatacaaacatcaatcaaacgaggagtttgattcttctcctttttacaagaacaatatcaagaagaaaacgactcaacttaaagaagaagaaaatcgaaactggagatgtcttctttcttgaaggaatttcatcaaacatatggtaggtgaacctttgtatacatatatacacaaagacccagcttaaaatagaagaaaaatatgaaaaactgattctaaaacataaaaatcacaaataacagcaacacccataagaaagttagcacgcaaaaagtgattccgaagttgagaaatcaaaagaaatcctaaaatcaactactgataaatacaaatgaacctaaaacgatcgaaataacaaaccaaacctagaaaagactgacaaacaacgtgaatcaaaacacattaacaatatccaaaagtaatagaaccaaaattagagcagaaactaaaaaaaaaacttgaaacaaacttcattcaaatgagcagcttgtttcttctcttttttatcatcagaaatcaaacgcttttagatttcttattactagaatccttcctttgtttaggtaagggtgcaacaaaattatcttcatctaactttcttttttcttttttttttccaaccgatttgacacccatatctggaacttttggatgtttaataagatttttttttttttgcaacaggagaagatgatgagggagttattgccattatatagaaaattgtagaagaagaacaaaacagagaagaaatcgtgggaaagaagttcagatgatggaacgatcaaggttgaagtcgtgtggagaaattaaggaggagaaactgaataggattatgggtatccaattcacaatcaaaactgaaaaatgaaaagaaaaaaaaaaaaaaaagaaagaaaggaaaaactttgagtgagatagtcatgaatggtgcggttaagaggtattttagtaaataaagtaataataaaagtaaaatgaatattattgttaaacagaaaagaatacaataaaagaaaaacctaatataccaatatatgatatatgaatttttttaaaaaaatttgacatcattttttgagttctcctttgaattagatatctaataatagatttatttatgatttagtataaattttgattgatgaaatgcttaaatttatttattattaattttcaatcaacataaaaatgataaatactcaaactttggttagaaaactattcactaaatagaatagctcaagatatatggaacgcaagacaaattagatattataaaatatttgttacaaaatttttataaaatgtgagtttattttatgaagagttttttttatttattttaatattattaattgataaattaattttaaatatttgttacaaaataataataattattatattaaatattatttgtcttgccaaacatgacaataaaaattcatatgtaattactataatgacatctaaatacacttaatattttaaaatacaacatagttactatgtagtattacactcaatactaattataaagttactttcaaataaaccctaaatttttcttcaacaagttttgacccaaatacatatccctaaaactaacaatattaaaaattcacaaaacttatttgtacttaaaataaaattacaaatagtgaagcgtatatcactatatattttttttcttcccaaaatgagacctatttttttaataaaaaaaaaatgagtcttaatttaaacaaatatgattaattttaaaaaagctattaattagtcaaagaagtttttttgtgtttaattagggtttgtttataggtaaggaaactcaaatggacacaagtctcttcgagtaataaagtaataagattggccaatccattcactaagaaataatgaatgtggtttgtttgtccaaccttatcccaactgatgcaatagctgtttttcttaatataatatttcgtgttcttttaggaacgatttacaaaatataaacagtcgaattagaatgattgttgtcgtatagtaatgtgtgtgaagaaaagtatagaacctttgctttgctttccaagcacacttttgaaaccaacaaagtttatgataaaaagaggtgaatacctatacctggtgccttttggttttgtatgggtaaggcaagtaatgtattccttcctctataatcctttttcctttttcattaattatatatatatataaattnnnatatatatatatatatttgtgtgattgattggagatttggaatcaaaataaataaggggcttcaaaaataaaaaagcggccataagataagagtagtaaagcccaagttggagggttgtgtttgatggtgacctcagccacattgtttgcctcctctgcaacccttcactcccaacattcaaataaagaacctattatgttcttggccccatctcaaaaatagatattaaaatgaaaattatgaaatctcactgttgattcaaaaatttagactatacttctaagccacgcctgctcattaaattagcgagaatgaataagtagttaagtaattattattcgcgttttcggtagtagacacatagaatctaggtca

SEQ ID NO: 70230 - DNA, 1774 bp, Cannabis sativa
taaaattattctataaatatatttatctaatctatatatatttccgaaattaatcatttaaaatgccccagaaaatggtttaacagatttggagcatgttactgtaggtatactttgaagttgacttacactaaagtatcatcattattaagacttgagtcgtccaaagaccaaaatttcatcactatgtgcatcatcgaaaaacaaaatctacccaagccaaatgaatcccaatatcaatattatcatttcaaaaagaaaagccttgaactatatccaatgcgcgcttagaaagcccacaaaccaaaacccattgagatggagaacaaattagtgacccccattatctttactctcctcttcttctcctccacgttccagctccaaccttgtctctccgtgctatgcaacaatgatgacaaaaaagtcctcctccaaatcaagaaagctttcaatgacccctattacctcacctcatgggatcaacacaccgactgttgttattggtgctgcctcaagtgtgaccgtaaaacgcaccgtatcatcgccttaacaatcaattcacctggttctttcacgggaccaatcccggcccaactcggagacctcccttacctcgaaaacctcagcctccgcaaacaagttaacatcacgggtcccatcccaccagccccattgctaaactcaaaaacctaaagttcctccgtttagactccaacagtctaaccggatccatcccagatttcttaagccaactcaccaatctcatggacctagatctatctttcaacaacctaactggaaccatcccggcctcgctctccaagctaccgaaccttagctacctcgggctagaccggaacaaattaaccggaccaatcccggactcgttcggagagtttaaagtagaaggtttgtttttggtgctgtctcataaccaactgtcaggtaaaattccagattcgtttggagaaaaggacttcggttctatagacttgtccaggaacaagcttgaaggtgacccgcatgcgttatttgggttgagtaagacggttgagcatatagacctgtcgaggaatttgctggagtttgacatgtctaagattgaaatttcaaagagtttgacctcgttggatcttaatcataataagataacggggagtcttcctgtgggactaaccgcactggataatttgtatagtttcaatgtgagttataataggttgtgcgggaagattccggtgggtgggaatttgcagaaattcgataacacatcgtatttccataatcgttgcttatgtggtgctccgttacaaagctgtaaattgtaaattgaattgttaaacaacatcaatgcctgtttataacggagattagtgtctcaacaattaatcacattcagtataattatgtagtgaattcctgatttattgagttttaacttttctggttacatattattgtaacggatgtcaatattttccattacttctaatttgttttatgtatgcgcaagttgatccaaaccgcgtggctatgtagtaacttacaaaacaatgcgaccaaaatttttaccaggcttcacctcagatgttgcttgcgcattatcaagatgttccaactattctaaatgtaggcttttacttagtactttttttcttaatgaaaataagaaaaacccataaaaaccagaaggtcgttgccttgttgggttgtgttttagatgaaaacagggataatagaaattaggctttctttcctttttttttttttt

SEQ ID NO: 70231 - DNA, 916 bp, Cannabis sativa
tctgcaatttcagtgcttagacaatttgtgtgaggagggaaaaggaggtcgaagggagttaggtggctggacacacagagagctgtgggcgcggggagctggcgggcgcaaggagcatgcgtgcgcgtggagttggcgggcgcagggagttgcgtgcgcggggagctggcgggtgcggggagctgctgggcgcatggagcttcacaaggggaaaagaccgatgtgacgaggaagattaggacaaaggaggcgggggccatcctttgtccccttttgcttgtcttgagaatcttgaattgttcatccccttatttgttgtctataggaatacttacttattagactttcgctgttaacaataactataaagaaaaaatagataatttcataaatacaataaaataacaaaaaaaaaaattacaaaaatacagtcatacaaaattttaaatatttttacggtttttaagattttatttacataaaatacggacttttattgatgtatttttatgttgtactcttgttattttgttgttatttgtatattatttttatgttattttgttattttttatattattttcatgttatttttatgtattttttatagaataccgataacatataaaaataaaacttggaaccaaaaattttaaaattttataaaaaaaataactgtaattttctcataaaaagtagtaatttatactcgtgtaaaatgactgtttatacattttttttatattgaaattattctgaattttataaaattttacatgatatcttaaaaaactataatgtacatgaccataaaaaaaaaattagacaattttttaaaatgccaaaattctaagagatacatcaatgcaccataatttataatacttaaaatatagtagattaaaattaataaata

SEQ ID NO: 70232 - DNA, 744 bp, Cannabis sativa
gtgggtagaggtgagatgaagcaatattatgagtttaagtgggtgattgatttatagggaagagaaaaagtgtagagttttaggaaatcttctttaattagagtttgatgatcttcttttcagaacagtaaaatccttagtcaactagatgtacgaagtgagatttagacaaatgaaaggttgacacgtcatgctgtcggttgtatccatgcaataccattaaactgactagttccgactcctcagtcctctcagtatagatgaccacagccctcagtgccagactcatttgcattaactctttctttatttttatttaacaaatttgcaataactcgttttaaagtttaaacagtaatattccttttactttgtctttctccattctctctctatctctccattttttttacctttactttaatctcttgtaattatacctgaataattgcaacaactataaaatatattaaaattgaaaatgtatatattgatggatgtgttaaatctgtaacatgcctaaacttgataaatttagcaaataataagtatttttttatcttttatttataatagttctattaaatattaataagtgattttaagacatatttttattataatattgctattagttatattttaaatattttttttgaatatagttatattttaaatatttaatttattatttatcattagtaataattttgtttttgccacataccttcaaataccattgtg

SEQ ID NO: 70233 - DNA, 1309 bp, Cannabis sativa
ggctaagtgctaacagaacttaggtttatgaggttttaccaccaaaattttagattgggggttagttgcaaaaatttggccacttaaggaggttatgccgcaaattaccctttaggtttttgacttttgcattagccatactgaagcgactcaagtacgcttttagagatttcccaagttgttgttttatgttgtttaatgtaatgaagatggttactttatgaggtaatatatataatttctattattggtataatagttttgtattaccaaaaatctgtatactgatgtttattcgtggtagatgccaattgtttgattctaattgtcacagtataaatggtaatattcgaatgataaactatttgattattgttattattttttttgctgagtccttgtgacacacaggtactatgtagtgcaggttaagccaaagaaaagctagatcaaccatgaaataacaatcttctccaacaatgtacatattgaccctaccgacgtgagtgccgagttgtcagtagttactttggactgtattggctgtgtattttggtttttgtattttgacttgttgtcatatagtcttttataacagcgatccctgaaacatatttttatgccgttatgatgcttgttttaagtgttttattatagtcaagtttttaatatcgtcacggtttataataattaatcaatctattagtattaaactagtttataaaattacacacatgacgttcctatgggatagaacgttataaacggagtcgaggcaacaagcagtaaatcgtgagagcagttttttttattattttttgatagataattaatttaagtttatttttataaaaaaatgtaatatataattatatagttttgagtttatttatgattttgattatgtctttgttctcatcttcaatttaatgatttatttatagtttattataatatattaattttaatttatttttttttacagaatttataattttaatttttttataaaagagttgatcgggttaacctgttgaccctgtcaacccgtgacccgtgactcgtgagcccgcgaatccaaccatttcacgagccaggttcagatacaattttttaaatctgaaacccgcgaatccaaaacccgacaaacccgccctatgttcaaccctaatttttctttaaaaaaaaattatttatggggttaagtgcgataaaatatatagttcatgtgatttttcgccaatattccaaatagatttttggtaacttaaagttgttaaataaatttttgtattgtatatatatatat

SEQ ID NO: 70234 - DNA, 1139 bp, Cannabis sativa
atgtctacttgcactctactctaggtttgcaatttgaaaatcattacgagagaagtgtaatttcattcaatcaaaagtgttcgatacaaatgtagagccattcatgtatactagaaataatagaaataattgattcaatcaaaaatgtctgatacaaatgtagaatcattcatgtataatagaaataattgattcaataaaaagtgtctgatacaaatgtagaatcattcatgtatactagaaatactaaaaataattgattcaatcaaaagtgtatgatacaaatgtagaatcattcatgtatactagaaataataaaaataattgatttaactttgcactctaccctagggtttgtaatttgaaaaatgtgaatcataacgagagaactgtaatctcattcatgtatactaaaaatgaaataatagaaataattaatttaactttgcactctaccgtagggtttgcaatttgaaaaatgtgagagagagtcaaaactatcaatctcattcaatcaaaagtgtctgatccttgtgaccaaatgtagaatcattcatatatactagaaatgaaataatagaaacaattatttaacatttgcactctattctaggtttcgtaatttaaaaaatacaaaagttgaatcacgagagaatcaaaagtgacaatttcatttaatcaatagtttgatccttcttatccaaatgtagaatcatccatatatattagaaattaggaaacaaaccgcgttccgggtgcggttatattttgtttattgataattaagttataaaaatatattaaaattgatatttttttaatagtatgagtaaacattttagtaaaatttttcataattttttttaaaagaaaaataaataaacattgtggaaaaatttatcatacaatttcttatctaaaaaatagccaaaaaaaaaaaaattcaaacgttatagtaaaataaaaaaaaatagaggttggaaaatcctcacacaaaatagagatctaaaaaaaaaaaccaactgataaattatctatagaaaactcatcatatgatttcaaaattgttgtcattcaaaaccgatgttatcaccatatctcatttgtagtcaccactacattcgctattattatcgtat

SEQ ID NO: 70235 - DNA, 1855 bp, Cannabis sativa
ttttttgctgattttgaaaaataacattttcttttctaaataagggcccaaaaataattttttgcctatggcctactaaatttcagggccggccctgattttaagcaattgataatctctggcagtaataagaatgcacaggcacctgaatggtagcttgcttctagtgaatcctgatacttcaattaccctcttgatctcttgttcaaccataccacaaaaaaaaaaaaatgttgacttggtctcattcgggtatagtccagatgttcaagagaatagtttaagcccttgcaacatcctgttaatagatcaataatcaccattgcaaaataatgacatcatcggaaaaacataagtgattaagttccaattctttgcatcttttatgaaacttgaaattatccttcttcccaatcttcaccattatcttcgacatatattccatttcaagtacaaataaaagtagggacattgggcctccttggcaaaactctctttttgcctaaagaaaagccatacatatctccattaaaaaaagagacaatttcaaagtgtgaatacataccatgatcagttgattgattttttttttttgagaacttgtatgtctccatcacctttttaatgaagtcccattctatggtatatcatacgcttttcacaaatctagttttagtatgcaattaggtctgacattcttcttttcatagtgtctcactaaatctttgcactaccatgatattataggcaataaatcttctttgtatgaattcaccttgattttgcataatcaagtttgccaaaatatttctcaatcttccacaaatcattttagttgcgatcttataaataacactgcaacaagttataggttaaaaatcactaacaaatttaggggactttacctttggaactaaggtaattgtaattgattttcgtgagtataatttgccagaatgaaaggattagactatatataaatatatgtatgtataaattaatagatagatatttatatgataagtgacttttaataaatgaggttcaatgttaaataaaaaacataaggtgtgtttttcagtgacattctcgcctgggaaggaaaggcagtggtattttttcatttatcacgatgacaataattccagcatgcaaaatgatttgggattttggaaagaacatatagaagccattcctattattatttgcggaaaacaggttgcaacgaaaatcatgagaacatacctttctggtcatggtttgaaggctaagaaaactcattgggaaatggaggaatatcaactatgccaggtacctacgtaattttacagtgcaaaatttcattcttttacttttaaaattttggtggaaattaattaaagagttaatactattttgactttgtattttataaaaattatggaatgaacaatttttttcaaaaaaataaaaaatctttatcaaatgaaactttctgttttgttaactaataaattaagtcttgtattttttaaaatagtttcttgaattcattttttgataatttatttttaataaaattatcttaaagataatttttagcaagaaaatatacacaaaatgtatcaaatcttgtcataatacctttagattgggttatcattaagtttattttaacaacaaataaacctagtactattttttgatattttaaaaaatacaagattttatttatcatttaataaaataaataatctaatcaatatttattacaaaacacgatatctaaaatagtatttttttatcgaaacacctctttttttttttgttttcaatttcaaaagctaaaattttccttatagaaactataccaaac

SEQ ID NO: 70236 - DNA, 2014 bp, Cannabis sativa
  modified_base (1988)..(1989): a, c, t, g, unknown or other
ccacatgattaattttttaatgacctgtcattgccaagttagcaaagacttaacgagacttggacagacgacaccttaaaaatgtaaacggaactttgaagaatttttccactaaaatatgaggttggatggtttgcaaataaattaatagttagagaaattttgccgcaaattacttttttttattattattaattattttacatttcaaattaaaatagttatattgaagaattgattgttttatgttttggttatgctaatccgattcatatattttatttttggtaaagtttaccaaatgattgtggtcctttagaaatttatatggtctctaatctctttactattccactttatatattattactctatttatattatatatataaaggcacactcaaaattggtactattagttttaatatagtaaattacaatacattattagataagtcatgttgtattaattataagtggaagtgcacccatcaattcttaacctagaacatttattattttagtataatttgagtgtcacaatttttttagaattgctaaaaaatattattgatatctaatatttttttagtgtcatactactattagtataattaaatatcgtgtttcatgtaatttaaaaaaaaaaaattaaaaaatatcactaaccaattatgagacattacttataaaaagtgctgaacaccactgatacttaatagcaatacttttatttcttttacacctgcatattttatatacaaagaattgagtagaaaaataattatataggccccaaaattttattttgtactctaaatagtttaggactaattaaccaagacaaaatggtatatattagtttattgaccacgatgatgtgccatttttatttaaatcaattattagcgcataacatgggtcatgagttttgaaaatttaagttttatgacaatattaataaatattaaggattatttcacaaatacacaaaacaacaaaaaaaaatataaaaatatagttttatggaattttaaatatttttacgatttctttttacagaaaatacagtatttttatgttgtactcttgtttatttgttgttgattttttgttgttgttttgatattatttagatgttactttcatgtcacttttatgtaattttcttgttattttcatgttatttttataaaaaatcgtaaaaaatgtaaaaaaaaaattctttaaacgtaaaaatgtaatatttttttataaaaatagtgttttatgtaattatccctaaatattatacgagaaccaaattatagtaaagataatgaaaatttataaagatcgagtaatagtattaaccaaatggtcaattgaagttcaataataccaattttttgagctttcactattaattttcttactttttctaataaaaacatttgttttcttgttgtcttttttcttttctggcttttaataataataataataatccataattgttttgtgtttttttagagaaaaaacctcataaagaaagacttcaacaaaagggcggaaaataaaaaagatcattatagaataacaccagtcataattttatttatttattttttttttttttacagtttaaatgaaatagtcatacttgacttgtcaaccagaatattttagttatttacataaatattaaagtctttttttcatggagtattgttcaatcatttttattaaataaatagcaatttgttttgggttataaattttggtgataaaataaacaaaaatacacgaaataaatacaaaaggtggtgggtacaaccgtagacccaataacaattaagtgataaagtgtgaccaagtagtagtacaacccaacccactctttcttttcattttcagctaaattaaatttatatatttcattaaaaatcacttatgtcttaatattaattttaaagctaattagtaatttttctcccgaactttgacanntactaaatcatggcccctgaacttt

SEQ ID NO: 70237 - DNA, 2248 bp, Cannabis sativa
taaaaaaaaatggtatatattgtgtatagatatagatattgattgccaaatatatattgttattggtgtgctgggatattctggtcatcatgattcatatggctcctactttgttgctttataaagttgagttgcacatattgatttcacatgactgacaatgagacatgaactttttgatttatctatatttgtctatctacccataacttatttgcccatacatctataatgtcgataatgtatatgtgtatatattttacataatattatattctattagttttccatttttttttttttaataatttacaatactaaaaatacaattcaaaaccatcaactacacaagttaatattggttacttttaaattatattttgtaatatatatgctatcataaacatataaaatataatttagttataatttctaaacgtgttgaatacaataaagcatcctcacaataagtagtgctcaatgtttaatttcttttatctaattaaaaaaaaaaagaaatcatttttacagagttgaagatgtttggctgaatttttttaaaaaaatatagttattcaacaaaaaagataagataaaaaaatattgaatttaacttagatatttatgtataaatatttttttaaaatagtttaaaaagagccatgttttgtattaaactcaaattttttctttatcgatttattacattaaaatttgatgatttaagatttttaaaattaatatttataattaatttttatttatatacatatatgtaaatcgtatatatatatatcttgataagatacggattcttcatctctacactacacaccacaaagagaagatatatatataacacaggagtatattcagaggctgatgagattcgtatcttatccgagacaaatcgtatgttatatattcgagctatatatgcacgtgatactcacatgaactactacttcaatcttcaataatttaatattaattaatcactattaattataaatatatatatatacataaatatataaatgtttatgtataagctataggccacactgtacaggcatgatgaaatgtgttcatatactgataccacaggggccagatcccatcttatataataattgtaaataatatgtagtgatagtttcattttataaatagtaaattaagtagtaataattgtatatcattcatatttttgtaaattatataattattatatttatatatatataaatatttacaacaggtggtatgtgccaaggcatcagcaccattaactagttaattatactataagttcaaataaacaagttaatttctgatgtgagtacttaattagtattggcttaattaaaatatgtattgatatatagtagatagtgaaatcataaatatatgatatattaacggagcccatgcatgcatgcacattttgactacgtacctacaatagatttacagatttacagtatgcatattgatattggtgttaacaattagtttattataaatcatgcctaactatttttttatatatataactaattagtaattataataatgtccacacatagagtatttctaatagtgtacaattttacatggtgtgaaatttttacaccattttactgatctaatgaaatattagatatgcatcaaattagtgtaattctacactatttaattataatggtgttggattttgaatcaacatcaatttggtataaaactttttctttacattttccaacccttattttatttaatttttttttaaaaaaatcttacagtttagttctcaaattaaaattttatcacaaaaataataattaatttaaatattaacatagttttaaaatacaatgtataacaatataacaaaaataagtacaaatattaaataaaataaaaataatataatacaaaattataaaactaaataaaaataaacgttataagtaaaatagtaatttaatagtaaaatattaaattatttagtaaaatattaaatagtaattatttattatactaaattattttaagattttaaattcttactagcaagcatgatatacttatatcataaaattactattttggattattataatataaataatgtaaaatgtgagatcttttaagtaaaatatatttattttgtaaaatttttaatgtgatatttcactacaacagttttggctattaccggcggaggcatccgccggtattaata

SEQ ID NO: 70238 - DNA, 1964 bp, Cannabis sativa
tcttcaaaagaatggagggtttttctgagcatttgcacagaagctctcattgaaagcaccaaactgttaacgcagattttcgttaactaaatatgaggctaaccattaaaatctcacacagaataaaaagttataaaataaaaattacgaacacacaaggctttttacgtgattttgcagttaaaattctgcatagtcgacgagtcaatcttattcagatttctgattatctttcagggcctcttttgtatgagtttttcccctcctccttttttgatcttgtttgccactatttataattacatagtgggcagctaattacaaagttgactgtaatttgtctacaacgatcatcccctaaaatcacggggtttgattacatatcacgtagtttaaatacggttatgatttgaaaatcacatagctgtgattttcccgcttttactaggtcaaaatgattgtgtattaaacacatctttaattgttgtatctgcagatgtctcgacagaagcttggttccagtgatcttaatagcgaactggggccctttttccttccgaggtcgacaatgcacgtcttgtgacaatcgtggttcttatttataaagagtcgttcaaagctcatttgaatgttagcttctgattcgctagggttgtaagcctcgctgacgtaactagatgcaattataggaagccttcccatagcgagacgggcacctcgcttacttggtctcgagtcgatccgaatgttacacttagtttgtaaattatacactaaggacttttgcaattgatatgtgtcgctgtccttgatgcctcgctattcgcattcagcaacatatggttactcgataatatactaagtgccaatttgtctattgattcctcgcctaagaccttacagtcagcaagttacaaatatactctaatacttacgtaattgatgagttattccataaaaagcgattgcatcgatctatattctctttatcttgacacgtgtccaccactgagatgacagtcaaatttcaggtgtaacaaatatacccacttttatgtgtgagttacccaatataccctcactctctacttaaggctagcataatttatattaacttaagggatctaatggcgacatcatctataaaagttagtatatcttacagaatatgaaaatgaatgtaaaaattaaaataagtaaagtaaaggtagcatacaatgtaatttcctccaatttgttagttaactatggatttattgtactctatttattatacaaccctttgagattagtgaaataattcacattttcactcctatttttcctgtttaaaattttcgctaactgtcatcttttattaataaaagtaatttgcaatttttatattatttataataatataatatatagattaaatatgtataataaactaataatatgtaatatatattagttattatctttttgtaacatttgggagagttacttgttactatgagtaacctcaactattttcaccaacattaagagtgtaaaaggtgttacacatcttaatttgaaattcttaatgatatatgagttatggtatgtgtatgagttacatctctattggagttatggtgtacatgagtgtgtgcatgagttacatctctttattgagtccataacattcatggaggttatgacttatgaattcgaattttaaatggtgatatcttaaacactatataaagaggtctaaggtgatcatattagaggatcaagatttctatcaaaaaagtcccctctctctatgcactaagggaactctctagaaaatagctttgggaattatcaaaaaggtactttggtagaaaaccgtaaggcttgataattcccaaagctatttcctagagagttcccttagtgcatagaaataggggaaataagcttttggacaaatgtaataccttgttcaagtcatg

SEQ ID NO: 70239 - DNA, 849 bp, Cannabis sativa
  modified_base (732)..(735): a, c, t, g, unknown or other
tcttcttcttcttcttcttcttcttcttcttcttcttcttcttctctgatactccttagcactctcattatcaccaaccaccacaccaccacctcttcaccaaaattttgtttctcatttaccctcttttttacgaaccatagcctcatttttttcacaaccaaacactaccaaccaaagggatagagaaaatgtacagagaaaaaagcttcagcattaaatcaatttacagaaaaaagaataaagaatgataagcaaagaaaaaataatctaatgaagctccatcatcggtcgaaccccctcgaagctccaccgtcgtccaaacctcctcgaatgccttctgactgagaacccccacaccaacgcactgcctatgtcaaaccccgtcactagagcatcgcttccgttgaactccccaactcgcgaggcccttctcgtcaaagctcctcttcgtcaaaccatctaatggtggtagtctatgtgttggaataacttttaccaggacctacatttactaacaagtatgttcttaacatcataaatatgaacttctaaaacgataaaaattaaacacatataaagtatgagaaatcttacattggttgcacaagaattaaatgactcattcggctcagatctttaaccttgtatcctttctatcgcaaagtatcaccaagatcttagcctgaaactccttcaattgtttggatttttcacagtcttacacactannnntgaggactaacttgctatgggtggacatgtgctcaatcactaaagcttgaaattattttaatggtgaagaagactataggatttcgaattagaagaagagaaaagaagaagaag

SEQ ID NO: 70240 - DNA, 1130 bp, Cannabis sativa
aaaatgttatcccattttaccaatattccctattttaagtttagggaaaaaattattccctaatgtaagcatagaaattcaaatttccctaaacaagatcacaaagaagaattactgccagacttaaatgatggaaagttagcagagctgtcattgatattggagaagttgtttaaacatcaccagagtttttaattattattgacttcagaaaagtcagcagatagtgtctttacattgctggtgttgttatcgacttcagaagtcatcgaaatgtcgttagagttgtcattgttatagggaaagagaaaaatcgttttgagctttgattatcgatccagataaacatataggacagtttgctctgaaattgaggggcaatttttgtgcccaaaatattttggctcacaaaaatttccttataaagaaaggtttacaaaagtccaaaattaaaatattctgatccatttaaaaatggctaaaagtatctgttatggactcgagaatgagctcgtagtaaggtgaattgagctttactgatgtcatcaatctgcacgaacgagagtaaaactctgatgacatcatcaatctgcatgagtactcttttttctttaaatgaatttgagcagaaaattcacttatcacacactaagtgggaactgcctaaccaccaaatcagttaacgattatagttaattttctccaatactccatactataaataaggaaagatgattaacaaaaatggttgattcccaaaaaaatatttatgaaatagaccaaagtatgtgacggtacactattttgacaacttgaatttgagtattattcttcttcataatataaattattgagaatgaaactatcaatgaaagttgacagaaaacattgtttaaatatccttaagaataattagtcatttccaccaacttttgcatcatgcctttgttcttcaagaaattcctaaatgcgaaaattattttcttccttagattaggataaaattgttataaaataatatagaatagagaaagaaatagtaaaagaaataagataaccagaagaagaaaatgagagagtgaaactttttaagtacattatttcaatatggtaatcttttatttatacat

SEQ ID NO: 70241 - DNA, 2422 bp, Cannabis sativa
ctattaatttgagatttaaccgtcacgtatctataaaaatttcagaaatataagttaagtactattaccgtaaataattaaatttaggtatatatttatctacaagcgagaattaaacttatatatttatagtgtaaattactctaatttataatatcgaaaataatatttaaattatctttaattttttacacgcttattaaataaaaaagtcacgcgtggaatatgctgtttaaatcttattttcggtgtgtaaattttttgatataaaaagaatgtataaactatgaatggtgtattgtagaattttcttaaattatattaacaccttatattatgtcttattatttatttgttaccgttactattcaaatcaatacgttcacatttctagtgccacaccataataacacgcgtcaattttattgttttcccaagttttactttttacgtcattttattataaattaaaaataaaataaaataaaagttgtagcttagtaatagagtaataatagtaaaaaaaataaaataaaaaagaaaagaagaaattaataggataattaattaagaaagtttccaaaagaaataaaggaaggaagtttgagaaagtttcttttgggaatgaaatgaaatggaatagttgaagagttagaatgaaataataaaaagggataataagtaccaatattcaacattcaatgaaaattccaaaccaagccccccctacctatggatatatttatataaatataaaaaataaattaatgtaaaaaaatagtatattaactatacacatttttaatgtgattatagtagttttgatagtagtgttggattagactttcttattcattatagagtctgaatatttaattttgatctcgctatattcaaaatcttctactaattctgtaatgaattaaacgttttattagttgatattgttactttgctttctagtcttcttaaaacactcataatttttatttattgtatataatcgataaaattgctcataaattaattgtggtgaactaacttgaatagattatttttttatcatttttttattgatgtattaaattctactgttattaataaatagtttatttttttcaaaaaaaaaaaaaatatttctaatagaaaaaatatttaacaatgttgttccttcaactatataaatatatatacatagtatttattataattttatcctcaaaatttttatttgaacatttattattaagtctttaatttataattttctagttaaattatgtcttctaaaaaaattgtagcacgctaagccttttatgataacaaatttcaaattattaaatggtctctaaattatatattccaccaaatcaaaaattgacttatatgtacataaaaataaaattagtgtaaattattttcatcctcaaataatgtaaaaataactaatatgtgagagagtgtgtttaactataaatagattaattatcaaataattttgagttaggagctagataaaaagatttttgtgtttatatatattttctttaatccatttaataaaatagattgactttttttgcagaaaatgaccctaattgctaagaaattaaaagttcataaaattagttatttgtcaaaaaaattaaaactacaagaaccaaacaagcttaaagtcaaatataaataaaaaatatgaaagccattcttctttttaacttcttattattaatttaatttgaaatgttgttaatttttcacactgattttcaacacagggtagatattatatagatggcatgagaagacatgtacacacccacataatcacaaaatggacaaattaacccattaaataaataaagattaagaataaatgcttttgtttataaataaaataaaaaaatagggttgctttatatgactcaccttaaaaattgtaaccaatatttatgtataattttcaattacagttttgttatcaatttgataagatttagtatacattaatttttaattataatattgttattagttattttttgaatatttaatttattaatgatattttatttaataaaactaataagtcttgattacaataagctcaatttttaacatttttttaatctataattttacataaataaatagatgtaaaaaaatataatcagtcttgatgtaattagaatagattattattaagttttattaaataaaaaatcagttcaagatatcttgtatcattttagaaagagcattgctattaagcaagtgacgccttacaagtagttagtgatacacttcataagaagtcattatattaaattatatatgacacccgctctttcactaggaatattactccttccttagagggtactagacactattaatatttttttattatttttcttttaaa

SEQ ID NO: 70242 - DNA, 3913 bp, Cannabis sativa
  modified_base (3367)..(3376): a, c, t, g, unknown or other
ttgttgttgttgctgctgctgctgttgttgttgttgtgtataacaaatattatgtgtatttaatttagatttttatgtgtaaaaaaatagatttttttatatatataaagacataaatttattaattcaaatagtaataataaaaggtaagtatgaaacagttatattttctttttgaatcaaagatgattttatttaaaaacttttagcaattacaatagtctttacatcgaatggagcatcatgctcactgaaagtacaatctgacttcaaacaagaccctcgcgcaacacagtgagcagccttgttagcaaatcgtttaacataaattttaaaaacattatttaagaatgataacaatccttgacaatcacgaacaagcaatccaaactgggatggcattgcaattgaacttttaatagcttgaatagccatcaaggaatcagtttcaagcaccacattcagccattgctttctcttaatccagcttaaggcttctttgataccaactatctctgctatttcaggtcgtaccacaccaacacgacttcccgaaatagcttcgataagtttaccatttgaatcttgggccacacaaccaaaaccaaacttgttattcgattgaaagatagcgccatcaacgttgaccttaactgtatgtgtcattggtttcttccaatgcccattaacattgttaatatcatttactaacaatgcccccattttttgtgattgagcactactccattggttaagagttattttagctgaccgcaccacttctaatgtagagcaagttttattattccacacaacatcattcctcacggcccatattttccagcaaaccattgcagcttctcggatgacatcaatcggctgtaaatcaagcaaactaaagaaccatgatctaaattcattattctgtgttgcagcagtactaacagatgataagttccagcaagctttactaaatctacatccaagaagaatatgaaatattgtttcctcacctgagttgcacaaagggcatagagtctcgacattcacatgcttcgtgtttaattgaatctttgttggaagacacccagatatagcacgccaaaggaaatgctgcaccttaggaggaatatcaatctgccacaaccgtttataaccatctctgtcctgttcaatacgaaggttgctgttattctgctgcaatgctttgtatgcagacttaacagtataaaaacctgatgaagatttattccaataccatgaatccatgtccacagaatcgctcagttgtacagaaagaataagatctttatccctatcattaaacaggtcattcagcacttcaacatcccattgtttctgccccaccgaaaacaaacttgacaccagatgcccctccaacgcaaggtggctgaactaacataggggttctgctcatcaggaaaccatggatcggccagaatattgactaaattccctccaccaatagacctcctagcaccagaccgaaccaaatctttggcttcaaataaactcctccaaataaagcttggattttggcccaaagtagcagtaagaaaactaccattagggaaataccttgccttgtaaatcctacttaccaaagaattttcattcgttaagagtcgccatccttgtttaccaacgaaagccaagttgtaatcccaaagatctcgaaatccaatacccccttcacttttatgtctgcaaagtcgcttccaactcatccaactcacacctttagatgagttcgattgagacttccaccaaaatttagacatcattccttcaaggcttgaacaaatttcctttgtaaggagaaaaatgctcatagcataacttggaagcgcttgggcaaccgactttatcaaaatttcttttcctgctttagaccagaagcgactttcccaaattttttttttctgcattttatccttgaggaagccaagaatagcattcttgttccttcccattgtacatggaaaccccaaataaaagttgttctccaaagctttctccattcccaacacctcacacatcctatgccgagtatcatcagtagtattgttgctaaaaaaaattgatgacttcacattgttaacctattgacctgacgctctttgatacacctgtaagagttgtaacactcttgcagcttcattctcatttgccttacagtacacataactatcgtcagcaaatagcatgtgtgaaacacgaggggcacctcttgtaacttgacatcccgtcaaccattttttactctcataatgccgcaacaaagatgaaagtccagcacaaactagaaaaagatatggggagagcggatctccctgccttattcctctaccaggatgaataggcctcataaattttcccccataggtcacattataagtaactgtagtcacacaactcatgatgagagaaacaaagtgactactaaaccccatacggatcagcataacctctaagaacaaccaaccaactcgatcataagttttactcatgtcgagtttgagagccataaatccttcctttcccatccttttcctcttcaaataatgcataatctcataagagaccatgatgttatcagatatcaactgaccagacataaaagcactctgattattggatataacatccggcaaagcacttttcaatttatttgcaatgacttttgaaataactttataaagaacattgcacagagaaataggacgaaggtcactcatatgctcaggcgactttttctttggaatcaagacaatattagtttcattaagactagtagggaacgatccagatatgaagaaatttcttaccaaactaacaatgtcattgcccacaatgtgccagaatttttggtagaaaccgagggtcatgccatcgggtcctggtgacttttctggatgcatctggaataaagcatgttttatctcctcaactgttacaaattcgatcaattttccattttgctcctcagaaatccgagaatggacacattcaagaacatctccataatcaacattttcattactaaaatgctgcttgaagtaattcgggaatgattcaattatatttttaaaaatatataaaaattaattctgactcgaatttaaataaccttgtataaaaataactaacctatattttccttttgaaaaagttaattattttaaacaattatattatacaagatatatatggaacatttcttaatgggtattacccgttgatggttactaaacaatttaactataaatattagttttaaaaatattaaactattaaattttgatccaacgacgaataataaaaagaaaaatttgaatttctatgnnnnnnnnnnctacttaattaaaaaaaatataaaaaaatattactttttacactatatctaaactatatttatctacaaaatacttaagtcaaattcaaattttttttttgccgaaaaacttttttttttattttttttttcagctgatggaacaatctcaactcacataatataaaaatgagagattttttgaattagatagaaaaactaagcataaaacctcaaattttcataatactacttatgaatgagtaatacccattaaaaatgcacccatatataaacaattcacctccatttctaaacaattcataaccagatttaaaaaaaattatcatcaaatatttgttttatatatgaagaaatctaaatatttgttttatatatgatgaaatcttttctaaaagattttctttcttttaaaaataatattttccctagacttaccaaataaagaataaatactataaataaaacatttattgtgataaggttgaatattttctctgattcaattatggtattttgctttttaacactaataat

SEQ ID NO: 70243 - DNA, 919 bp, Cannabis sativa
gtaaaaattaatagaactataaatcaattataaaaataacaattttacgataactataaaatataaaaaaaatatattttttttactgaaaaattatttatgtaaataaaaaaatttaaagattaaaaaatttattatgatataattttgtaattttattttaatatttagtcaccctaggtcaaagtctatttgcatgatgactcatttcatcatcgatgacgtttttccgcatcttatgcctatttttttttattatattaataacaaaaatcatttcatttattattattttttttaagatcatttcatttatttttatatatgttgtgtttcaatgtgttaaaatattcttgcaacattctaggatgccatgaacatgaaccttcccttattttaagaacccgttcactttccataaaactattgctaaaggataatgcaaattatttgttttagataagtattataatcacaaattagaatttaatgaaaaaaaaaaacaaggaaaaaggaaaaaaaagagaaagaatctatttgagttcacacccgaactcgaaggcccaccttccatttccacgtaaaattttggaacattaatattacattaacacaaatgttcaaatttagacaagatggttgacgtggccattgcctaatcagaatgatgaacggtgtagaataagacacgtggacaattcctttttcgttgatctctccagtcggaccaattggcgaaagcacagaggcaatataaatagctgaccaatcacagactttcctcctcatcgcatattctcatcacagaccgaagatattgttattttgatctcgatttgtctctaatggcggaaaagagcttcaagtatgtaatcgtcggtggtggagtctcggctgtgagtttctttctattctaagc

SEQ ID NO: 70244 - DNA, 1089 bp, Cannabis sativa
aataaaatattttcagaaagaaaataaaattattttcatggaaaaatttcgtaaattacatacattcatcacataatcacataaaccatcatggacatcgactgaggctgctcaaaattacattggcaagacattgcctgacatcgaattgaagctctaggagctagaggctgaggagttggagtgcttgacatttagtgccctcatggacatctcattttctagttgtaaattttattttattcaaaatgatgagttgctaggggttggctagcctatagaatcttgtggctggctagagctgcaccattaagaggttggactcccattgccacctaggttggttccacttctaacttgatttttcttttgatttcaggctatgataaaggtgagccttactcatgcaaaggccaatggctctgctggtgttcactagaagaagttggaggccaaggaggctgagcttaaggcagagaagaatgtgcgtgtctagatttaggctaacctatcgaatcacctgagtgagtcctagaacctaaatgatggcctaccgatttcctggtctctgaaaccaagaggggactaagtttccttctgacacttccaagttggagaaggagctcgaggatgagcatctaaagtttaagaaggaggtttatttgggattatcctctaaggtcctgtacgaggtttatctacacaaccctaaggttaatcttagctacatagggtctcccttttgcaggaaatcacttcatcgggggagggagctctatgagagtaggctattagcagatcaggctggccaggggataaaccaggtggtcggccaggttgagggagaattatttggccaatttgatgaggctatgtcctactagcccatggaggtagtggccgaccaggttgttaagtcaatggtcggaccaaccttttggagaccaggtcgatactccagtccatggtcctaataattcgatcccatctacacctatagatgattagacacttttcgttagttattcacgctattattttacattaatataatgttcttgtatggcctctaggccttttaattttgaa

SEQ ID NO: 70245 - DNA, 1765 bp, Cannabis sativa
tagaatcggccctggattcaaatcatgtattgcttctaatccctttgcatgtgtacaataatagttggtggtatattcatgtctctattgttagagagtccacgactagaaaaatagtatcatatgtatgaattattacttcatacattttaccacacacacaacatattccacttttccaaccactcacttctaaattctattatagtatcagagtcaaataaactctaacgagtatctgatctaaatttagtaacctgtctgaaaagataagccaaaagagtgactagtaatttggaaatagtgagccaaaaagagtcgttgtgagccaaaagtaccgacaatccaaaaatacgagttaaaagagctgcttctaattctgtaagccagaagctccatttatgatcgagttatcgaaaataggtgagcaaaaaataggcactatcttgaaaggatgttaaaaaatctcacattggtaatgtatgaaaagataataccttatataaagtacatgggctacttctattattgctaattaattttaatatggagcctcatacgtcttaccatataaatatcctattctactttctcaacaatacacccttcttaatttcgatatctttttattgtgaatatctgaatatgttagatattgatcttctctctaatgttgtactaaggatgtgttattagtgtagagtttgagaatgtggaagagaaatgatactttcttttattgattcaagaaaagaaatacaacagtttatatacaagctaagccaactacaatgcacaactaatagacttagttactagagaaataacaaccagctaactaaactgaaccattaacaaaaatagttaggaggctgaacaactcagcttggtagctatatactaataggcccctaaacttattgtggtggagaaaactataccaaaaaagaaaatttagagttgaagataggctttgtgagtgagtcggcaagtttatgatcggaaggaacatgatggataagaatctttttgcataaaactttatctcatacaaagtaaagatcaatctctgtgttttgttcatgcgtgaagaacaaaattggttgtgaggagtgtggtgttaatttttacggtccatatcagagttgaaagcgaaagcagtggttttatatgaagctcagtctcgagcattttaatccactgagatgacttgtgatgtgtagcgtggacgagaaaagaagcctgtgaggaaagggcaaactaaagttagtaaagagggcaaaataaggaaaagtagacacgaggaaatcagaagattaacctaatgcaaaagctcacaactttttttggcgaagccttcagtactgcctcggatagcaagatcccagtcgctggatccaagcgtcaagagattgcgccaattattgctagtatgctgcgagctcagttgtgacccctcagttccaactttgggggtagaggacaagaaggctcgaggagaaccacctcacttggtgcaccgacctagtgggtttttccttggcattccctgcagcaaagatctcaatccctacagcagagacctcaatccctgcagcagagacctcattccttgcatcgggagacttagcagcctcgatagtaagctggctcaaggattttttcttgttggccttggtccttgtccttttgggttccttaatggggtctgaggcctcatcagcttaggttaccctcttcttggatctcttgtcggcttggggag

SEQ ID NO: 70246 - DNA, 2027 bp, Cannabis sativa
  modified_base (1739)..(1747): a, c, t, g, unknown or other
  modified_base (1957)..(1970): a, c, t, g, unknown or other
aaaagtttgataggaagcaagacactatcaactcgataaatagcaagttggttatcggaataaatggttccagatatggttgtgttgacaactccagtagatatgttgacagaagatccgtcagtactagtaatgtttaatgggtagtcgcgagtgttagtggcttgagtgtgaacagggtttgttagggtttggaaattctggagggatatgaaagttgggatgatgtggaactgaaccaattgtgttttttgttggggagtgagagtgttgagtgttccagtcttaagagctgagaatcctgcattggttggagccaaaatggtgacggtattggaagagttgagatcattttcgacgggactgatgacgtcagtgcttgttagtaggcgaatgaagatgctgaaaccgccggctttctctaggatttctgttatgttggtgggttgtccttttctcctggatttcgctgctggtggggcttccactaatggctgatccggagattgagctgaggaatcagatgaaggatgatgattcttattaggtgttgtcgatggtgattgggcaggtgatgacgattgagctaatgttaaagtattttcgcaatcatggaagaggaagaggaaaacgattgcgcaagaataggtgaacaaaatttgatttttcgccatggttatttttttttaattatttatttgtaagtatttgagtggtgtagctcacttcttctctagaaagaactttattatgaaataactatataagtttttcttgaatgtttatttaattaagatatatgagagatagggggtttatatattacatgtgttgggagagaaataaagtttaattattgcaaaattattgatactatgaataaattaaatgaaagggtgtaatatcacattatttagttatatgagagattgtgtctttgtgaattctagctaataaaattaagctctaataaaagtgggacaggttagagaggggctgctactatcatgctagttaggtgtactttagtttgcttgtgctaaacaaagataaacaatcagagatcttaacaactttaaattactaattatagttagtataatcaagctttcactttcatatagattacccttatttgtatttggcccactttcatagagaacttcactggttaattattatatcatagaaagttatactgaaatccaactatgttaaaataagtcctttaataaaagggaaaaaaaaaaactgccctatagtctcctatatgtgttcgtatgcatgcacattatattataaaaaaaaagattgatattggatattagtggtgcacaataacttctataggtggtgcctacacgattgattattgtttattttttctcttaagtttatatggaacccgatacttaattgtatactgatcatagcgatgtaacactgaagatgatactaagtaccagtaatatcttttaacaattttcttataaaaacgataagaaatattaatgctatttttttaattttttttaaccaagtggcaagggaatgttgagaaaaaattataaaatagattgaaatttttttacaaaaatatatgttaatacagaataaagtttatttttacaggctatttgaactttttaatttacaaaaatataataaattgtataaattttttattgtattataatttgtttatatatatatagttgatttattattattattattannnnnnnnnttattattattattattgttgttaattatttttagttgtttttatagaaaattgtgtttttgtaaataaaattttatacagtaaaaatacaatatatattaatttatgaaaagaccccaatattctctaatccatccttgtgggacgatgatctcttgtttatcacaacttgttaaaatgatacatcttgtatatatatatatataaatnnnnnnnnnnnnnntagtatattgttacgtgcgatgcacgtatgctatgttttatattaagtattatatta

SEQ ID NO: 70247 - DNA, 770 bp, Cannabis sativa
  modified_base (482)..(488): a, c, t, g, unknown or other
gtaaagattttaaggaatgctttccataagctctctcaacttaattagaagatgtcagtaatagggaatgttcaatattaaagtatgtttattattatccaataccctaaataaaataattgatcttagataattataaatattaattgtatttatcattatggataatagaatgctgattgtgtttaaatttaatactatatatatttagaaggagctttcacttagaaagtgtgaacacatattttagtacgactatcaataagtactttgatttaaatagaatattaggaggaataaattaaagattgtcaactgtaacatgaaaattaattttattgaaagacttggatatattattattatgtcctactttttcaaattaccactttaattttggttagtcttttataactaataacaaattaactacaactatttttaaataataactccgcacccattattattattattattannnnnnntattattattattattattcactactataaagttggggtttagtggcattctttagtgacccgttcaaaagtgcgggtcactaaagggttaagggtgagttttagtgatccacacaaaaagataactctcataatttttattatttttttaacaaaaaatacttacctatagtgacgcgtcaagcgtgactaggtaagtgtgtccttacccacttaacacgtcactatatcataatcctaaattgaaaaataaactccataaataatatacttttgtttttt

SEQ ID NO: 70248 - DNA, 2299 bp, Cannabis sativa
acaagtatagattttttttctttttatatttttttatgtactgtggcatggggagttataacaagagtattctatttcatggcttcagcctgggaaaattctcactagactcggcttcattatagtaaaattgtttgacagtaacactccgccggatttgtgctcggccaccatacttagctttaggctatatttggaagttgaattttagtaaggaaagaaaaatatgaggtaaatgtaggaaaggaagtatgaagatcaaaaaaataatcaatttttatgtatgatatggaaaattttggtgaattagtatttttcatacaatttttcttttcatgtcaattttgaggatttattgttgagcaggctcttacttaaaaataaaagaagaacgatattaccgaatgaaatttttggattaagtcccggactagattgttctttttaagacattaacgacactgcccaggaatgtgcaagcagtcggaaattgtcggtcgtccttaagataaaatagtctagtcgaaataccactgtataagagctttactgtataatagagaactgtcaaaaaatcacaccaaaaaactactattcggaatacttatataatataatcttaaatataaattgtaaaggtttttatttttgtgtgtgagaaaagataattttttttcccgttggttctgatggcattatataaggaaagcacagaagatagtaatgggaagaaagacgttgattatgggaatgttaagtgagattgtgggaacaatattgaaaataaagagaaaataattttaaaaaatttcaagtggagaattgtgggaacatttgtctttttaccaattaatttcaacacgtttaaaaattattttaattaattgaatgaaaataataatttaataaataaattttctcaaaaaatagagtgacacctcaccgccagcttggcacggtcggacgacggtgtgcacatgtgtggtggttcggtgtgtgagtccttacccatgtgcacaaaactgggtacccttggggccgcaacccatgtgccaaagttgcacattatatacacttctaatgaagtgttcctattggactcaatgcacttacatacttcacttctcacacgataattttgaaaaatttcaactaaagttccaacaattctccacttgaaattttttaaaaatattttctcgagcagtattctaaacaataagattgagcatagataaatgtatctttcgatttgaacatttgccttgtcaatacaacttagaatatactagagtgactcgtagtcttgaactctatctctaatgatgtagcatgcacaacctttctcgggtgtagtccaaaagcctgtgttttaaatgccatgcacgtctatcccagtataatgaatgctctaaaaatttacccaaaattttataggaagcggcccccactcccacattcacgtaggtgagtctatcaagagtactcctgtagctcggtactccactccacataaagtatagatttcattaagagtttctattatctcaaccttctatcgcttcaagaattcatacttcacatttcttagaacaatatcatgatctcattcttatcacatcataacttgttattacccattgaacttattttttggaatctccagtatataggtcaggttgccattgtaagtgattcatcaatctaagggcaacaagcccattcctttcaatgttttaaagactttctctctagctaaaattgttgtcaaaggatcagccaagttatcatcagtgcgtacatgatccactctaacaactcctgttgagataaactctctaaaagtattgtgcttacgacatctttgttgcatcttaccttgtaataacgtttcaaaactttttcaatagccactgtactatcgcaatggatcaacacaactggtattggtctttcccataaagggatctcatctagcaggcttcctaacaaacttgcttcttcactagcggttgctagtgctatcatttcagatttcatggtgtactgtgccaaaatagtttgcttctaagaaacagctccaccagttatactaaaaatataaccactagttgccttggagtcatttgataaggtgttccagtcagcatcactatacctttcaaggacaacttgacacttctgatgatgtaatccaaggttcagggttcttttgaggtacctcatgaacctctcaatagcatgtcaatgctctacactaggtctactagtaaacctgcataataatcccatgcatagg

SEQ ID NO: 70249 - DNA, 4402 bp, Cannabis sativa
  modified_base (229)..(246): a, c, t, g, unknown or other
  modified_base (3907)..(3907): a, c, t, g, unknown or other
cttacaatagtatctctgaatatagaattcttagataatagtatagtcttagctcaactgcttttcgaccgatctcttgcccagtgaatatacatcactaattatagggctagtaaccttggagaggaagagtttcccctctcattgaggctgaatacaaggatcatgggattgaggctgaatacaaggatcgtgggattgaggctgaatacaaggatcgtgggattgnnnnnnnnnnnnnnnnnngtgggatcgtgtgtatgccatatccacgtaaattgatccctaagttatagggattgtgctgatgactcacgatgcgaaagctgaattcgctaagtgttggttactctgcgcggattacttaatactttgctctgagcgtgccagcgatatgtcctgctcagactatgcttcccgggcaaatattccaagtgggttccacgtgtcaccatacatgtgatgccacgtcacagtgcaaaatttgggataacatgaagaaagaaactagatggtgatttcgctccggatcgtcaagatagcttcctctcctctttcattcacttttcgggactgatttctgatcttttcatcatctgagtcgagtcccttatatagaattagggttgtgcctctaattggaaaaatatcgaaattaggtcaaaaatcctgtgtttcgtacctggtcgtgactaccttaatggctagtcgcgaccataggcaaaaatggaaaaacacgcattctgccaatccacccaagtcaggaccatagtcgtaactagagaaaagggttgcgactagggcttttcatggtcgcgactactaaggcgtatctggcagcttcattagatttttcaccaaattgtcccgtctttttgccaattgactgaatttgaactaaaatgcattgggaacctgaaacaaggaaaatcaagcgtaaaaccgttccaaaaagactacaataacttagaaaattcttattaatgtgacccgaaacttaggctaaaattagcctaataataagtcatcccacaactcgccccaactgttgaaaggttagtcgtgatccctacttgataagcaataagttgaatattgtcattcaagttcctaacctttgcagtggcagtgctgaagcgactcaggtaagccttaatcgactcgcctggttgttgctctatattagttagggatgatgcttctggtcgcctatctctggcaacttgaagttgtttcttaaaaaatttagaccgttgttcccaagaagttattgaatggtgagtgaatttgtcaaaccagctactcgctaccccagtcaatgaggttagaaataaaatgcaccatagattattcgagacgttgctggcttgcattatggtattgaaattattcagatgagcaactaggttcgaagtcccatcatactgcgagacgtgtggacttttgaatctctgagaaaattcaaaattcataatatcaggatggaaagtttcggtctcctcatccaagtcatagccaagtaatttcccatattccccatcttggtatttcctaaacttatcctccaactcaatgatttgcaattggatgggatccacttgttgttggttagcatttagttgatggtgtaagttaggtggattttgatttaagcgctcgcaaagattgggttgtcttctattcaaatgctcacgaagatcaggttgtcttcgttcataattgctcatggatcttgtatctgagtaactctcagattgataacatcttgtattactcatgctttcttgattagcataacgtcgaggtctgcttccttctcacgttttccttcctgatcgactttgtccttgagacctcaagaatcccgagctagaacttacctcgtcttttatgggccttctccttcagaaaaggttagatacacgtcctctgtttaggtatgtatatgcgccttccctctcgaatcgagaaggatgttgggggttcctcggtggtagcccacttgtcctaggttgagtctcaaggtttctctcgttattacgagggatttcctgttccctagtttggggctgcattgtatcctcattcctgcgagaaggctcttgtatgtcattacgttcattcccctgattcataattcctggggatcattggggaacctctcgatgtggttcttggttattttgatgtttatccactagaacatccctagtacccccaggttgttcctcctagatgttttggggatttccttgatttgcttcctgcctcctggttcttgaaccccgaggtctacctcatggccttcttaccccactatcaagttgattatgtgcattagttacttgagtcacccttgccgtcgcagcctctctttccaactcagcattgtgttggttagattcggctaagcgttgccggagctggcaattttccaattcaactaatgggacatacccagttggatcataggcatcctcacttctaggtacatatcctgtagtagtattggtttcttcgttccttccttctgggttttgattatttccaccatagtttttttctttgaacgtgttattccagaagtatggggtctttgagaacccattggttctttcccagagcaatgggtagtttcttcaggacgacttccatcatattgtctgttatcagccatggatagattttcgtctgtaaggagggatttttttaagttttatcacgtaggctctcaatgaaagtaccaaactattaacgcagattttcgttaaccaataaaaagcctttacgtacttaatataacatagaaatattaagaaataaataaagtataattaacaccaaatatttttacgtagttttgcagttaaatcagcatactctacgagtctatcttattaaagatattttttgaagataagatacaatatacaattgattatgtctattttttccctagaattctccattcctttttttgtggtatctgcccctgtttatacggatataggttggcagttatttacatttaaattcaaattataactgtttaatgaagcatgggaattgatcacgtttcatttaaattgtatgttggataatattaaataaccgcttaactgcatgttattcttatctttaaagatggtcaatgctgatttggacaatagcatctcgcttaactcgtcgatgattaatgttgatttagacaatcatatcttgcatatttccatgttgttatctttagctattataatgtagaaaatacgctaagtgttaacaaatgaatcgcctcgtcaagtttcttatgaatagcgagggggatgtctcgctatatgtaacccgaggtcaccttgggtaacttcatttattccattgaataaatgaattatttctttgggcctgtgtgctccgagcctggtatatgtttaatcgatataggttttaatagttttctatccttgtctcgcttaagtctacatagtcatcgagttgtaaatattttctattaatcctttatataacgaattattctttttcttcgcattaaatgatataacttaattataccaggtggtttgtatttcactatctaacgcgtgtcatcctctgaagtgtagctgaatttcgagtataacagacatattaatcaatactttaaatattattattttgtaaatacaggtcggtttgacctatttatacaccgagggctcgtttggtttgccgtattgtattgtattgtaatgtattgggttgtattgtattagattggattgtataattttaatacaatactatgtttggcattgaattaaattagtgtgttgtgttaaattatacaatgtttggctcacattgcattgtattgtattaattaaaattttgcaaaaattcaaaaaaaaanaaaaaaaaaatcaaataaaaactgaaaaaaaaatgaaaaacaaaaattaaagacactaatttttttttttaaaaaaaaaggaaattaaaaattttaaaatatttaaaaaaaaaactaaaaaaaataaattaactaaaaacactaattttttaaaaaataaaaaccatatcatatgtgattctaacccgaataataatgtcaattctaaatatattgtcataaaaaagtaaccaaattgtttaaaaaaaataaagtttacataactaaaatagactttgtagcactgtcaaagttttaactattaaacaaagttcaactgactaaatcagaattcaaccgaccaaataaaagttcaacaaccaaaaccagagttcaaccgacaatatcaatcctcacacattaatactcacctaaccaaatcaacgacttgatctaacttctctaagtactcttgtcacaaaagcctctcgaatttctccatctattgacttgaag

SEQ ID NO: 70250 - DNA, 2417 bp, Cannabis sativa
tatttaggatgttaattcaacataattgttagtaaatctagatcttggtaaaatatttacaacaaaaatattggcctcgctaagggaatattaattaagattgaaggttcaagccaagcttcttcttgaaaatagtgacgccgaccctcaattatctcttgaagaattacctacaacaactagaagtttcatcttgactagacttaatgatgtgatcactaattctctcatcatttattttaagaatggtttgaggtgtttgatttttgagcttaaattttatggcagaaaattgaggacaaactgattctaaggattatggaactgtgattttttaggtaaattgggacatggtcaggtatggtaatgtctcaatttgtagaaaaatagggcacaaataaaacctgaatcctttgaattgtataaccttaaattttcctaacactagatttattcaggcaaacaaaatcaaaacacccgaatagtaaagtaatacagacaaataacacactaagaaaaagaaattgtgagcacacaaagaaaaagaaagtgtgtcacttactatcttgatgataatttctgggcagagaagaactttgcgatttaaatttttaaggttgagaggttgggtcttgatgatctctagagcaagaaatttgatcagatgaaatacacaagaaaaatgtaagggataatgagggcatgaaaatttgagaggaaaatggttgagattctggcgaaaactcgaaagtttgaaagatgaaaatggtttaaaagatgcacaacttcaaatttatacccaaaaggttctcactgttagatcaagagagatgtaatctaacagataggaactttacaagaaaggaacagtcagagcataaaatgaccaatgacatgcctcgaagttttgaactacgaaattctaagcatacaatttttcaacggcatagatatgactatacccccagaaacatttaaaatgtaccttttagggggtaaatgttatacatgaaattttgttattaatcagaagctgacatgtgtcctacaaaaggaatatgaatcagctcaaagaaaatagtaattaaattgcattattaaaagtgattaaaataactcgttccaataaattaaaattgatagaaatattcaaactcactgactacgtgagcatatgcaagaaaaaaataaataactattaatagatataattgatgaggcaatatgtctgccttaggagagacggagtaaataataaaaacgtgcaagatgagacatcaacaatcttgcagcatattgaagcacatacgtaggaataaaagcttgcaactcattgatccacatacatgagtagggtgaaaataactacactcaaccatctcgctttctacgcgacttagtagtcatctcactaatgtcattgtaacatgagaatgctgcgagaagaagcatgtctacacttagcattttttcctctaaaaacagataagaaggataactcatactcaacgagaaacaaccttcttagttagcataactgtttaaaaagacaaggagaagttgggtagttattcgatattattccatgtgcaaataaatgaaatgtgggaaatgtgcacgtttcatcagccgttgtaagtgaatcgatcccaataaaaataactgtcaatctatacacctataaatagggcagaatccatgaaaaaagggacaacaaagtagagagagaattttattatttatcattattgggaattatactctgaattcaaataaatatccctaataatacgaattcgtggagtatgtatatttcaactacaaaatcatgtaaaatatctagttttcattattattattaaattctatagtaaatttattacgtaaagggctatatatttggttaaccaaaatctacgttaacacttgacaaaccaaaactgtttaagcgggaaggatcaattacaattcatagttgctgtttccaccacagaggcagaattcatgacgactactgaagcttttaaggaagctttatggcttcacaaaatactttatgagttaaaacaaatcacaggaagagtgactgtgtatttggatatccagccgtccatcaatatttataaaaatccagtttatcatgaaaagagcaaacatatagatataagactctattggattagagagaagatagaagaatggctagttgatttagagaaggttagaatttaagataatcctacttatgattggagtaaggtcttaaccataaacaagttcaagcattgcttgaacttgatcaatctcagaagttagtacacagagactcctagaacaccaaccaataatggatgtttctttcttcatcttcgtcactcttttaatttgaagtaactagtgttggaaatattttacca

SEQ ID NO: 70251 - DNA, 3534 bp, Cannabis sativa
aaatcgaagatggatgagacaaggactctaatccaagtgacaagaaaaggaactactccaatgacagaataccttcggcagaagaaaaattgggcagatcttttggccttagcaggtgagccatatcccgaatcccaacttattactaatgttctctctggccttgatgtcagctacctctccatcgttctacaaatcgaagccagaccaaagacaacttggcaagagctccaggagcttcttctcagctttgacagtaaaatagagagacttcaggccatgtcctcaagcaacaaaatcacaaacaacccgctagatccacaagctaattttgcccagaaacctcacaccagtggacaaggaagaggctcaaaccagtatccacagcaatatggaggccaaggtggaagacacaacaatagaggaagtggaaatagagcctgtggcagaggcagatttgggggcagatctagtggttcgaaacctaactgcccaaagttgtgtggcaagtatggtcattcagtaagctgtgtgttacaatcgttttgatgagcactacatgggatccgaccccaacagtggaaatcaaaacaagaacagcaaccattctgcatttgttgccacaccagaagtcttggaaagtgatgcttggtttgttgacagtggtgccagcaatcacatcacatccgactcatcctccatgactcacaaacaagactatggtggtaaggagaaggtcaccattggtaatggtactcaactatctatttctcatcttggcaatggtttattaaaaactaacacagggaaatgtctactgttaaaagaaatgcttcttgtccctgagatatctaaaaacttgctgagtgtttccaaacttactcttgataatgatgtgctcatagaattttactctgattgttgtgttgtgaaggacaaactaacaaagagggatctacttcgcgggatgcttaaggatggcctctatcaactccaaataccaagttcaaagtcggcttctaaagttcaaggttctgtcgtgtcaaataagagtagaaactttccttttactggtgttgctgttaagtctaaacatactgtaaatcattctagaactgatcgtttatccatttccaaaagtgttgtttggcacatgagtttaggccatccatcacagaaagttttaaatcaagtcttgaatacatgtcatgttaagattcccaaaaatgaaattaaccacttttgtgatgcgtgtcaatttggaaaatcccatgctctcccatataaaacatccaatagcaaggctcaacacattcttgatttggttcacagtgacttatggggaccttccccaattatgtcacataatggatataaatattatatacatttcattgatgattgcactcggttcacatggatttatccattaaaaaccaaatctgaagctagtgatgccttcctacaatttaaagcctttgttgaaaaccaatttgagaggaaaattaaaaggcttaggactgatgggggaggtgaataccaagcccttcttgacactgtaaccacttgtggaattaatttccatcatccttgtccccacacttcgcctcaaaatggtagagccgaacgaaaacatagacacatagtcgaaatgggccttactctcttagctcaagctcaaatgcccctcaaatattggtcggaagcatttcaaacttctgtatacctcataaatcgtcttcccacacctgtgttggaacacaagtcaccatttgaagtcatatactctaagaaacccgactatgccttccttaaaacatttggagtaacttgttttccatgcataagaccctaccaagcacacaaattttaattccattcgcttaaatgtgtcaacttaggctatagtgagtctcataagggctacaaatgtctcactccaactggcaaaatttacatctcacgaaatgttgtgttcaatgaactcaaattccccttcaaatctggttttttaaacaattaccaatcgaaaaaacctgttattattcagagttcatcttggtctgttcttccatcatttaatttgcctacaggtgcttctccaacaacaacacaatccttaagtgcacccgaagcagatccctcaacatcaacacactctcaggtacattcttttgattccactgtttttaatcactcaccaccagcttcacaaactgcctcagcttctggcagtgagaggggaaataatatctcaggtttatctacaccagttctacttgatcctgctgctttaaattttgagcaggttgttacagaagaaacttcacctcgaactggtataaattctcctcagcctactcctcctgcaccagctatcggtcatcccatgatcacgcgagccaaagatggaattttcaaacctcgagtattcatgggttaatctaaatggcagcctcatttctctgtaccagacaatgtagaagaagcacttgctcatcccgaatggaacaaggatatgaacaccgaaaatacagctctgaaaaataacaagacttgggatctggtcttgccttctccacaccagaatctgattggaaacaaatggatttttcgtcacaaattcaatgctgatggtacacatcaacgctgcaaagctcgtttagttgccaaaggatttcaccaaagaccaggcatagtctttggtgaaactttcagtcccgtgataaagccatctactatgagaatcgtattgactatagctgtaacttatggctgggaaataagacaattggatatcaataatgcctttttaaatggcacacttgaagaggatgtctacatgctacaaccgaaaggctttgaagaaaaaggtaatgaacactatgtgtgtaaactcaacaagtccttatatggactgaaacaagctccaagagcttggtttgacaagttgaaagtcaccttgatcagttggaattttaaaaattccaaatctgacacctctctgttcttctatggtcaaggaaccaacatcatcatcatattgatatatgttgatgatataatagtgactggaaacaacagcaacaagttaaaagatttcatcacagctctcaatcaaaaattcactctcaaggatctcggacctctacactatttcttgggaattgaagttttcagagatgaaattggcctatacttgactcaatctaaatatattgaagatttgttgaaaagaacaaagttcaccaacttgaagccgtgctcaacacctgcaactgcaggaaaaccaatgtcactaacagatggtgaactgctctcaaatcccagtgaatacagaagcataatcggaggacttcaatatctatgtcatacaaggccagacatttcgtacgctgtcaacaaactcagtcaattcttgaaatctcccactactgctcattggagtggagccaaaagggtactgagatatctcaaaggaacaatcaacaaaggattccacatcagctatgatgaacctctaagtatcactgg

SEQ ID NO: 70252 - DNA, 1131 bp, Cannabis sativa
  modified_base (530)..(548): a, c, t, g, unknown or other
taactagattaattatgtattaatgagaaactatattattatatgatttaatatgtgatactgttatgatttattacattctaagaccccattggtgtgtaagtggcatttttgtaattttgactcgagaagggtaaaatcgtaattttatgatatactgtgcttatggattatattattatatagtgtgtttaatctatctgactataggtgttttctaataagtcggcgcagtatagtcacaaccgggtattttgtgccgaaccgggttcggtgcccaaaatatattttcgagatttatttatggcatttatgatataaatactaaaatatgatttatatgtgagtatggaatgacaaaattacccttggtatatgtatatgactctttatgggccttaggggcattttggtctttttgactaattaactaatattcaacaaaatctaatttttggaaaaattagataacattttatgggtttgtttttcccttaaccgaccccctcttttctctctctctctctctnnnnnnnnnnnnnnnnnnntatatatatatatatattgtgtatctcttatcaaatttggaaggaaggcttgaattggtgtgggtttgtgtgattcttttacataaagctagaggaagttgtggtaaacctttctaattttttttaacttgtgtgaatttcgatattttaaggtttcatagtgatgttcttcatgttcttgagcttttggttgcatgttgatgaaaataatgttagttgtgatgattttggtgtgcttttgctattaggatcatgctagtagcttcatgttgtgtagggtgttttctaatttggttctaagtgtttaatttctggaaacctacttgaatttttgggaatttctttgaaggtttggaagcttgagtttcaagcttgtgaattttgagcaattgtgttgattgtgtaatgttgagctttgtgtatgatttatgttgggtgttttgagcatatattctgatgtattaatgcctggaaacaccttggtttagcatgaatttttgttgttgtaggtgaagttaggactgagtttaggcattttcgggccttaaaatgggatttttgggttttctggtcccactcgccg

SEQ ID NO: 70253 - DNA, 1883 bp, Cannabis sativa
ccaaatgcatcattatcctcgacagagaaaaactcttcaatcttctgaacttgttctcagtttaggatggaagtgttttccagaagagaatcattcatcttcttatcatcatgcccttgaatatcctggagaaagtagaaaccaaatcagagaagctcctcactataatgtgtttgatgagtacgagagttgcccgaacgagttcagtagtagaggaacacttgctcaattcatttcaggtatctcttggcagcaataaatcattaccccttgatacttgatagctacttagatagatatatttgatatatacaagtgaaacttatgtgttaacatatgatagttaagtcaaagttgttttttgatgattcagtagattttcaatagttgttacattttgtccatgttagaaatttattgggttgatggaatacttaacccatgatttcaaattagtgtaatctttacattaaaatagtgtaagttttgcaacccatgttaaatattacatgttctctttgtttttattttttagtttgttaacaattattaattgtttcactaattaattgattatacatcaatttacacacacaaatatatacaatgtatataaatgagacaaaatttatgtatgatataagggtatgaggtgcatttttgagaaaaaacccaacattgctttactaagatttatatataaagggaaatgttaaagaagacgtctaacactacgacaaaatattatattattattagtataataaagtatcaggttctatctattttaatttaataattaatataaaaaatcgttaactctttctaaatatcatcttgtagtggtacttatgctcatttgattatagtcagaaccctagtttgaaaatagaatcatttcggattcggtagaatttctttttattcataaatcattgaatttaaccactttgataacacataaatatcaaccacctaccattaaaacttgtttcatcttctttgcccaaatattacacacatatcattaaaataacattcttggacttctatataaaacaagttaaattattatgcatatataataacccaactacccctttgaattagaaacacgttagtccaattaataacaactatagataacaagttacttcaactcaaacactaaaaacatacattttaaagttaaattcaatagtacaaaacttgtccttaatttatgccacaatcttatatatattggacttaactccattgaaattttggaagagtaaatattaagtgcattataataagttttaactatgaaattttcattaagttagatgatactatgaaaatgctaattgtaattaggtatagcagatgagagtaatcattaatttatagtcataggtttcttaacttttatcaacagtaacaccaaccttatttatatcttcaagtttggtagatatacttagatagtgatgggtttgtttgaatagtaaattaggtagtgaattcagtcacaaaaaatggaagagaaataaaaacaagagagaggcaaatcaatcaacttgataatgctaattaaattcacatttgatttaactttaaaaaataatgtaggcactagggctatatttcatgtgatttttggcaaaaaggttagtacaaatgagtttggttaaaataatggtgtcttcacacctttagattatagctttttgttactttattgatcgaatatgttttaaagacaatttagtggtttgtgtatctatttttggagttttgtattgaattttgtatgaatttttatttttatctattacaagattgcgtttttcttttgagtattatctgatttataggagtttatcaatttattttaattt

SEQ ID NO: 70254 - DNA, 1235 bp, Cannabis sativa
gacgtaaattctttaagtgatacttaaaaactgacgggaattatactttttgtagtagtgttgtaatacatggtatgatatattccattgagataattgtgcaaaataatcaaacaaaaggcaacacccctcaagtgtctactagcatcaatgccagcatacacttggggggagataaaggtaagtaagtaagcatacacacaaaaggcaaaaagtttctccttaagattatggggattagctacccccatcaatctgacaaaagagagaacctagtaaaggcatgcaagaaatgtacatacacctcaaagtacccaagccccaaaaacgtgcgtaggaggataaataatgaacacatgcaaaaggtcgagtcaattcacggaacaatcatctcccttaaaaacaataaattataaacacttgtatgaagttgagtcggttcatggaaccgtcatctcccttaaaaaacaagagagtgaggacaaagagcacattgtagggtgcccaaaccctctttcacaaaaaaaaaaaatgagaagaaaaccacgccgtaaaattaagaaaccgaagtagtgaaatttgataatgaagaatggaaagcagtgtaggagtagctagtaaaaagatagggtgacattccccttaatgcaccagctactgagtgcaagagaaaaaagaagcgtaaaaataaatgagtcaattatagtcatccaaaaattatagcaaacacccatgctaaaataataaaaaggtgtcacaaaaaatggtaatggcaaagagaaagtcaatttaacaacctccccctccaaacttgtcgaagtaagccttccattcaacagctagctgaatagctgcaagacaaaaaaagctgaagtcggtattgggattggcacgccacacgttataaagggcctagtccactacgacactatcatgcttcgctaaactttggctagccaccctcagctcttccttcaattcccagatgtgagattgaagtttgcaaacttgacactcgattctcctcttatttttgcgagcgcttttaagtcaatgtgttgtttcgtccccctcgtcagcagttgcagcaagcgtgtgcgtacatcatcctgctccctcgtgacttcctcaagtaacaggttgaatgttactttataatcaccataaacagcaagggccttaactgcttgcttctaagcctcccttgccgctacaagctcaccctcaaattcctg

SEQ ID NO: 70255 - DNA, 2161 bp, Cannabis sativa
taaagaaaaatacgattttaaaaatctgcaataacaaattaaaaacttgttacggcaaaacacaaatttatagtaacataacagaaataacagatataaaaatttgatacaagattagacgtggtatcaatattttttcaaacactcgattccacccagagaataaaattaattaataaaaccgatctcaaacaattacaaaatacaattgacttaaacaagtttagtctccatctctaaagctttaacgcagtcctttgcaatttattttgccaatctcatttttgaataccacctaacagcgaactctcttcgtcttttaatgtgtgagtgcttatttcctcccgaagtaaggctttgtataagccttctttcgaagatccttctcttgttcagtgaaattcttcaacttgttctaagaacaatataattaagaacaataaacacaaactaaaacctagctgaatactctaggtttttataaaagaaactctctcttcacgatgaaaatatgaaaaataaaactagaagatgcgaaaaatatttaactggtctctagatagccacaaacacgtttacacaaatgtacaaaagtactttcctaataatgttttgatttgcagtgatgaaattacattttaccgtgactattcattatcaaatagaaacttttcaaataaatccaagaatacaatttggactttaattctttccatagaaagattatatgatctgttatatacattataaaatgaaaattaacaactagcaaaatagtgtctctaaatgtgattgttatattagatctattaagtccttgttatctatctttctgagtgtatgtctttttggttgggagaagtttctttttgtttaataaccaagtattgtttgactctcaacgataaaattgattaatatattaatgtagtaataacaatgataatatacctatttttattaaccaatattatttttgtttttgaaattgtaaagaattgtggcaagcatatatatttgataaaaaaaattaagaagtattatttttatttttagttaaaaaatgacatgtttttttattaaatattaaattatttatattatttgaaattatatatatataataataagatattaataacatgcaattatgcatgtttggttggagttgtattagagtttctattacctaattattgttttaaataataatataaaaattaaacctaatacaattcaattatatttttttaaatatataaatttaatttaattttaaatttatttataacaaaatatatctaactaattttattaaacgataaaataataagtaaataagtttagatattttaaataatataattaataaacttgttatagaatatgattgattaattaaatttacttctaattcaatttaaattaagatttatgtaaaaaaatctaattttattgatacttttaaattaaatttagatatttaaaattattttttttttcaaaaagaaaataattaattgattgatttaacggtgctaactttaactgttaattttaatgaaaaaataaaaataaaaattattaaaccaacaatttctgttaaataatcacattttttataagacttaactagttatatttaatataagagagattaagtttttaataaaaatcaaataataaaatatctaaataaaactaaacaagatatatatatatatatagatattacctagtattttatatatgggatattagtggctagatcacttgaactttacatttttttaacacttaaccacaaaaattaaaattttgatggcaaaacttactaaacctccattctattttgctctttacgtcaaaaaaaaattcaattaagtgctacgtggactgcccatgtatacacgtatgtacgcgtgtcaactttttattagtccacgtatacacgtatgtacgcgtgtcaactttttattagtctacttaataataattttaaaaaataattataaatatttattaaattaaaaaattagaaaaaaaaataattttaaaaatatatttttttatctctctccttatctctctcgatcttctccttcccaggccctcgccgaagccatctgccctctctttatctctctcgatcttctccttc

SEQ ID NO: 70256 - DNA, 2334 bp, Cannabis sativa
ataaataatccaaacaataatttttagaaaattcaaaatgatattaatccggtgaataatctcatcccacatataatacccctataatccatatatcaaacttgaaagaaagcattaagggctaaagagagattaaagtcataattggaggaccaatttataaataaaacaaaattcgaaggcaagaaagtaatttagataattataagtactaaaaatagaatcaaaactttttccaccatttttgcttttcttcttcaaatcggagaaaacagagcaaaccagagagagaggagagagagagattggatcagctatgcagtacaagaacctgggaagctccggtctgaaagtgagccagctttcatacggagcatgggtaagtttcgggaaccaactcgacgtcaaagaagccaaatcccttctccagtgctgccgtgaccacggagttaacttcttcgacaacgccgaggtctacgccaatggccgagccgaggagatcatgggtcaagccataagggagctcggttggcgccgttcagacatcgtcgtctccaccaagatcttctggggtggacctggccctaacgataagggtttatcgaggaaacatatcgttgaagggactaaagcttcgcttaagagattggatatggaatatgttgatattctttactgtcatcgccctgatacctcgactccgattgaggaaactgttcgagctatgaattatgttattgataagggttgggctttctattggggtactagtgagtggtctgctcagcagatcactgaagcttgggggatcgctaatagattggatctcgttggtcctgttgttgagcaacctgagtataatttgttgtccaggcacaaggtcagccatttcttcaatttctttcttaatgctttttatatatatatgtatagaaatacattcatttcgggaaatttgaagtgggtttcttttttatgtacttttttggttttttcggtatatgggatttattttggaccctgatgatgatgatgaagataataaatttcggttttttgttttacaagaatgtgaattagggttcttagattattagtattcttttatatatatatacattttttttatgacaatttgaaatgggtttcctgttttgtgagtttttcttgtgtacttatttggttttttatgtacatttaggatttttttcggtatatgggaggttttttttggaccctgatgatgatgaagataataaattttgtacttttttataaaaatatgaattggggtttttttagattatttttttttttttgttctgtattcatatgagagtactatttttcttatattttcgttatttttctgtaactgggaattggggtatttttgatttggttatgtagttttgtaaaaaggggcaaacttgtccttgatccagttatgaaactgttctattgttcttagtgtgcgataattgaataaatcatttgtttttatgggacatagttatttattgggtgaaaggggatgttggtgtgatttgttttgttttgatgctgaagttcttcatttgaatcaaactttatgatggtacccattggattagtgctgttttatttgatgatttcatatttgatctgctttttgagacttttacaggtctgttaggaatttgaaagacatgattaattctgaccattctattagagttgttaacatatttcatagcttctttttactgttttcctaacaatgaatgtgaaatattggtcttgtttaggcatgaaatgagatctaattagaatttgtagtgtcttatgctttatggatattggtcttgtttaggcatgaaatgagatctaattagaatttgttgtgtcttatgctttatggatgcaggttgagtctgagttcctccctatctacaccaactatggcattggtctcaccacttggagtccgctcgcttctggagtgctcactggaaaatacaacaagggcactatacctcctgacagccgatttgcattggagaactacaaagtaatattcgatttactttgtgcattttgtgtcaattctcatacctgttttgtttaagctatacaagttgcatcatgtgatgtctgctgttcggtgccactgaatttattgcttattgaaaattagtgtggattcatctcctaatcaaaatagtatacaattcctacaaagtttagttggaccctaaatagtacaatcaatattgattgcatttcctatttcggcttgtgggctcacatgtattatcattgccttgtttgtagaatcttgccaacaggtcactg

SEQ ID NO: 70257 - DNA, 1729 bp, Cannabis sativa
tctttgtgaaacactttgtagacatgaccaagtggaaaaggttcgaatttctctgggatttgatggaatgtttactgttgatgtgaagggcagaagtggaggcattgctcttttatggagacatgaaaaagaagcctctcttattcggttcgcagacaattatattgatatggaagttaatgtagtgggacaaagcaaatggaggttcactggcctctatggtgagccaaatcgtagcaaaagaaaggctacttgggacttacttcgctcactttctgctagttccaatcttccttggtgtgtaatgggggacctaaacaatgtgagttctcatgaagataaaaaaggtggcaatcgctaccctgattttttgattcaggggtttcaacaggccctaacggatagtggtctgcaggatatggacttatgtggctatcctttcacttgggagaggggtcgaggaacagataattggatcgaagtgcgacttgacaggggcctggttaatcaagcttggcttgatatgttctctgctgccaaactgtttaatattgaagtctcaacatcggaccattgtccgatctttatggatttgactactgagctatcaaattctacgattggaaggttcaaatttgaaaatgcttggttgcgggaacccatgtgtatgcagctggttaaggatagttgggagggctgtattgagagtgatattcaaagaaaggtggctgcttgtagtgctcagttacagggctagggaaaggaatacactggtaattttaaagaaagaatcttgcgttggaaaaaggagatgaagcgctggaagcttgggcgagatgatacttctattacgaatttcaaacaagcaaaactgaacttggttgaaacttatgcccagcgggaagtattttggcgccaaagatcaaagcagttgtggcttcaagatggggataacaacagcaagttttttcatgcctcggcttcagctcgtcgccgaaataattccattcagagacttcaaaatgattcaggcttgtgggtggattggaaaacgggattacctaatgtgatgatgaactatttctcaactcttttcacctcggctcaaacgaattggcgagaagttactgatgatgttcaatctcgagttactcatgaccagaatgaatctttgatgcaacctgtttcttgtgaggaggttcgtaaggctttattccaaatgcaccccgacaagtctccgggaccttgacggtgtgactccggctttctttcagaaatgttggtcagtggttggtaatgatgtttttaattttgtcaattcttttttcgaatctggccattttcctactggtatcaatgctaccaatttggttttgattcctaaaaaaaagcaaccttttgatatgggagatttccgcccgattgcattgtgtaatgtcctctacaaaataatttcccaggttcttgctaatagacttaagcatgtcctgcctacaattatttcggagacgcaaagtgcttttttgcaaggtcggttaatttccgataatataatgatctcttatgagattatgcattttttgaaaaggaaaagaagaggatgagaggggttcatggatctcaagttggatatgagcaaagcttatgatagattggagtggggttacatcagagctatgcttgaaaggatgggtttcgatggaatgtggattaatttagtcatgtactg

SEQ ID NO: 70258 - DNA, 1201 bp, Cannabis sativa
  modified_base (1128)..(1136): a, c, t, g, unknown or other
agaggccccctccaaatgtctaccaaaaaatgaatccaacgattctcgaaggcaaacatcgggtgcaaaacttcttatcaaaaaaggaaaggaaaaatggaagagcaaaagtcgctttgaacaaccagaaaaaagtgcacgggagatctccatttttgacttcctcagaaaagggaaattaacagtccatacacaacgaaagcagtaaatgacataaaatgaataaaaacaaagagcgtaagtcgtcgaatgcccaactccaggggcgtcactttaacagtggccataaccgctgtttcaaggaaaccaaacacatcagatgaaaatacattgtcatctatacttaccttaataagtgaaattaatgtttgaacacaaaaaatcagtaaggtagaagccgatgacgcatggaggtaatatttcgtctagcaacggcggaggaaaagcagaagaaaatcagaggcgtctggaattttattgagtggatttggtagactagaaattacagagtggtgaaaatgacccagttgggaaaagtgttggcttttatacaaaatttgggatgcgaggcagaatatgcaccatcatacggtggggattcacaacaatttgaattccataatccaacggctgggatgaacaggtgtaaagaggagaaagggcggttgaaacgtttgagtacagacaccgacattgatggaagggtctttcaataggcgggaagtgaatcgttgcctgcaaaataaataaaaaccaatgatgacaatcataaatactgtccacgtgcctggggcatgtgccttttcgtttatggataccgaggatggctcacaagtcttatttacctgcgactaaataaaacttggggggtaaatgttgccatggtttattcccaatatacgtggctgctgctatgtgtgacatgtggacaaaatagacacgtcacccggagatgagttaaaggtcgaattaaagaagcaacgagtatggttcatgtcgttagctcccggacaagagcaaaaatctcaccttcctttccgagagtcaagacatgggaaggcacctccgggccagaagggcttgacttgaacagtcgcttcgcatttaatgcagcatggagaaaacgtnnnnnnnnncccataagaggacatgtcagacattgtaaacctaatttagggagattacacgataatcaaagggg

SEQ ID NO: 70259 - DNA, 1141 bp, Cannabis sativa
aatttggtcatataaattcacttagaaaatttacataaaaaaggttaacagttgacctagagagtactatatgagaaacaattataagttataactgttcttttattgctcaattaattcagaaaaataaaagtaaaaattacattacaaaaatgaataatgtgaataaaaaaaaaaactaggaggaggatgctgatgaagaaatatcccaattgcagacaatgtgaccaactaacacagaaatatcatcaattttgcctcctttatgttttttgccaacctttgcagaagcaatggcataaggagacacaccatatttatccaacgacctatagtaagcagcttcagctattgcaaatgccaaatctttatacttattattatacttatcatcatgatcatccaactttagttctgtcttaataatgtcttgtatttcccaattaaataagttgtccaataatccatcacttcccatcacaacaacatctccttccttaacacccaactccatttccacagcacattcaggaccatcactccccttatggttccccaattgaaaaggacagttaaatcgcttttgttgagttggtgatttgtatattaacttcccttctctaaacaacaagaatccactgtctcctatgttcgcacatctcaacataccgttgttgtgtgttacaacacatatggttgacgaaccttcaagattactatttttagagaaagcttctctaatgatagtttttggatcaataatttcaggtaataatttgttgttaatagcattggcatagttaaagattagagatcgagcatatatgcccgagtctatcccacttttgtcccatccactaacgccatctgcaactccaatagtttgttcatcacaagacacgaaatgagcatcttctcctaagggtttgagtttgagtttactttgtttgggtatgtaaaatgaagcacaacgcatctttagaggttttttcttaagaacaaacttcaaacatagtggtttcttttctactttagttttgtttttcatgattgtcttttgttttgtttctttctaattaataactaagcatcaattaatgaaaatgttaattatcacttttcatttgctttaatttatagg

SEQ ID NO: 70260 - DNA, 1148 bp, Cannabis sativa
tttaatatcaataaattaaatgttagtttagtttaaacctgttaattaaataaattctcatactgtagctataacttacaacggcataaataaattgttttaaaaatttaaatatttgaaagggaatttataatgaatttgtatagtttaagaggaattattacaataaacataaattaattcagataataaaactctacatttttatattgcaaatttgatgttaacatcacttaagggtttatgatgttatgacatacgcagctaattggttgggaagctattgttgagaatataagtaatgtaactaataaccttattaaacaatatataactaatggaacaggttgtcatatattaatattatatacattttacatatacttaattatattcttaattttttttttttttgattatgtatattttttagttgaataataattaaattttttattttgatattataaaaataattaatttaagtattatttataaaaataaaacatgattactttcaaaatttgttgttacttataattttaatttaaccataatactattttattagaaatttcatacacttttttctaacaaaatattaataattaagtaacacattaatattgattctttaagaaacataatttttttttctattttattgtttataaaaattgaaaaaaaaataatagttaaataatttttaaatatgtggattgggtaaaaatttgataatagaaaaatattttttaaatatgtgtaatattcggtttaaatttgaattatgttaaaagaaaaatacttagccacatttagtataagaaaaaaaaaataagagatatatgtgtagtataagtttaaatttgcattgtaatattttaaaaaatgaacaacactttttgttatatagttacatttaatataactaggtatttgtaacatgcaatgcatatttgctcagagttgctattatctaattattaatttaaataattaataataataaaaattaaagccaatacaattgatttatattattagatatattgttaactcaaaaacttttcctagtgatatggacatcaatgtatgacacgtggtaagaaagatgacatcttgaggttgagtagtctcgagtcataaca

SEQ ID NO: 70261 - DNA, 2851 bp, Cannabis sativa
  modified_base (2680)..(2685): a, c, t, g, unknown or other
tctgcaggcattaccctacttttatgtggtgtttcttacaatccttctccttgaccaggcaaaaagggacgatgatcggtgccgatccaagtaagcaaacacaatttcatcatttgtttgtctccaaaatttggtatttgaattaaatgttgagatgggttgggttgttgttgtaattgcaggtatggaaaatattggaaagtgtactgtgagaaggttccttacagagtgatccctggaatttactgagataatgtttgttttgttccatgttgagatgtgaatagcatcatcatcatcatgtatattcatcctttctagattaaatgatgtcaggctgttatcatgttgttgttgttgttgttattatttttgtaatggtcaaatttatggatgatgctgctgttgctgtattgctctcatttttaatgaccaaaaactcttcttatttaggaaaatggctataaagttttgttagatttcaagttcgtttagggttattggttttgttttcttttccaaactatatatatagatagaggagcgagtccaaaacacttccaacccaaccaagacatttgattagtaagtagagtatttgatgaacaaaatgtaaaccaaactaaaatttacaagaaaaatgcaaaattggccaagatccattgttttttctttatccaaataaagaaaagttgccaccctcttttctccaccaccaaaacaagcactagatttgcacgtcgcacttcttcaacaaccataggattggatttggtgcggtgtgctcagaactatcgagtgcattggatttggtttaacaaatgtctggttagaaaacaatgatgggtgcacattcatgcttattgtttcactcttcttcttcctcactactcatattcattgtctcttttcatacatcataccccttttcactattctccaatggactctcctttctcattgtccttctccaaactcagtggttgaacttgaagttttctcggattctcagtgtggtcctgtttttgaggaatttgatggtgtaaaattgatgcctatagattctcaatctcaatttgatggaaatattgtggttgaggtagataaaggtgttgatgataatgaacaagtttcgttaggtcgaaagtcgatacctatagattatgaatccaatgtaaatgttctagttgaggaagttgacactcaggaagagaagaacgggtgttagaatctagtttgtggttgagaacagtgataatgatgatgaataaggaattgaaaatggagtctctcatttactaaagatgaaaacctaactaataatactgaaaatgagactacatgtgcttcctctaattgtggcaatggcaatggcaatgacaatggtaatatcactataactagttcagttggaggagactcagagaagagcttaagtgaggaagagaaaaggaaagtggacaagtttcaacagttaagggtgaagtacttaagatttgttaagatagtaggtggctcgattgaagattcgatagcaaggcaggttctgtaaggttggcacttgtttcgggaaggcaagctggccaagaatttagcttggaaagtgcaaaggctaaggctttccaacttgaatagaggggagtgatgttttggagttttccttaaacatatttgttattgggaaaacaaatgttggcaagagtgccaccataaactccatttttggacaagagaaaatctcaatttatgcatttggaccctccacaacttgtgaaaaaaaattattggaaaagtgtatggtgtcaagatcagggcttttgatactccaagtctgaaattagctgcaatagaataaagcaccaatcgaaaaatcttgtctttagtgaagaatgtcacgaagaaatgcttacctgatataattctctacgtggataggttggacactcaaagtagagatcttagtgattttttatggttaagatcaatcacttctactcttggtccttctatttggagaaatgtcattgttaccttgactcatgttgcatcctctccacccgatggtctatctggttgggcttgagctaaggcgagctaggcgtctgcctagggcccaccgagttcaagggcccaaaaataaaataaaaaaaaaaattcttttcaagaacatgtatatttttaataattttcaaaaataccgtattttctctaaaaggaataattttattgctacctagagcctaataatcccaaggtcagttcttgcatttagcgcctttgaactatgaattatatgttgctcatcggtctcaaattgtccaccagaggattggacaagctattggtgattttcgaactatgagtctgagttgagaaatcatattatctttggctgtgaaccattcctcttgtagaaagaatagggataatgaaaaagtgctccctaacggtcaagcttgacaatctcagttattgcttttgagttattttatgaagatattgtccgaggcaagtaacctcttaacaatggtcaagcttggtgatctcaattttctcttggtgattttaatagtctacagttttacataacaaacaagattacttcttcttcttttttatttactgaaaattacatattttatagatgtttatataatttgtacaaatatatatatatatnnnnnnatatatatatatttatatgatttacggtaaaaattaaaaaatacaagaaaatagtatgggtcagtttagtacgcaggattggactagactgggcaagattggattatgctgaaagtaatcatgtgtttagtttaagattagattagactattttatttatttcctt

SEQ ID NO: 70262 - DNA, 735 bp, Cannabis sativa
tattcaatttgatgcaagtgaataaatctgtcattgaaaatatgcgatttgactgatctaccaatttaaacacaatctcaaattcaatgacagttataacaaaagagcactctttcaaaggtagaaaaggcactccaaaaagccccctgaagaaacatccgaaattcaaatactgagattttgcattaagctccttcaaacacaaggtgcaagaagcattcatcgtagggaacttcacttgcacatcaatattatgtatctgaagctgacaatgtttgaggacaacattcaaaagagctgtcttatatttacttcttgaaggagtagcagctgacatcctctcaagaatgttatgcaaatagctaccctgacattgaataaattgcctcaataatatttattcaaatttattgataaattgagaaaatgttcaccttcctaatgagaaacattaaatattcataagttaacatagacaaacataacttccattctaggacacaataatatatcatcttaatttaccaatttgttcactcgctacaaataaaaggaatacctatattacctaaaccttcttgtcattaaatctgatgctgttactaaaatccacttttcttttctttttgtattccagtagagtaagcttatacatcaatatccatattttctttaacaaatcaatctttaaaactgacagaaaatacctcaggatcaatctgagaaagctttttc

SEQ ID NO: 70263 - DNA, 1382 bp, Cannabis sativa
aacaagatattaggaattcatatgtaattatcaccttatatccaaacacaccttgcattttaaaatagtgtaattattaaactgtataattaccaccctaataattaccctacctagtaattacacagttacttccaataaattttcttacttttaattgataaaatttattttctttttttttttttttgtataatttataaattacatcaaacatagtatttattcaaatattacaagcctcattatggttcataaaaaaatattatgagattaaaatttgatagctactaaatataatataaacaccctaaattgtttacatataagcaatatgagacaaacacatgtgcaagttgtttttttttttttttttttttgataaattacaccaaagatggtatttatcttattaccaaatatttctaataaccataaatagttaagtaaaatatttgttgaagttttttttggttaataaaatgatcagatgtaataatactcatactatgagaatgcacatgtcactacttattgctcaactttcggtcaattttaaaatatagaaaaagaaaaaaaaggccaaatatcataaattttaaataaataatactattattttaaacaacatatcactctaaatgagatattttaatataataataataattttatacaaatatccatgatagtattgaatttcttaaattacagtaaggtcattttagagactttcacgttgaaagtatttcttttggaaaatcaacgtaacttttatttatttatttatttgatatttttgtgtcacatatatgcacttaattatttatttttaatatttttgtcacattttttttttttgtttaaaaatcactaaaatacatcgtacgcaaagcttgataaacttaaaaactaattagtacagctattgaaagatcagacttcattatactgttaatgcctgttcatcaataaattaatattacatcttttatattataacaaaattactttatatatggtcggttatggattttttttttttttcaggtacataatttttaactatatatattagttgttaagaaattttgagaaatatgtggacaatagtccaagtaagtagtatatataattattttaggtaaatactattttagacctaatgtttttcaaaagttatcaatttgaccatttgttttttcttaaatgataaaaaaaaaaaaatcttgtattttccaaaattgtacaaatatgactatgaactgattttttgtcaaaattaaacttaataataatccgatctaaaaatgttatgacaaaattagttacattttctgtatatggtcggttatagattttttttttcaggtacataattt

SEQ ID NO: 70264 - DNA, 935 bp, Cannabis sativa
ggacaacaatttgtaactgtttgcgggtggtgcgggttgtaattttttttttcaaaccaaactgtatacgtgatttttgtaatttttcaaaactgttaataagaaaaaatcatttatttgttctttcttttgatcggattattagaagttttttatggcttaagcaattctagtcggtcctgtgataatccatgataaaataaaacatacacagcaacctaaaagatctacttatttcacattatcttcatcctatgatttcactttcaccaaagattatgtaacataatctctttaatcactagaaggaactagtgccaccctcacaactcacaccaaacattacaattaatggtgtctctctattctctaatcacaatctgaccaatcttttcaaatggtcacatacattttacagattaatgaagtcttatttgatgactttattaatctagatttgatcttgataaatatcatcatgccttgacattaatatccataaagaacaccaaagatagttaaattgatcaatcaataagaataggaaaaattcaaagaattatttggttggtgaagttgccataccaaactcaaatcaacatcttatatacatatacatgtagaccccaatcttgaatcattgactttcacccctttttactctactttcatgcttctgttctatgctcccaacaacactcacagaagaatagaatagattgtgattgtgattgtgattgtgtatatattatacttttgttttgtttttttttactatttgcttcctactctttgaaattttgcaaactaccccctaaattttagttatttacattttagatctaatagtattttatgaatgattttcaaggcctatttataccgtccttaagctgttttatatgaacgagattattattttttaagctctatag

SEQ ID NO: 70265 - DNA, 2464 bp, Cannabis sativa
taaggaattgtcttcaagttggttacattaaattataaagttgtcaaaaattaagcttagggtcctatttttactattatagaaaatacatggtccattttgtcatttaacaaaacacagagtctaaaatggtatttaccctatatttaatgttaaaataaataaataaataaataaaagtcattacctttgatgaaatttcttagacaattagtgagaaaaatattctctttcttttatccctcatttaatcaagttatctctttcctaatgttaataaattgaggtgaaatttggtaacacttttgtttttaaattttttaatcacaaaaataaaagtaaatttttgtttttgaaaaataaaaatgtgttatataaccgcttttatgctttaatttaaaaaataaaaataaaagtgtgttctgtaaattttattttttttctgttgattttatttagttagggtctagggatgaggtctagggtcgtgcccagggccggggctgggttcggttttgggggttggggttagtgtgagggtttggggtccgggtcagggacaaggtcgagttctaagatccaagtagggatttgggtttggggctagagtcaagagtcgggaacagtttcagggtttggggtctcggtctaggtctggagctgaggtccaagttcaaggtccgggtctgatctgtcggggtctagggccaggtcggggtccgagatctgagtttagggccaaggtctaaaatccaggtccaggtttgggtctgggtttgggtttaggtttaggtctgggttcgggttcaaggtttgggttcgaagcgccgtatcatatgcaagtatacacaattgaaataagtaatataataataaataaagtattgttcccatgaggattgattatcaattaccaatcaattaattctttagttctatttgattaataaaagttgttggacagaaagtaaataagacaagacaaagattaaaatttaatgaaataacaataataaaaacaagaattattataatctccaactatcctttattttacttcctaatgcaattatccaatttctctttttcctattcaggtgataagttgagttaagaagtttataatcttgttaagacttacaaacccaatctatgagaaaactttctatattattatggtaagtttaataaaaaaagatagcattaagcataacagctaataaaatcatacaaacaacctaggtactttcgtcctaaatcaatttgcatccataacaatcagagcatatgaaaatctcaccttctaaattttgattcgaattcatagataacaattatagatggccagtaaataattacagaattaaaacagattaaatgaaatttattttaaaagaagaagaagaaattgaacaactacattaatccataaaataaattcaagtggttaacataataatccttaaaaaaattagctactagaagtgtaatattctaaggttaaataactggattaacgatcctaactagattaattatgtattaataggaaattatattactatataatttaatatgtgaaactaatatgaattattgcattttaagattccgttggtgtgtcaggggcatttttataattttgacccaggacgggaaaaatcgtaattttatgatatactgtgtttatggactatattattatatagtatgtttattctgtctttctgtaggtgtttcttgacaagtcggcgcggtatagtcacaactaggtattttgggccgaaccgagtttggggcccaaaatacatttttgtgatttatttatggcatttatgtgataaatgagaaaatgtgatttatgtgttataatgtgtgtgaacgaaatgacaaatatacccttttatgtagttatgcttgttgtagggctttaagggcaatttggtcatttgatcacataattctatttcaacaaaaaaatcagatttttcaccaaaattgatttcattttttgagttttgcttcacccttagccgaccctttctctctcaccctctcgttttgtaatttcaactatttgtgaagaaaagcttggattgggcgtattagtgtgcgctcttgtgtaaggtaattgcttttgatctcttttcttgttaatttttggagttataagatgagttatgttgttcttgatgttcattagctttttattgcatgttgatgagaatagtgtgatttatagtgtttttgggtgtgttgttgctattaggcttatgcttgatgcatccttgttgttttgggagattatagcttgaataatgatgtttaatttgtgggtttagctttaaaggtttgaatgcttgagttcaagcttgtgaattttgagtaatggtgttgagtgtgtatcatgcttagtgatgattatcaattggttattttgagctttgtgtatgatttttattgg

SEQ ID NO: 70266 - DNA, 855 bp, Cannabis sativa
aaatatattactaaacctaaactgtgttgtgtaataattatcaccctaataattacacacagttacttccaaacacaccctaatttattattctttatattaaaattataccaaatataatatttattcaattaccaaaactttaatatttatcaaaattagtctaacctatttttttttttttgttagcttttaagcttcctcatgtattatttgtcataatacttctaaaagtcatggcagaccattcttgagttgcaacaacgtgatatgatgtgaattacatttaataaaattaataaatttaatggttaatttgctaattttttttttatttaaaagataaataataatacatcgatatgttcatgggcatggcttgaagctatccatttttcatgagtttctcttatgttttcggattagttagagaaaataaagtggaaatagattgtgaaagggtggctttgcttcttggtatataaaaaaatgaattttacttagttggaatttagaatgatattgtaagatatttacaatgtttatcgtaattttgttatgtatcatttaaatatttgatttgtaattgttttactaattttattgcttataatcttgctaagatgactctttctagtgactatgttagaatttggtggccaaatttacttgaatttgtgtaagctttttttgacttttttccacattggcttaatgaagatttcatttcattcaaccaaaataataaatcgatattatgaagttgctttagttgtttatattaacgttgtttactttttcaagatgaatagttgggaagaaaaaggaataagaaaagtagattaagctttatta

SEQ ID NO: 70267 - DNA, 1650 bp, Cannabis sativa
  modified_base (50)..(61): a, c, t, g, unknown or other
aatacagtttcacggaattttaaacatttttacaatttttttaattttannnnnnnnnnnnacagtctttttatgttgtaattttgttaatttgttgttttctatatgctattttttattattgttttgatgttatttagatcttattttcattttaattttatgcaattttcatattgtttctacgaaaaactgtaaaaatgtaaaagaaattcttaaaacataaaaatgtaatttttttaaaaaaaaaataatatctgatgtaattattattttgaaaaaatgattatgtatatatattatatattaccagaagaaggatgagttggaagatggcacaagttaagtagcgaccccaataagaatcactaagaaaagcaccaagtaatgaacacaagtaaacagtgccagtccatttgctcactgtgtttgctgcatcagctgtctcttgcccaatcactcttgttaagaacaacaccaagttcactccaactccaaagaatgctaatgttgccaatccttgattcactatatttatacatatatactctttttattattataatgtatatgcaataaaagaaaataaaagaaataatgtatgtattaagtctacaggataccccctaaagggttgtttcggtggatcatcttctatctgtatgtatgttatagttatttaagattgcctgtagattttcagaaaatttcgagtagtttacaatgccaaaaataagatttatgcattttgttgtacgcgcgactgtttctttttttatacgtatggtatgtaactgtttaaatcttatttttaacattgtaaattatttaaaattttttgaaaatttacaagtgattttaaatagctacatgaaaaaaaaactaataaagttttctagataccaaaatagataaataatttaccgaaacgaccctttaaggggtttactattgaaattttctaatatttatacctagcaaaagatatgcatatttccaccctcctgatgatcttgttgttaggttcttcttctcataattttcagattcatcatcatctccaaaacttgcatttcccttttcatttaagaaaataataaacaagaatattaatattattataagatgctagtaattaataataaaagtaatgataatatgtgcattaaaattaggatcggttttaaaatttaatggatcatagaaaaataatatttttaggcccttatttagaaaaaaatatgatattttttaaaatcaataaaaacacatgtaattttaaaaaagaaattttttcacatcctcgaactaagtgagccctaaaaatagacatagctcacctatatccaaagtcgagcctagctaaaatattataatacattcttgatagtatttttcaattttatcatgttaagatgagattcataatttaaaaattactattattgtcaataaatgtaatattttagtacatatataatttaactcaacctaacaaaataaaactttaataattacactacttgattgtttcaaaaaaaaaaaaaaattaaattattacactacttgatcaaagaatcatatattatagattcatatccataacattgtgtttgtgtatgtattaatttactagtgcaaataaaatac

SEQ ID NO: 70268 - DNA, 1050 bp, Cannabis sativa
  modified_base (288)..(288): a, c, t, g, unknown or other
  modified_base (575)..(591): a, c, t, g, unknown or other
aaaataggagtccatataagaaagatcacattagttgtttacctctacatttcagaccttacttggatagttaagtctaagattttggtatattctaacaagtgaggatcatgcttcacacttgagcaataatgttaagacttttaaggaggatcatgcattctaacacaagtgaggatcatgcttttaacacttaagcaataatgtactttgaaatataattatgctaagaatccttaaataataataataataacaacaacaacaatagtaataataataataatnataataagaagaagaagaataataataataatagggggtgttgtaaaaatatttgttccaattcaactggcacaacccaattcacaaaatgcatattagattgaaaattttaaaattcgctgtaaatgagatgttttatcactaaaactaattaatctaatccaatttacttatttatatatatttattgaaaagtgtcaatatatctactctatataaagtgtgcctatataactgaattcttggtttataagaaattcatgggtgactttttatttatatttaannnnnnnnnnnnnnnnnatttatatataataaaaaaataaaataaaaataaaataaatcccattaatatttgaactgatatttgatgatatttgaactgatattagacatctatatatctatatactaggcggcaactacgtgcgaggcacgtgttattttgtttttagttttttttttggaattttttttatctaaaatatttattttaataatagaatattatttataaattttattaaatattttgtaagataagatgtttacccatttaaaaaatattacataggataagttttttattataatttttaaattattacttatatgcaatgtataatttaagataaaaatttagcaatttcttcttattttatttcttcaatagaatatatatcaaaattcttatatcgcgcgatcttaatttgagtttttatcttcttttgatcaacataaatttgtagtatccaacactta

SEQ ID NO: 70269 - DNA, 4432 bp, Cannabis sativa
aaaaaaaaaaaaaaaaagattatggagttattgaaaaggctaattagaaaaaaaatccttaaatccaacaatttgttcaaggaattttcaatgaccttaaaaattcaggacatgatttggtacatgtcaaagacaaaaatcttaattagcctattaaaaattactcttccgatttaagaataaattaattttttatagcattttaatttatttaattatattttggtttgaagagaggattaataaaaatatcaccactgtatgtagttgtcaggtcacatttccatccattttttcagtcgaatataataaaaggaattatttccaccaacagttcaattatttgagggatttatattttttaaaaaaaaatagttcaagaacaaaattcaataatacagtgagaatatgccaaattcgaattaacattacataattaagaagaaaaaaaaaaatagaccttgatttcttagttaacaatcttattgaatttacaaaaggtattattattacataatcctccaaccatgaatttctacaaaagtacaaacaaatttatccctattaatatcccccccaattttatcattttatgttcacaaaatctacaaccaccccacaaataataatcaaccattacaactttgtaaagggtaaaaaagaatttatatataataatattgttcaatgaagaatttttagtgtgatttgaaatgtctattgctgctgatcttccttattctagtgactgagtatttataagcatgcatcaaatgcttcctaaatcttgtaagatcaagtctcacattttgaccatcaagatagatactttttgtgtattgccacccttttttggtcacactatttggatttttaagaacaggatcatcttcatcatatttttcatataatgagctctcactagcatggattttgtacccaatatactccaatccaagcattcttgatggctcaccataataagtctctgcagcccaaacagtcccaagtggaacaacttgtatgaaaactgagccaggtttcatgaacaagaaatgtgtcattgcagcaccatgtactccaatcatcacatcacttgaatttagagctctataaatcttggccaattctgttgttctgtctggtttaagaatctcaacttcaaaccccatcttctcagccatttcagccaccatgtcctgatttgttatcattctcgaccctgttcgcgctaagatcagcaactttggcttgcgaaaaagtctgtctttcgaaaccttttgcttaatctttgacaatgtttgtgttggagattgagctagtttctcttgtgcttccctttcttcatcttgaattagtccttcaattctaggccaataagctctatcaaggacatttcgaaagtcaactacagtcttgttttcttccatcattgaagggtccacagttaaatcaccatggattttgaggccaacaatggcttgtggaaaacaatgggtcctcaaatcacccttgaaatcaattggagggtaatcagagagttgggaaagaacatctccatatttggtaacccaccaattatgatactcagagataacaaacacaactttcttattgaaatgttttgaagtaatgaacaatggcaaaatcccatcattgaattcatggtaaacattaccagtataaccacctgttgagaaaaacactgctggaacatcatggttaacatcacactcatgttgttttttagctgagggtttccttgaaataaggtctatttcatcaatagtgtccataacactagtttcccattttcttgtataaggtttgaccttttcatgctgaagttcttcttcttcttcagtttcttcctcagcaacaatggtggaaacaaaatccatgtagctgttactgtctctggggccataaacaaatacagaagaggaccctgagtgtgttcttacatcccctttcatgatacaaaaatcagaacggtaaccacttctatcacaatatatagtacctgaaaatgaaaagagaagaacaaaaacaaaaatcaataaacaaaattatagtaacccttttcaaagatttgatttttatctggttttctaaaaacccaatcattaaacttgaatcccaaacaaaaaaggtctgaactttataatagattttaagaggagaaaggaaggtattacttaccattagagtcaagtgaaaaaggatgagtttttatattcaaatcagaagaaagttcttcactttcatcacgaggtgaatctgcaaaataagaaaaaccccagaaaagctttgttaagaacaagccaaaatatcacatatatacacatatacatacatacatacatatatatacagagagagagggagaaaagcttacatgagagagaaaaggtggaagaagaaccaaagaagtgaggagccaaaacaaagacacaagagagaagagaaaggagaagaagagaaacaagagtaggccttgttctcttataataaccaaaacttccacaatccattacaacaaaagtttgagactcttcatcatcttccaaagcttgcccttttctccaatggttatacctatggaggtgatggttgtggtgtaacattttttctttcttcatctccttcatctttcacaccccttcttcttcctttaatcaaaagtaccaacctttttcagagaaggaatatatattcgtgttgcccaagtttagagaactcaaaaaaaatcaaaatatagagaaaacaaacaaaagggtatctatatatgtgtgtatatatgaaatatatgaatatgtgaaagagatatctttctgggttcttagtgatttcctaagaaagaaaataaaaagggttacttgaagagaaaagagtagtgtagtagagtatgctgggttgggctggcttgctctgtttttattcttatggaaatatgagaaagtgggaaaagggaaaaccaacttgatttaaggcaataagagctgtcatagaaaggaggctttacttaattaatcagataattgttagaaggtattaatttttgtgagtgttatattattattggtactattaaatttaaaattttatataatttaaaaaaatatttttttttataaaatattgctaattaattataaggatacttgtattaaaagtgttatatacctttaatttctaataataatgcttaaataaataagcttattattctttttctctcttttgccaagcgtcaaagaaggttttttttatttttgaaattaaaaattattagaaataataataataataaagaaataagtgaggaaaaaacacgtcaaaataggctaattcatggtttgaagttagctgggtatttggagcttttggagtcaattgcgtgtagataactaattccattttttggcctcttggtaagtctataattatcatttcatttcgacttttagtataaataaaaatataaattgttactatctatcattctatttttcttgatatatgactatttatttttattttttttgtttataaatgaactttatttttagggtttgattaatttattttatagtcattttcattcaaaataataacatcaattaagagtattttaatacattctatcaatttcagcattaaaaaaaataatttatttttcgtagtaataattatatatgtaataaaatatttaaatttatttttataattaaaattatttaaaattttacaaaaaaaatttacaagtgttgcaaatgattaaaatttatataatcattaagaaaaattagactaaaatagtgttccaatggtgtataattaatatagacctaccccataattaattaacatcataattttgtttagcgttggtttcttttaaggtaataaataaattttagtttaacaacatgaataactctgtttagttacaatatttatatataattaagtaaaaaaagttaaaagggtttgatttatttccgaaaatggaaatagaaaagacaacaagttaaaatagaatcatctttcttttttttttttattatcttttttttcttaattacgaagacataaaattaaacaaaaataacagaaattaaatccaaaatttgtaaagagtacagtgaacagtactttaatgtgtcagaatctgtagaagaaaaaaaatgacagagcactcggttggcaacggtcatggaaggtgaggttcacgcgttatgaaaagcgcgtggaaagttaagggcattgcagtggatccatccatcgatctgaccgagcttctcttttttttttttttttattattttattgtaactgatttcgaatatgtgacctgaccaagcccctcgactcgaccaacccacattttaagactttgcaatttattgctatggagaataaaaatagg

SEQ ID NO: 70270 - DNA, 3353 bp, Cannabis sativa
ggtatagagtgtaatttcctcctctaattatgccggtcctgagggtgtttggattctagaaaaataaaaatattattgatcctttattctaaagatacgtggtatttttaaaaattattaaaaaaattatttatttctaaaaatgaattttgttttgtttttcgaacttatcgtctggtacttaaatttatatatttttgttcgtgcggtaccaattcgcaatattttttttgttatagcataatgctcttgtgtgtctcctgtcaaaaaaaaaccattccatatttacagcacattcattgagcttgatgtagctttatgacccaaaaattagtcaaaagaatttaagaattgcgtattgggcggtgaatatttattgattcagtttctaatttctttgcttttcgtgctctattaatctcttttcaaagtttttgctttctaaattaatacagcttttgactagcgtaatctatacagccttcagtcttgagtcttgacacacacattttcgttgggtttaggatttattttgtcaaatttatttgtttcattaactgtgcttggaaaaattcatttgtttcattaactgtgtttggaaaaaaaaaaaaccaaataaattatgttatagttttctcaaattacttgaaaagattagtctagtctaatataattgaaatacacaatgttgaccaccatctttcgagtcctatttttcttatcaactttattcaaaaaaaacaaaattatcagttaccaacttaccacttgcatcttcattttcaatagttataaatatgatcgttttgttctataaattcgtaaaaaaaaagtactatcgactaaaattttgtaaacaataaacttaaagaacagaaaaaatggattttctcataattggagaaatagaaactataattcaaagttcttaaaaaaaacatcttaacactataatttacaaaatagggtctcttttgtaattgtttgtaattacataacatattcaaaacattttgcattacttgatatttttcatttttaatttgatttatttttcttttttaattttaggaatttgaggcatgaaattttgaactcaaaacttttcaaaatgattgagaaaagtattgtaagcaccaaattttacataatatatctagttgtgtaaataagcatatgaaattataaatagacaacaattaaattttgtatagtacatataaacaaaaagaaaaaaagataaaaattaaataatatatatttcatttaatatttaacatagatagtagtaagttgcttaaaactttaaaaactctattaaaaaaatataaggactactactagcacttctgtacaataatgatgaagggcataaaaatgttgtgacatatgaataaatgaggcattaagaatcagcaatacccactgtcatatattctattttaatttctatgttgattacatttataattaaaagggaccaatttttataaataattacatttttttatccattgggaaagattgtgaggttggcaatggcagtacagattgaaatatttatggaaacgtggaagacagaaaccaaaagggatggaattacttggacttaatataaaatatgaatcaaatgatgataagatgagttgttgtataatatattttcataattatttggattccttttcaataaaaatatgcttcatttgagttgccatgctcatacacaaatttatttattaagtttattcaaccacatcacagctatggttgcttggcatttcatagagtaatattttacacagctcattctatgtctctttaaattattataatctttaaatcttaatatcaaaatttataaaattacaattcatttcctgtttttattttaatgtgatatgatgtgatactgatttttaaaataaaggtcaaattagttgaagaattatataatttgtgagaatacaattaattttgtggttgtttatattgtcacaaacaggtcaataaactctacatgacatcaaaataaggtctcaaatagaagtggataataaaacgctagcattattattatttttaaataattgattagtataaaatattatattttatgttattacacatatatggtaattataatctattttaaaatataaaacatatatatggatattaactaacaattacatatgtgatgattctaatagtgttgtacactctttaatgaaattgatcattatgtttgaaagtctggttatcctgattgtattacttcttttttatagataaaattattttaattaatgataaaatcaggcactctttttcctcttgcggattttctcatgataaggacattttgttctctaagaaaaataaataattatatataaattcttattttatgttgggtaaatatcattttgaactctatgttttgtaaaagttactgattagaacttttattttggtaaatgataaattaaactttgtatttttcaaaatagtactaaatgtcaaaataaaacttaataataacttgatctaaatgtgttatgacaaaactggttacgtaaactgtatctacttgtgttaggaaaattatctttaagttggttatattaaaaaaaaaatatcaaaaattgagctattaagatacacggtacattttgaaaatacacactacattttgtcctttaataaaacagatgatccaattaataatttttgcaaaatacataatataaaatggtatttacaccaaattctcatgagtagccatgaaaatcaaaaaatgtaattaaaaccccttagggccagtttggcacatctgtgatgtaggaaaaaataattgtagcagaactatgaaaaaaacttaagttcagtatttgataaattataaattttaaagtgttgcgatttattaagattctattataataatgatcatattttaatcttattcattataatcaaaaatatatatataaaaaaatatcttatataaaaattttattttttatatattttaattgttttttctatagtagaaatttatatggatttgataaaataatttttaatatttttaaattatatttttatcatttgtaaaaaaaaaatgtagtttataagaaaggttgatattgtttgttaataataaaaatataaatataaaatattttataaaacaaaataaaaaaattgtagtttataagaaatttaggttaatattttttaaaaaaagtaaagttgtagtacttttagtttttagttgtagttttttcataactttttcaataagttgttttttagctgctctacgcttactttaagtttttcaaaaa

SEQ ID NO: 70271 - DNA, 1834 bp, Cannabis sativa
attggtgccagtctcgggagctagtggtggtggccttggaggacgcgttgaagagctagttccgaggcctcctcctagcgcctggggtgcagaaataatcttagctccaattctatcaactggcgtgcccctagttgtttggccaactgttggagtttttctgtcaacccttgtacaaatttttgaagccatcttgattaatgactttcttgagctgtgaatctcaatgaaagcatcaaaatgttgactcaacaatctatactagacctctaagccacccccgctcgctagattggtgagattgaaatgtttgttaagtaattaatgagagacacatcaatttatagtagttcacccctatatcgcgatagtaatgaagctacatctacctcaagtttctatttctcacgagatgataattacagcaagtgtttaagtatctgaagctttgaattctagagagagaagctctaaccttatgggtagttttctaaatgtgaaaaatcagctaagggagctctcctttataggtgaaggaagcccataaaaataccagaaaacaaacaaataaagtgttttccatcattgatgatgatctaatggtaaaaattagcttctcgtggtgatggctaatttttgatgcccaccgggttccctatgatttacccagagcttattttcgtaactctcttggggtgaattttgatgatgatgacttcaaaattttgactggagtttgagaaatgagttgatagtgcttaaatatcttcaaaagcaatttgtatcgcatcaatgagataaaaaattgagcgagttatggttgttttaattaaggtagttcaagtcccaacacccaagttgacatccaacgcccaggttgacatccagtgcctacattcacattctagcgcccaagttgacatttgacatcaacctagatgctttcaagtgtagagacatccaagggaagtcctttgatattccttagtgatggtttgacacccttagtccttttataggttctggcaaagttggtcaccaattttcggagatgttgctattttattgaaatggaagacacaaaactcttcattaccgagagccaaatttgaaggtgcaaatttgattgatctaacttaatggatcattgcacttgtgaaaaacttgacgggcaatcgaaacggcataagattcggataagcagaacccaacgaactaggccatttgttgagctaggctttgaggcctttaaactgagcttttgatattctatttttgatacttccaaggcatctaaacttgaagagggtcttcttgcccattttttaccatgatgaattcaatgatcgcattcgatttagagtttgagtaattgatgcagtgtcctaggttgattgttaacatgggcactagccctgtttccaaggactcgagtttgtggttttctccttaagtttacttgaatctttgttattttttatgacactgaaatttctttgagaactttttgttgaactgaattggaaacaacccaagttgacaaaatgtaaacatgggcgcagggcccagctcccagtgtcaacctgggcactaggttcctcttctgcccctttgaatgttttgttgagtccccaaaaatagttgattcttaatattttatgaagatagaaatgagaaatgatgctcgatgctcgaagctcgaaatcgaaagaatagaattcctgaaaaactccattttttgtggcctaggttagaaaattgtcaacctgggcgcttggccctattatttatgcccagaatttgttatttttcctttggaaggacctatttccca

SEQ ID NO: 70272 - DNA, 1126 bp, Cannabis sativa
tccttagttaaagctgaggttgaggttaggtaccttcttaaatttgtcggttaacaaacaaaagagtaagaatatttataatgtattagcattaaaccccaaaattgatttgacagcaacgttgttgttggttcatattttttttttttagaaaaagcgtttatattataaattcaaatagttatacctcgtggtcgttacacaatatattattaggtaaaaccgaaatcgggatagacttaaacacttgatgagcaaacacccatttaactacattatgagcgacaaagttacaagttctacttatataagtaaaattacaatatattgttacgatgtcgttggttcacataaataaatatgctattggattttggaagtaataaatacgatctgataatgaataaatgatgattgatgagtccactatcttcatgacccacctacactacactaacactactcagtgcatttcatctcatgggtcggtgtatttttattttatttttgaccctcaattaaaacattcataaaataaagctaataataacaaaattatagtttttttaatgttaaacgatgcgtataatagcataagtttagcttatttaatagaatgttatttttattattttttttttgaactcaattattttttctttatattttaaagaatgagctataataactcaaatttaattacttatttgatgaaaaatttaactcctttgataggaatgctcaccatccatgatgtcagccattggaatatgtaaaatttgtgatacatttttttttttttaaaaaagaatactatatttagcaccttcttttataattgtgataaaaaaaattaacttcaagaaatctacaaaatagagtcattaaattttattaattttattttgaatggaaactttttattaattaaaaaattatatataaagttattttttaactttatatatataaagttatttaaataactaaataaaaggtaaaaaaaaattaattataaaatacattaattgataacaaataattaaataattaaaccgaaaacaaataattaaataaaaaatgtgaaatatattgtgtaaatttgttctgcatactagttttcaag

SEQ ID NO: 70273 - DNA, 1629 bp, Cannabis sativa
aattgtttggtatataagaaactaggaagttatatattaattatagtaaaatgtaattgatttgaagggtatttatgtaattttctcatctttattttttaacacctagcttcagttagctaatttgtacataattaattattatgtttatgtattactattactattagtattacttggtgatgaaatagagagcagacattatgattcagtggaattaatcaaacatgtgcctccatacattgttgttgacttgattgttacttgatcacttacctaagaatgtcaataattaaatcaaggaggccaaaacatctaaacattataaaaatatggcctacattaaacttaaaaagggcccagttattcaaattatcatggaatgggctcggctcagcccaaatcagcttgaaaatttgacattgggcttttcagcttttatcaacttggaccatttaatcatttatgggccatataaatgaaaatatcatttttcttttgcgataattagattaagtctatttttttttttacatttttatttttacttttacgatgcaaataacatcacaacaacaaaaaaataatatatacataacaaaaaacaacaaaagtacatcataaaaatataaaaaaccgtattttctataaataaaattataaaaatttgtatgtatttttataattattttattgtttttgtgtagcggtttcttcataatgcaatattatcctattatattattacaaatgttttttaatacaaaattgcaatagaagaaaaactatatttttgtttaataaaaataaaactttaatgttttggctgtaaatttgattattatggtgatagttagtttgtactaagtttgatcatatatatcaattatcatcatccacagtccacacaactcacaacatagacaagtatgaatgaatgaatgaatgtatatgaaatatgcaattccttactttatattatcattattttgtttttggatgaaattgagattgtaattaaacacatttcattttgaaacagtaacaaacaacattattaaatcaaccatagtaagatacatgggctgcatttccaagattatatttatatttgtttttaagtgaaaagaaaaaaaatagtaaagaaaaaaagagtgggtatgaagtgcatggggagatgtataattaaagaaattaaaatatgaagtttaaattgaattgaatatggaaatgacagacttacttgccttataataataacattttattgttttattatttaaaaattgaggatattatgtaactattatataaaagtaaatatacatatatacacacatccatcgtatttgtccctaatttaaaggtattttaatttattagtaattaatttttttatggtagtaattacattgtagaaatcattttatatattattttttattttttttttctatttttcaaaatttttatttttaaattatttaatgaattataatttaaattgaattgtgatttaagttattccgtaaattaaattgtatattacatgaaaatatataaaaaaaaaacttttttaatgtataaataaaaaaatcactttgctattttattatatgccgatatgca

SEQ ID NO: 70274 - DNA, 1395 bp, Cannabis sativa
ctaccactaatgagcaagactccctgccactaactgtatatccattttgtgatttgaaatataaaaaactaaatgaatggagttaaagctaccagctttgaacaggttgatgaagcaactgacctgattgaatcgtctggtgaagacggaagagaaggtttactagcttggaagaaatacgtattttttgggtttcgattaggtcccgtttgaggctaagagataagccacgcggtgttttgttgcccggagtttggcaaatcctaatttttaacagtctaatataaacttccaaagtcttaagactacgaggttccaaaaataatatcaacacaaattttcctttttttcctctttctataattaagaaaaaagtaaaaataaaaaaaaaaaaaaaaaaaaaagttatgcataaattgaaatcaggaatagtatttttttttttcaaaataataacagtaataataataataatagaaaatatataattaaaagcaattttttctatcaatggtgaataattttattcaataattttaaactattacaatgtctactacggaagtagtagcattaagctcattgaaggtacaatctaacataaaacaaaatcttctggcaacacagtaagcggtcttatttgcatatcgtttaacaaaatatagagaaatatgatttagagaagagagcaataaacgacaatcttgaactaaaagactaaacagaaatggcatagaaatcgtactattgaccgcctgaaccactagtaaagaatctgatacaaagtatacagaaaaggaaattgatgaagtgaaagagtattaagcaagtggagatgttatcggttattaaaacttaccgacattagttttttttttaatagaccggcattagttgttagttggaatttatatatagttttatagttattttttattgatgttacttatgtttcttattaatgaacaatataatatttgttagttttgttaatgtttaaaaagtattttgaattattttctttagtaatatatatgagatatatattaattatgaattttatatttaattaattaaaattattattgttatatttaatagtattaatatataatatattaaattattattataatatataaaatctgaattaaaagaattatatattattattttttttaaaaaaaaaaactaatataatgatctttttgtggattactaaatctataaaataataataaagaattataaaataacaaaaaaaaaaagataaagtgacgctttttgtgtgttgttgttacttagtaagtgagtgtgttagaattttgggataagataaatgaggttctatctcaaaaccaattggcaataggaggagtagcccattcctcttat

SEQ ID NO: 70275 - DNA, 846 bp, Cannabis sativa
ttttcactaagacagtcctagaaattgaaactttagttaggatgtcaacttaggcgcttgctgaaaccctaggagcccaagttgacttctgggatgaaggttcatgtaatttcagctccctaggcctgaatttgattactccatatcttcatggcacataatactaaaagatagtgagttggaaacaaattatcaaagtctgaacttccattctggagttcccaaaggcacactactacaatatgggcctttagagctattttttcaacccaatttataaaaagggaagctaaagggtgtgataatacccgcctagtttgaaattaacattttgaggcaattttttgataaaaaccgtaggtataaaaattgataatacctatgtcgtcggttgggggttgaaaagtttttagcataattaattacacctatgtcattggttattagggaaccgatgctataggtgcacactttattgacacgtgtgcagctatggcgtcggttgtttcctaataaccgacaccatagagtgtatatatattagacttggtcttattcactttgaattcttcttcttcatcacacaataaccaggccccatagcaaaacccacacccacgaccaaaaccctcaccaaccacctttaaaaaaccatcaatctccctcatttctacactattttaccctatttttattttaaaatcttctttttttaatacgtaaaactatactgtaaaaagttggtttttttctcctctatcactataactgaacccattaaaaaaaggtagtcgtataactctggccaccgattttggtagagaaaacgttgaatctcaacgtcca

SEQ ID NO: 70276 - DNA, 1567 bp, Cannabis sativa
ttcttgccatagccatagccattggctataataactatattcataatgtttctcacctttttcaacttgtgattggcttaagattatgaaaaaaaaggaagaaagattttatctcatcacttctttttatatttttatatatagcagttgaaaattttatccatcacagtgataaatgtttcacttttgagaagcttattttaaaatagtcaatggctttgtgaaggttttgagagaaagagacggcattcctgatcttcgtcgagcagctcgttatcgctatgctagtgtcactcttcctgaggttggtttacatgctttattgttgttttttatagaatggttgatctagcttaataattttctagtcctagacttctttacacagcttagttattattcttaaatctttgaaatgttttagattgatggatcaatgatgaagttgttcaagaatggaagagaccttgaagactccttgactgctgctgttattaaaaacttgaagattgtccaggtgaggatttaggagcttaacaattttcgttgctcggttttcttttctttcttatttttggaacttgatgtataatggttgttgctgttttcaactatttgtaggacagatccaaggttgtagttctggatgctgatggttctcgttctaaaggaattgcaagatccttgagaaaacttggggttaaggtttgtgttcctaacttgaatttaaggtgttctcgaatacttctccatatggcttgttaaactatggtttgagtcctcatgaatcatattgctagttaaaagtttcaattcaaaattgcccacaaagtgataagatcatttcttttttaatagaaccatatgcaattgcagaaatcaacatgaaagtactaatttttatattgcggtgtcatacatggcagcaaccttacttggttcaaggtgggttccagtcttgggtgaaacaaggtctgcggtttaaggaactcaagcctgagtcaacacttaccatactcaatgaggttttttactttgtagtttgtacatttggcgcttggcttaatcttatatagtgttatcgcttcataatcacgtgaaacctgttatattttaggaagccgaggcaattctagaagctattaatccgtctccagtacaagctcttggatatggtgtggtaagatacatttcattattttggttttcactgcaatctttctgctaacacaagagacatctgcagggtttggctgcagcactgtatggtctattaggtatgtatacatgatctcatatctatttagttcaagttttgaggatctatctgtgaggtttttaggtgttacctctcttttctgactgagaatggtattatatttgttacagagtgggaaaagacgctacaattcattggcgtccttggcattggtcaggtacactatatactgtcacagtccctttctacttctaattactttcgatttcgatttttaacctttgtgcattattttcattccaccagaccatttatcgtcgggtggcttcttatgagggtgctgaagat

SEQ ID NO: 70277 - DNA, 1070 bp, Cannabis sativa
ttaatagttttgctggcattggtgtttgtaattgattattgtttgaggaatataatttttctgatttaccacacaaaacaattgtaataaattatttaaaaatagataataaacttttattttataataaaaaatattacatcattaatactttttaaaatattgttataataaacataatacattaaaaattataatataaacataattataataattaaatattgatattaattaatataaacaaaattttgttagtatacaattttattcatttgtttaaattatatcgtttttttcttgaattttttaagtattatatattaatacattattatgaatgctaaattaataaacaaaaatataaaaaaaaaaaatgaaacaagggactcttatatttaatgaagcaacttttttataattaatgactacatgtttacttcacttaattgattacaaaatatatgagatatattatagataaaaagatatatttatggtgaattatgtaattattaaataatttgaatttttttttgtaaatatatttttaaataaaaacccatcaaattatatgtgagtacgtacatttcaaacaaaaaataataacaataaccagaattaaattatagttaaataatgcttcagttgggcagcggagtgatacataatttgcttcaaatgggattggaaagtagtgaggatcggtctggccatgttaaaccaataatatatcatatctataattaacttatattcattcatggttctaattgcttgtgatttcccataccatatgctttaatcagaaaacaatgattaaaagttgtaaaggtaacacttcaattacttggacttggtggaacatatatattcaagcccagtaacagaagataattaatgtaagatatatatttcttcatatatatatttggaataaaatcaaattgtatttcttaaagattaatgtatagacgagtcgtaccatttgctaaaagtgttattattttgtgtagtcttggttcccaagtgatgccaatttcagtcgaacgcaacataacttttaaaac

SEQ ID NO: 70278 - DNA, 1082 bp, Cannabis sativa
  modified_base (983)..(1006): a, c, t, g, unknown or other
tgactatcgaccaattctcttattctctgtaaatgcataataagttcataaaaattcatgtataattgaatgagatggatttatttatatgtatttattcaacattagatttgaaattcaaacaattaccttttggtacagcagcgcctttgaagcagcttgcatagtcagataaaatttacaatcttcttcgttaacaattcaattttcttaacctctttattgggggacttctatttggattttttaactttttccaaagactctgtctataaacaaaaaaaaaaaaaaaacaaacaaacaacaatacaaatattttatacctttgaatagttcaatggcaaatacatttacgaacacaaaccagataataatacatttatatttgaaaaggacaatacaaaccagaaaataatacaaatattttattctatttacaaacagttccaatacctctaaaaaaaggcaaatacctctaaagtatctttacaaccagagcacagacgatttctagatcgtcgcctttgtcatcatcgaaaccccatatgggtcatatcgtcgtttgtgtatacctttgaaatctagttatcaaaatcccaaatcgtcatcttcctctgtcaactaaattgcattcattaatagatattgagattgtttcaattttaatcggtagatattaggagtgaaaatttcaatcgtatatttttttttccttccctcctcaatcactgcaattgggattgaacatttcaatcgtagaaatttttttcttcctccctcaatagctgaaatcagaattgaatatctaccagtgaagaaattggatttgttttttcaaaatttcaatcgagtggaggaatatttcaatcgtagaaatttttctcaatcgagtggaggaatttttcaatcgtagaaatattatttttgaatagaaaactttaaaaaaaaattaatattcttgttagggagatatgtggctaacnnnnnnnnnnnnnnnnnnnnnnnnattattaatatttaaaagattatttaattttttaggtttaattattgggtttatttattaacgggagatcaaacct

SEQ ID NO: 70279 - DNA, 2160 bp, Cannabis sativa
ctattttacttaattctctccatgggtgatctatataataaattgaatgcgagtagcattaaattacaatataaagggaaaaaataattgaaaattaatgtgattggtggattgtatggttgtgatatttttgagcccatgacatactataaaattatattaactttccatatctagttagagatcacccatcaattgctatacatttatccaaaatggccacacctacatttaaaataataatcaataacattggctaaatcaatggtctcatctatttctttcattcatattcaattcaaattttgataagtttttattatttttattattatcggagtaaggttagtcacaatcataaatcagattattatagaaacatacaaattgaacacaaattttatacaaaataacataaattcaattttaataatacataattttaagtaagatcgcattacttttttttttttttaatgaaaatgtggcattttattaaagtaaagattcaatcaatgcaatgtctaacaactccgaaagacagttgttagaatggaattcaccaagatcgcattactttatagttatcattccgtattgatacactagatcaaaaatcgtgattatgattacagagtcgtataaaacttgccacagtacacagtataaaacttatacagtattttttaaaaaaaattcgtcccatagtaaaaaagtaaaaaaaattaaaattttcaatatgtagtataaaaaccccaatggacaactattttagttagggcttcttcaacgataaatgctagtgtgggtgctgcaaaatgggcctatgtattcttaaatgattgatttttcaaagctcaacaatagtatccttgcttaggagcatactcttactcattattttattattttttctcttctttgcttttaattggctaattgaatttttttttagtatataaaataaaaaggtaagcccaagcatagttgctgcattaaacttgccctaagtgtaacaataataacagaaagagagagaggagaaaaacagagtgaaagagagattgaaaagaattgattgtgttatttattaaaatgttgattacaaagaaagaggtatatatacaagaagcataacagcagtaaccaatatgtaacaatagaaataacacctaactagcagttggataactaacaaattgttagtattcttgatagtccccttcaaactgagtgtagctttggaaactacacacagtttgtctctaaaatcattaaatattcgagagctggagatgggtttcgtcaagcagtcaacaagctgagcagatgcatgaacatgcttcacatgaatttgatgttgcagtaccttgtctcgaacaaaatacaagttaattttaatatgctttgtgcgagcatgcattactgcaagaagaacactactttagttgtcacaccagatggaaggaataataggttgaggaatgccaagttttgtaagaagatactgaagccatgatatttcaaacacaacatttgtcaagcttctgaattcaacttatctggaggatctgctaatagtaacctgcttttgagacttccaggcaacatgatttcctccaaaatagatgtaatatcctgatgtgaatctcttgtcatcaggattcgaggcccaatcaacatcacaaaaagcttcaagtgagtaatctggtgctagttgtatatgtgtaagccatagtccaatgtaccagtaatgtatttgagtatgcatttccgatattggttgttgaactcttcattgttgaacgaattcaagctctgatactatgtaacgataataacagaaagagagagaggagataaatagagtgaaagagagattgaaaaaaattgattgcattattccttaaaatgttgattacaaaaaaaggagtatatatacaagaagcatacacagcaataaccaacatgtaaccgtaaaaataacacttaactaacagttggataatgataattaactaagtgttagtatccttgatactaaaatgctttatatatcttaaaatattttttttttttttgactcttcaacttcagtttcacttcccttgacaagccattttgatggcaacctctatcggacttgtagtgtatttttgc

SEQ ID NO: 70280 - DNA, 948 bp, Cannabis sativa
aaaaaaaaaaaaattcattgtaaagcatatagtttgtgcttgtggtgtatctacattctaatagttatttttctcaaaacaaatataaaactttcattaatttgttaaattaaagaaaaaatgtaccttaataagaacatctcttctattaaacactcgattttgaaaagagtaagatgctttaacaaaattatgagcaaccatattagcagagcgcttaataaaaaataaagaaacattatttaaaaatgctaaaagtttactacaatcttctatattaaccccaaaagaataaaatataggtaatgaattttgaatagcttggattgctactaagcaatctgactccagatccacttcccgctatggttgagttttaaatcagcttagcacttatgttatactaaatgcttcagccaaatccagagcgcatatagctgcaaaactgtctgacttaatcatcactaattcaccttgagagtctcgagcgactatgccaaaccaaacgctgctcgatcacgaaaaatagtggcatcaacaattatcttgattctaatctcctgtggcttaactcaaaattttgctccatcactagcttgaaaaactgaaaaagaagcttctgcacctctattttgggctgactttcattccacaagacaactcatagatgaaataataacaccatccactgtagcatacttttagttccaaacgaactcatttcgaaccttccataatcccaacacaacacaacaactttctcacacttgtccttattgcacctttgtaaaaattgatcaaaccaactgctaaaattagcagcaacaattggcctaactccagccaaaagcctttgctaacattgagcagcaagtaaacaaaaaaataagcgcatggaaaatagtttcctcacctttttgacaaatgggacacataatttaagttggg

SEQ ID NO: 70281 - DNA, 1205 bp, Cannabis sativa
tctaagatcatggtaaaataaattccaacacccagagccatctctccaataaaagagaaccggttcaagggcggccctgaaggacctaagggaaaaactcaatcagaaaatgactgtcgaaaagaaagtgtcgtcatcaacgatccaccaccacaaagaaggcccaagacgtaccgcaggaccttcgaaacaagttgaataataagaggcaatggcttgacaaggagatggaagattttcgcagaaggatagcctcagccgcctcagaggaggaaagttaggatgaagaagattttgacgatgaatctccttttttcagagaaatccaatccgaatagttaccccctaatttgaaagagccaaacatatcgccctatgaagggatcactgattcgaagtaccacttggacgctttcaacgagattatgaaaatgaaaagagtcatgagtagagcgaggtgccaatgcttcacggcgacactccaaggcacagcctacaagtggtataagagattggctcctggatctataacttcatggaaatagttcacggatgagttcttgtcctaacatcatgcttcccgagattatgtcgtcctgaggaaaagtctggcgaatatcaaacaaggagaaactgaaagcttaaaaagctacatccatcgcttcaacgccgaagcagctaaagtggggagactctctaaggatgagcacaaaatagttatcgccgccggagttagaccaagaagcaagttgtggaacaacatgctcaagagagagctggatgaccttgaggacttctatgagagggccaataggtatatcttggtggaggatggacatgaaaatttgggagttgggaaagacgaacaacctggaaagacccgagctgaggggtcacacaaaaagtggggattcatgtataaggatgactgacaagacaagaaagacaagagggagttagatccactacctcgagaatacacccactacacagaactaacccgctcaagagaacatatctacctcaccaatgagcatcaagttcccttcaagagactaccgcccttgaagaaggaaagaactaggagagaccccaacaagtactgctgcttccacaaagacgtgggacacctcacagaagagtgcaaataccttaaggtcgaaattgaaggactgatacaacgtgggtatctaggagagtactgg

SEQ ID NO: 70282 - DNA, 1185 bp, Cannabis sativa
  modified_base (515)..(515): a, c, t, g, unknown or other
aacttaatctaaaattaatactaaaaataacctaacaattgttaatgcgattttttgtcaacttaatctaataaatttaaaaaataaagagataaaataataaataaatacaaaatatttttacgtgattttatagttaaatttacatagttcacgagttaatattatttttgagttttgaagcatgtattcattgatagagagagatcctttttgatattcttcaattggttagtaaactgatcgattttagctgaagtttgagttgagaaataaatctcgagtgtattccatatctgagtagaagtgtcactaccaacaacacgagtgagcacactttcagtcatggaggagagtaaccaggagtaaaacaactgatcatgttgctcccattaaagatacacatgattgactcgattcaaaaattgatcttgttcagaaagaaacttcatcagaggaggtttgtcagagatgtaatcgaagagtcgatgacctttaatggcagacaacacctnaggatgccataacaggaaattgttattgtcaagcttgacaaaaagcttgtgattgaaaacaacaagatgaaattgaggaggattagtagtggacgccatatatgaaacaagaagaagccaaatgagatgcagaagcaaaaagaaaactcaagaacaattgaaaaaaattgttactttgataccattgagatttaagaatggaaatatggaaaagattctcttcatagaaatgaatgagcaaagctcaatatacaagggagagactgaatacaattaaagataattagttacatctgtcaaataaagtgtacataactaactcaagtaacaacctaactaactatacattaactattaacaattagtgattaatgtccatgattcacgtacaattatacatttggataattttaaataattgtttatatttaaattacaaagaagtggactttgacttgattagaccgtgttgtttgtgagtagatgcacaactgagtgtgtaatacaaggagatacatggttgagtgtgtaatacgtggagatgcataggtgagtgtacattatgaggagatgtatagctgagtgtgtaatacaaggaaatgtattgctgaatgtataatacgaggagatacattgttgagtatgtaatatgaggagatacattgttgag

SEQ ID NO: 70283 - DNA, 912 bp, Cannabis sativa
gacgaaaataaagctaaaaatgtaaaagaaattgcttttcattttgcgtctgttaatagtactcgactattgtattagcgaggttttaaaaacgacgcaaaatacattagagatagcaacagatttgcaactacattaaaatccctaaaatctaatcagattttcacctactgttcatacacaaccagccctaaaaatgttcgaatgctctggcaaaaccacccctccactccttcgaactcggccactgctctccgaaaccagcctctcgatcgtcctctctgaaaccagcctttcgacccttctgaccgtcttcttcaaaaccggccactcgaacccctttctctttcgatcgtcatcttcctcacggtggtggttgaagctctctgctctgacgtaatggtggtggtttgaagctctctgcttcgatgtagctctcattcagtccgccgtcggcgtctcttcaacggtactctgttggttttgccctttatttatatttccaatttatgatacactgcaatcatatatgtttttgagttttcaattttaagttttcgttttgttttgaaatagttttattattatgaccatctgagtgctttgaagccgcaacagttaaacttcaacaccggatagtcaaatcttttcttttcacctagatcttgttatagatctggattctctgtgtcaagagtaaagaaaagctaggcttttgttggcttttttgccctattatttgtaaccaaatgttcccaattcccatttatagagaaaatattagaatatagattcctaaaagaactaacctttttttattattattcttttttttttagcagaatactcaaaagttttaggaataatagtatagctgagatttttgcgtactgcccctttttccaggtgtgt

SEQ ID NO: 70284 - DNA, 1504 bp, Cannabis sativa
ttacttccaattacacagttacagtgtaattacatggtcagacaaacatgccaaattgtgtaattaccttcaattacacacaaatccaattacaacgtggctttccaaatccaattacatagattttataattttgccattgataacatggttaaatgagtttttgctcagaatttaactagtataattatggaggtattaacaatgtcaatgaacattacatgtaaggactaggaggtctaaatttatttattatctatagacgctacttttaaaaaaaatactctatgcactataactttgtttttaggaatgtaactatcggagtacttatgttgtaagtatccaaagttctgaaattgttattggtataaatttaataattttttagcaatataaatactcaatattaatataattgtagttttcgtcaagttttatcactacagactcagttagtttcaaagtagaacacatgtaaaactcaaaacctaaatcattaaatctagaaaaaaaaatgtaaagtatcacctatgtacataaacttttgctttcaaagaatataattatcacataattatctataataaaaattaaatatacatttttaacataaaaattgtgggcaataaatttacctatacacataaacttttgctttcaaagaatttaactatcacataattatgtgtatataaataagaatattaacgttatgagtatctattgagtttaaaaagggcataaagttaataaaaaattttgcgacataagtatctaatgttacataaaataaattttcgtcaagttttgtcattacatcttctgttagagtcttaaacgggacacatgtaaagcttaaattttaagtctttaagtatgaacaaaaacatataatatcagttaattacatccggattttctttcaataaattcaaatcactaactataataacaaattcaagacactaacaaaattcataaggatgaaaataaataaaaattataatttactataatgcttacatatattgactctataccacttatagaaacttaaaactttattatatcgtaaataaattgaactttttgtaatgaaaaaccatgtataggattaagatttattttataatcttgaaatgatataaacaaaataagaatatatcattgtatacttttacaattgcacttctaaaaggggtttataatgcacccttatttattttggtattgaagagaaatttttagtttaattttttttatggtcgtctacgttgtagttatatatatttaagtcatcctgtaaaattttgagaaattcaaaaaaattaacacgccgaaaacagggttcaacgagtctgttgcactcgagactcttttattttctacgcttgtaaaatagactgtttgaaccctattttcagcgtatcaaattttttttaaattttttaaaattttacgtgatgttctaaataattacaacacatagatgactagaaaa

SEQ ID NO: 70285 - DNA, 966 bp, Cannabis sativa
tttatcaaattttatttgaatttccaattattaatttgttctgtaattttataaataaataagtgttgaaaataaaaggagaaaagagtcaaaatatagatatgttctctaattgtaaatcatgtttcagactataatatgtacacttattcaataaatttaaactttgctattgcaatacatcatttaaaaaattcatctcttattaatcttacaatacaatactatattttatattacatctcagtacaaagattatattttattcatagatataaaaatttatagctctgaaacgataattttcttagagtttgatctaatgagttacttaaataattgagcactcatttttataattaattttacaaaaatattatttataaggagccaaatattttaagaatacgagtaaaacagtaaactatatccaactttgtagattatgtagtgattgaatgacaataatagttgtaataatggataatactttgaccttgtgtgtaaaaggttaaaatttcgcattcctcacctgaccccctagcggaatggatgtactctttgcttcttccatgttgaacttctgaataactttcttgatgtacctgagctgctttaagctaatagtcccttccttccggttctgtgtaactttggtaccaagtatcttttgaactggtccaagctctttcatctaaaattcttttttgagttgtgctttgatacttttgatcatagatttatctttgctcatgatgagtatatcatccacatggagcaataagaacacgactatagattgctcaaaattcttaaaatataagcaatgatcgtacgtagattgttcgaacccaatttgttgcatataagtattaaaacatttattccgttgccttggggactatttcaaaccatataaacatctatcaagtgtccacactagttctgtaacgccctaaataatta

SEQ ID NO: 70286 - DNA, 1184 bp, Cannabis sativa
ataagtcacaattcatcaactcatcacaggctgttgttgacaactgttgagctgaacttatattcttgaagagtgacagtttatatattatatatatatatatataactcaaaaccgtttttggtttatatcctagtacttattattctagtgaaaaagagtttgtacttcaattgaagaaggaagccaaaaacgaagaggtgcgcctgttagaccccatgattaattactagggtttgttaagagtctagatatataggaggagaatgttgaagactaaacttatctcttgttcactaaaagtgtaacaagagataagtttaggcagtgcttaaactttctgaatcccgaagcacaggtatgttctctggcttgcggttttagacatattgagattgaaagagagactatacagatttaacatgtaaccagatgagagttgtccaatgtgtggaacaagtaaagaaaatagggaacatgttttctttggtgggattggctcgaggcattttctctactccttacccgggataagcatcgtttgcagcaacagtctctaccgtgtccatgtgtggcattgcaggaatgaggccttttggagtttgaaattatatacaatagattcaattgtaaagaaaattcaaattgatgtaaaccatagagttagaggtgtaatgccttgttgtgttctttatgaatataaataatacttactaagtgatttgagcatcattctgttttagaataatagttagtttggatgatcaaatagtgagcataataatggtttttaaatgtgtagcttagtctgttaatatatcaattgctgttatatcactcaaaattggaagattcaagtgatttgaacccaattatcacacttcataaaacaatgattgttgggttaattcaaaacaagtgtaaagaaaatgaaataaatacctataacagctcaccccttgtggtcagagaaagacacaagcttcttcacctcatctctgtagtgtaaacaacatttactaaagtaaaaatcagacagatactatcttctgtttcatcatcatttactgttcaaagtttaatttaaactacaaaaagcatgttttagtacctagaaatttgttcgtgacacatagttttaggataattacataaagtattattttttttaaaaaattatattt

SEQ ID NO: 70287 - DNA, 1788 bp, Cannabis sativa
  modified_base (1724)..(1724): a, c, t, g, unknown or other
gtaaaataatttccaacaggcacatcagcctcagaggtgctattttgctgagtttagtgccttaactaaagtagcaccattccagttcataccccaagtcttccgtattctgtcgagatggtatgtcttttgtgtcaaacacggcaagcctgtgttgactccaaaataggtcttgtacttttaccagatcaaatcacagtcgatgagaggttacaagaatcagatgggcttttccaggttgcaaagatatagtacgagtatcccttgtccactagtcacacgaggcacatgcatgactttaagaattactacttcttcacctttggctttccattaaggagggttcccaccctcaatttagactgtcgtcttgaaagtaagtcttgactccattttgactcaaaaaattctattttccccctatactcattgtattatgattcaccactattttagtgtgctagactgccttcctcaatccaccttgactccaaaattggaagagagaatcaacttttagaaatccttctcgcccaaggagttgcaggtggaggatttggtgaccatggagaatcttcgagaagtgggtctcattgccccacaccaggatataactcatctctccgtgaaggagtcagtccaggaatccttgaagggggacttggaagaagttggagaagccatcgaagtcattactgctaaggaggatttaaaggcggtgaaggccgatgaacaatggctggaggattggagaagacaattcccaaatggcctgagcaaggttgaagagctttccatccgcttcaaggatgtgattcctaatgaaggtgctccgagagcgagcactttcggtagtggtgagatgccttttcatataattagggctcccactgtgtctgacttcaagacggtcaatcaatatagatttgatccatacttcttgaatttagatccacataggtattctttcagtagatatgtagataaggtagattgtattatccaaagtcctgaccacttcatccctcctgtgcaccatcatgttcgagtggatgcatttagcaaaatctatttcccaagattcttctaatacaaaaccaatataggtcaggaagatatcgctctatttgctagggaaaaggtcaattatgctaggattaatggtttggaccctcttgaagtcttccaggcttatgtgttgtaaaattcatgccttttgctacaatttcttttaatggatattttgtgtgtcttattcagatcaatcagccactctccagatggggcttctaaacaagttcttgggtagcatccatgctcgatttgacgagattagggagatcgcctaaagcggtggtgatgatggaaagaaccaggcctccaggagcagatctcttgagccagcacccccggtatcgaatccagaagctgctccaaaggctccaggtatggacgcgacatctactaccatcatggacttgaccgagcccttcttgttagtggaacctctaaaccaagttcccttggagagctctggaggagatagttcttactacaacggacctgtcgtaattaatcaaaagcacaccgattcatctaacggtggcgccaacaaaaaggagagggtggaaaccaaagagaatgtcctacagctggcagcctcgaggaggcaagtagcaaactctcaatcccagaagggaacaactgttgggttttgtgccctnaataaaacccatttcaatataaccagatttacttattaataaagatcagaagatcggaagagcg

SEQ ID NO: 70288 - DNA, 1280 bp, Cannabis sativa
tcgaaataaggtttttctttctttctttcgatcttttttgttttctttgaaataatattgttttgcaaaatttttctttttctttatgatttaatgaatgagtgagtttatgtctttgatttctattgtatatttatttgattttttaaaaattcaaatctcatatgcttgtagatcttctaatacagaagttcataaattaactaagtttattcttaccatggaggcataatatatttctattgaaatatgactatattgctttaataaaattgcctctatcttttttttttatttattattattattaaaaaaaattcttgttgtttaaagggttgttgccctctttcatcaataaagttttcattttattataaataataataataatcacctaaatttgattttgatccaaaaaaaaaaataataaattaatgaagacaaatatataactgccggattattatattttttaattcattttttttatagcaatgaatatatgttctatttaattcattctaaactttttctttcaatgttttttttttttcataatttttacattaatttcagtaagatattttacaatgtttttataattatcttattttcatgactattttaaaaaagaatgaaattttcaattaaaaaaaatctaacaagtttattcatatatttttatttaatggtttttattaatatttaaaaaatatattttttttgaatatgaaaaaaagagaaaactatacatatataaaaatttaatgggttctttataaaaatttaggagtatatattaaaaatggtcgaaaaaaatattaattactatcatttgtaaatgtgatttgtgaaattgacatatttttgtttgtgttaatttggcagaggtcatgtaatgaagtttagttggcaagtttggttttggctctttgtcaatgccttgaatgtgtaagattaatataatatttcttttctaatatatcttcattaattctaattattattatatttataaaggaaatataatcatttattaccttgtttcctctaatgatatatttgatatcttttatttttgataatatttatttagtattttatattttaaaattgtacatatttaatatctttaaatgaaatttaattaatttaattaaattgttttcacattaaatttaaatttagaatttataaaattgaaaacagtttgattgtaatttaacgtatttaatatgtatgcttttaaaatttaaagtaccaaataagtattattaaaa

SEQ ID NO: 70289 - DNA, 1322 bp, Cannabis sativa
  modified_base (1163)..(1163): a, c, t, g, unknown or other
aatcttccgagcaagtttaaagtaccattgctaagctattttcgacaaagtggctgagaatatacaacactgcacatcaccaataatcttttagagatcaagctccatctcaaagtatttgatgtgcgtcagtgggtcttctcgcccagtatacatcttttataccagcatcttaaatttaggcaagggtaaggcatttacgtatgccgagaatggtgatccccttgaccgatctagctaaagatctgaaggttttgaaccaactagccccttgatcatgtcccttagttggtccaattgtgcttgtatcaaaggatttgttgctgtagggatttcactaactagccctccttggagggattgcaggctcaaggtctggccggccatactctgagagagtgtatggtggaggttggccataacagtgttgtgttgtaggccttggctggtcactcttaagtagggatgttggctctggctggccaagcctacactaggtagttgcgcatggctggccagacctacattaggcagggcctggtcgcctataactccctagttggctaatgttgctggtgtgttgataggaggtagatcacaccaattgttggagtttagtggatttagatacctaaagtgatcagtttcacttcttaaattgttactttgggtgtttccacccattttagttctaactggttgaagattggcctttgagtggctctctcccctcagggagagagtgtacttctttggttggccagaggtattccaacaggtgggcgaccgaccaaaggttagttgatggggctgttgttgatcttgagatccttggatggcccccatgttgttgttacagagatctggctattcttgccagtagacctttgtgggaaggcatgtcctccttcgaatagaggaaggtctgtcttggttcctaaagaactgggtttgtcagcttgctaatagtgttgggctttgtgccctaaataaattttatttaaatataatcttttctttcaattatcaataaagaaacagatttaaatttcattacttgtttaatgtgttatttgcttcatgtgatcatcaatgtacttatttgattaaaaaattcatccaaacccttatcacactggtattcttgtttattgtgttgtcancacagtggaaagtaatcaaaattgtgtgattaaatgtattcctagatttatcagtacacagggttgaacaaatatgataatctccaacgtagtttactcaattacttgcaccttggataagtgctatgtcctttccagggcattggttaaagtaagctt

SEQ ID NO: 70290 - DNA, 1983 bp, Cannabis sativa
tggctgacgtgtaacgtcataaatagccatttaaatattataaggtataattgtaaaactttcattttattcgtatatatataaaaaaaaattgtgacgtattattactataaaaaatcttattttttgtcacaataaaatttataattaaaattaaaaaaaattgtgattaattttaaattattatttttatattgtgactaaaaaattcgtgactaaaggtatatattagttacaaaaattataatttattaatcacaagttacaactaaatattatttttagttacaagtaatattttttgtgtggcaaaagtcatatatttagtcacaaaataattatcttgcgactaaaaaattatcactaatagtaataatttgtataatgtataagtaactaacgatttttactatcatttattaaattaaaatatataaaatttaatattaaattaatatactatttttttttataatattctatactttaatatgtcccttaccattttaataatagtgcatgcttaatgaagaatacagtccacgacaaaattgtatgattttttttttctatgaaatagaacaaattatataaagtaattcaactgaataaaataataatgcttctctttttatctttcttctatttaacaaaataatgtttctctatactggcaacaattattaatattggcttatcaatgtcagttaagatgtgaattgatttgacataaagaagaaagtgttcaatttgctcagttttcataatgtatgatacttgactcagctttctgaagaaattggttgtttttatttgtggtccctctaacatatatcacgtgtgtcatctgttattatatatcacaacaatatattgaaacagagttagcaaaaaaagaaaacactataatgcacagtgccatttccacacattattacaagagttagcattggttaaaaatttgtgaaatctcatcttgaatagcagtaataatactagacaataattaagaatttccattagagtgtaaatttataacatatttaaacattgtggtaacatttaacacaaaataatgatgttgtgatattttcttttgttaacaaatatatgatgctaaattggatgtgtaagaaataatcacttttatattattacttactttttctaaataaaaaaaataaataatctatactttttttagtgtagtattttacaattaattaataacttaatagcttaaaaattttaagttcgaattcatgacctcttcctttttccattcctcctttaacattaaactagctttagtggcttataatctactctttcttgatattaatattttctctctgttgtcctcctagcaacacaatataattatataattgagtagatacattcctacagagaccattaatgttgatagagtttggtttttttttttcattttaacaacttgtttgttggtttgtttgaatgcttgtttcttacaagtattgtttgagtagggggctcccttctgctttgtacatttttagtattaataaattttctaaataattataaaaaaattaataaatgaacaatttttcttttatcttttaattttacttcattaatttatattaatatgtattgagtgagagatgtaaatatatgtttactgagttcagtacacctatggaggggaaaggtcatctacttttctcctctctgtgtcctctagttcgagttggtagctcctgcctctttcctttaactagtgtcctcttcgtttctcccgtggtaacaccattttatttgctttgcctttttctctcttcctttggtgttaggttgtgttgacttctttgttgtctttggtccctcgtgctcttattcttttgtccgctggtgcccacctattggtgtgtgttgtctgtggtccgtgactttgttttcattttctttagtgtttggttttgttgacttgggtggtgt

SEQ ID NO: 70291 - DNA, 923 bp, Cannabis sativa
gttgattttgaagaatttaggttgatgatgaccaggtctacagattaaacccatctcactctgtttgtttaattgtttgtgttttgttcctttgtaaattttactgagccatgtcatttattaggaattagtttggtttatgagaggattttggggtttaggataagagtatttcctaaacaaatttaggaggtaaagaatgcagatatgtatcacaatatttttgtactacataaataatatgtcttttcttatttcatcatgaaatgagttctagtatgtcaaacctgcatttagagcctaatggcagacatataaataaaaaaagtcacttttttaccactttgttccttggattaatcatttcttatatgataagatagtgcatgttatggtatggtcctctgggtcaccaagatctccctactttcttagaacaaaaatttaaatttaaattataatattttgtatgcacttaagcatataattattgataattcagcttaaagggataagactattttagttaagagtctttgttataaaaatgatatatttccttgttgaaattaaaacataataagacaacaactcatttacgtaggaatcaaaacttagtatatggacaattactcatttatattaagcatttttacgattaatgtacaatctatcatatgattagtgatacatggtttgtttatgaaatgagcactagccactaggtaaactaacttgatttaaagaggttcgtaaattcctttttttatttttgccaactttggtcattagattagaatagaacaacatcaagttctatgaagaacattgctatacaaggtaaaggtattatctcaaaatgtcacatagtgagacatctagtgcatatttggcatcataattaaaaaactgttttttgtttt

SEQ ID NO: 70292 - DNA, 3934 bp, Cannabis sativa
aaaatatgtccatttaaatattatttattttctgggatattacagttacatatgtcaagggcctttatgctcttgatgattcttttttgatattgcttctcctgaacttgaggcaaagtttgacaaatagattagcaaaggattgcttaaatatcttaggtggtgttttgtttactctcttttctgtgattttttgtatttgatttttttgccaattatttgaattcagttttgttcatattcatttgttttgtatgtatagggcctttaatgtttacgaggatggtgccaagaagttttctctaggttttagattgggtgtggactatgttgaagataaaacttggttttatcatttatcttgctgtgatatgtttatcaacgactcgataatatgcttaaatctatttgtacattttttagtttttatatagttgtttgttgattgtttttcagttttacaattgttatgataatcttggaatgtatgttcatgttctaattgttttttctttttttttttaaaaattttttttgtattgtttcagcacatgaatactattttctatctcttagaaaaaaaaaggaaagtattcttctgctgtaactgagaatttcgctacaacagactgtcttttttatgattctgtccaatctctataccataaattctacaaggcaaagtcattaaaaaccaatctgtctcacattcaggtttctcacccaatagcccattatatattccttattttaagcattggtatgaagccaaccatattttatttattgtaaatcttaggaaagagagccattgggtgtttggtcgtctgaatttgaatgagggaattatatttccttatagttcattatggacagccaaaatgaatgttgcaacaaggaatgcaatgagggcgtattctattttgctcccattattttttttttatcttcttggggtttggaaaaataggtccaatgttcttgatttgggttctgatccgaaagctcttctaggagttgtggagattgctagccttctaattcaacagaaaaagttaattgttgttattgtgttgtttttgtgttgcataatagttgtttaactgttgtttttttttttgtttttgttgaatagtgattgccgcgcatttgttgctacttttgtagagttcttcatccataggaaacatgtccctaacgactttgacatttaagtttactgcactcgtcttgctgccctcttttcttcctatggcaaaggaaaaatgacaaaaatattgatagtaaggatgagaagcagaacaagtcttcgaagactggtaaatggaagaagtagggtcatctaatgagaaactgatttacgctctttgtttgatttttatatgttaaatgataagagtttttaatggatgctattattttatttttctagttttatgctctagtttaagttctgtttgacttattgtaatctttctttttttctttttttttttccagacaatttttgttctttattgtaatttggttcttaatgcttttgttattacgacaactgcttagcaacagttataaattaactattttagtatgttaatttgtttttcatcttaacaccaaatgtgttatgaacttataatgaacattttaagtgtatttgattaggcatacaacattaaaaaactattatcgaactcttaaaaaaccaatttagtagaaatctaattatcaatgtatttttaacatggatcacaactgtctagcaactattatacaatcttaaaaaaattatttcgatttttgaaagtaatagcaatctatcaaattaacttttcatgttgtaagagttcacatagaaatttaaacaattcaaataaatgtgttgtctttacttaattgcttggttgtgacatgtctttcaattgtgaccttgttggccacatttgctgcacctattttgtttttttgcttcctattcacctataaatcttcttttccttggtcttttagatctcattttctggtttggtggcagaacaatgatatctttgatgttttgaggtacatcctatgttgtgtgattgtgtacataatatactgactggctatatgtttcaagccatgttctagttgtgtaatactgtgaacagtatttgtaaatatttaagttcatctctttcatcacagcaaaagtatgagcacatgagagttcgtctagttagaatctgttacaactgcatgttttttcttttagattgaccacccatgaccttgttcgttgtaccacttcaaacatgctctcgtttattggttttatctacagattaggtaaggataatcaatttattgaatgttaacaaaaccaaaacaaaatacagcaaaattgttatcctacatgaagtttaatgtattcctaaattctctgtcaatgagttcacaaagttgttgattaactatttctctgcagtaggtgtcaaaattgttgtggttttctatgttttttttcctgtttgtgtatttccattgttgtatcaaagctctcaatgactttattagtgtagtgactggtagttctctgctgctaagtttactgagtttagagattgaacaatattagaagtcatagttgtatacctgttgtttttgttgtggtaccttaaccatttgttgtatccaacttgttgtaaatatggtctaacacgcttgtccaagctgtcaagatcgctcatatggtatttgaatttcctctatgtgtatgcttttacccctgcgaagaatggtttattaagtttgcttgcattcttcttgaaggttgctttaaggttgcttaataggttgtatacatagtaaccatgagttatttctagatatacatgagcagctgccttaattatgctctcatgtctatttgagatcaagcactgttcttctctgaccccatatgcttcccttaattttgtaaaaaaccattatcatgagttgttattttctgaatccacaatagaaaaagctaggggaaaaatgtgtccatttgcatcttgtgtacaagctgagaacaatgtccctccatatgttgatttaagcaatgtccctccaggattagttttttgcggcatgtgcaaaaaacttggcagcagactttatgattcttttgctttttcacgtaattcttcatgcgtgtgctctttacttctccatgctttcatgtagtacatttttacgccatacgtttcatttctcctctgatgtcttatggcgtttgagttatttttatatttgtaaaccttggcttgatgtgtttccaatcaacattgttgtagcctgtcttttgtctgcaaatcttatgtttagctcacaagtgtgtatcacttttctatcatatttacagattatgaaagacttggttggttcgtttgctagatgccattagtgtccacttgtactttggatctaagtaataacttttgtatgtttttgcgcaagacatttagactttgtattggaagttatttataattgcatagaaactaagcacactttgtagtgtttctttgtcattgtataattgtgcttcttctgtttcaggatgttgtggatctgtgattagtagttcgtcataatctatgattcctccctctctgtctgggttgttttctagttgctcaactatttcctctgccacaagttttgcatagtccatgaagttaaacattatttcaccatcttccagcattgtgccttgcattgtttgttcttgagttgttgattcttctgttgatggtgcactgtctatcattgttgctattgcatttgtttgtgcaactaatgagttgctcatttcaaagaatgatggattgttgcctattgttgtgttgctgaccacgttcacacacaatggatacgttgtgaagttagtgttgggaatattttacca

SEQ ID NO: 70293 - DNA, 1387 bp, Cannabis sativa
tcgaccggccttgggcttaggcgtggtttggtcagggtctgtatagtgcgattaatttctttgtgacatgaatcgagtatcttttgtttatgttactgcaatgaatcttgtctctatgacatgattttgttttattttatttcgttttcggttcatctttttgttcttcgatgtctcactatcaaattaatgttattgattgggaataataagttctctgcgattgaagggggttgttagtggtgcagttacttaaatgctcaatctaaggggttgaatgaacctactgcaatagataaactgttttggtttttgagcgattgagtaattaaactaaatataagtgttcttaactatgatattgtaatcttttttatctaaatttatattagtttctttaatttgtaaaacaattcaagaatcagacgaccaattagttggcttatttttctgattctaatcctagttgtgttttctaaggaagagatatcccaattaagttgcagatagttattaataaaattatatgatttcttcaaaataaataaataaatgagctcccatgatgcctatagcactcttgtaagttgtaatattgttattagtataattcaatattaatgtaccctagttattttactttaataaataatataaaatacttctaactaattataagatgttagctcataataatattaaacactttcatgttttaattataacaatactacaaaataaacctttaatcttttttattaggataacattaattagaagataaagaaacgtgggaacaataacgtagtatgactattctgtttatttaaaaaataaaaaactaaacttaaaccaccaaatgcaaattatgtttgattaataggagttttccccgtcatttcctcttactggagttcccaatttgctagctgcctctattaatttatttaatatatatttcattcaactctcttgtacaatttggaaaattaaaaaacattataaaaataataaatcacacatgttacatgtacattgtacagctatttatttatgcacgtatgttttacttctagatatagtatacactacttcacatgaatgtacaaaatgagtcaagtatataaatacacattaaaaactgagtgcgacattcaattcaaaagagagttatatgtttacaatttttttttttgaatgcaacaatttactcaaatatagtataattaatgatattattttcatatattaaacaaagagaaatactaaaaagtattagtggtgtctaacgtacatttttttgtgtattattatcgctattggtccaattaaaaattgaaccacatatcatttaatataataattttttaagaatatcattaactat

SEQ ID NO: 70294 - DNA, 2015 bp, Cannabis sativa
aaaaaaaaaaagatagagaaattagaaaaataaaaaataaaaaagagaaatagagaagagaaagaaagaaaaataaaagccaggaattgacttaaaaaataagaaaaaaagagctaaaattgactaaaaaatatataaaaaagaaaaaaaaaagtttttttgaagctttaataagtaaaaaacagtaaaaaagaaaaaaaaaattaagaaaagtataaaaatttccttgtcaaattataaatgtaatgtttgaaaaaaagttagtatttggtataaattttccaaagaaaaagaaagtagaaattacatgaaatatgggaaaattttaaagatttacttttttatgggagaattaaataatactaatggggtatggattttttgttttgtttacatttttatggatttttttgatgacatatttttgtaaataacttatctaatcccatattttatcttttttcattacaaatgaaagttacttagccaatccaaactcgtcggaacctgtcccacaaggttacaaccattgagccacttctcaagactagtcaggttaccaaactcactcagtatccgactcggcgagaacgaattataaacgagaaaaagctctctgagactagagatgttaccaagagaattgggtataactccgtcaagaagatttgtagagagaataagctattcaagtttctgaaactgaccaaagcttgtagaaattccaccagtgaagttttttccaataaactccagttgccggaggttagcgattttggaaatacttctgggatgggtcccacgaggaggttctgagagagaacgaggctatggagattctgacagtcgaagatagtgttcgggagaaaggagttgataaagttattagagagagtaatggaagagagagattggaggatgcaaaggaaaacagagaatatgactaaatagtacagggctcctgagttattgttgaactcttcaaattatactgcttcatggtttgttggttgcatatctatggagcttatgattaggaagcctttgtttctaagcaaagaccatgttcatcagatgcgcttgttgacagaggtaaggacaaatatacataaaacaatttctttcagaagtgaagtctcatcttatttgacttgtactgtagattataataccaaatttcaactattgacaccttttccatctttgccaatttttctttatttaatgctaaaataacttttggaactatggcatgattttctaattagatacagatattctttgtttattttaacatcaaagctcttgtgtgttatattatacgtttaataaagtaattacttatgcattattttgtgtttcttagcttctaggcacaccaacagagagatctcggtttcattcgaaatgaagatgataaaagatacataccgcaactcccttcgttccctcgccaacagttaggcagggctttcccacatgttcatccagtactagccatagacctcattgagaaaatattgacatttgatccaaatagaagaattactggtcatttttcatactcaatacttgacttttcgaataacaatacaaaaaatgaaagacctgtctttgcattctcctttgattcagatattagtgtctaactaacttggggaacttctgtgtattctcctttgctagtttaaaagttgaattacaatgctggaaattgctgttcagagctaccttttgttgcagagtgggatttagggggttttcctccttggttactagatataaagccagctctcacgctaagatcatcagatcccgcttacctaaaattggtttgttttttttttcttttttgttgtctatttaattcatgttttgctctttcttgtgtttattttcaacgttcaagatgcttatgcatattttactttgtatcatttaaggttgaaagatggtggggagcactgttaaataaattaacaattaacccacgatctatttgtatataacataga

SEQ ID NO: 70295 - DNA, 2513 bp, Cannabis sativa
aatatctcctcggtgtttgacagcagcagcagcaacacacaacccagcatgatctctggcaatccaacccaatccatgactcctttctccagaaaacttttaaatttttataactatatacatataaccgcacaaaaagatccggatcccacttctaaacttgtttacataatcaaaataaactttacaaacatggtgcacaacgactacaaaataaagtccaagtcatcacgagacagaactttccaggtcgtaccatcttgacatgtacaatcatcctcgagctctggactcactactgctcagccttagccattcctttacctatacatgcatataatatatgtgagtcaataaactcaataagaaaagcatacaacacataatatattaccgacttgtatttaggtgtccatacacctatccacaaggctttacagatgataaagaacgttcttaatacaagtacgacctttgtaccacatgcactaagtaccgctactgtactagtgttggtagggttaaattgtaccccaagtactactgagtgttgtaccacatacactacgtacttaatcgtactagtattgataacaccggatcgtaccctttaaacatcatatattgtaccaatgcactcagtactactatcatactagtgttgctagcatatgaatcacataaacaacatgcatataatacacatatacatatatattctatgttagtcttacttcatttccatgttcaagtgtgccggttgacctaaatagaaattataaggccctatgtcacaatcacataaagcgggcaaacaactttctaagacctttctagggacctaaattcaaaactaaaagttttcctatcgataaatagcacaaccatgccctaaatatcgaggaaatatgagaaaaatgactaaacgggaaaactgcttgaaaagtagcaggtcgtttctgtagaaacggactgccatttttcactgcagaatcaaagagtctccaaatcggctcaaaacaaccctaaactctatactaagcttcagatcacctaataacatcataaagaaccattccaagcaacataacctcaaaatacacaacaattcattgttgaaccaagtttgagttcttgaattcaaacatactcaactcaacaatcagccaccaaaacaatctaaaactagcttcaaataacctcacttaactcctaaacaaaccaagataaaacccaacttcgacagaactaaaattaccatttatgcatgctcaaaattaaagaaaagttatcaaagcttaaggaagtaggttctagggtttttaccttaaattcaagcttctaattctctcaattccttgctgaaaatcactggaattaggtgcagggtggttggtctccttggttcttctaaggccgaaggtggaagagaagagaaagaatgaaataatttttgtttttctcttcatttcctttttattttttttttcttaatgattcatatcatacaatcaacataaaacaaaacttgggagtttctactaactccactacaagaaaaaaatctcaataaatagcaaattctaattttgccccttgcttcacccttaagcaatttataggtattgtggtaaaatggtccaaaaccataatcccacctaatcctgatgtttcaaatatcaacatatgagtacccccactaaaataaagcttctaagaaaacccatgtgactaaatcggttgttcatcgcattttctatcgttaccgagcgaaaatcgtaaaaattataaatttcatatatgacataaataatacacttagagtttaataaaatctccgaaattaagaaattataactctaatgtccattttctgaaaatggggcccacaactataaatatactcacataatcataaaattacaagtaattagtgctaattgccctactaatccataatctaatcatacgtgttggaacttattttatcaagatctagatttactaacaagtatgttggattatattctataatttaacatcctaaacatgaatttcctaaaataataaaataaacacatataaagtttataagaccttacattggtggcaatgaaatattatggctcattccgttcagatctttaacccttgttcctttctatcgtagagtaataacaagatctgaacttgaatctccttcattcacaatcttctacactatgattgagtactgacttaatatgagtgggcatgtactcttcactagaggtttaaaattgatgaagaggaagaagaaggaatttttgaaattctatagaaggaggctcttaattttgttgtctgacagactagtctgatgtaggttactaggttatgagaatgagagtcatcttattccttttatagtatttcatctagggtttgcatttaaaatatatggaataaaaaagataaaataatggctaaattaagcttaagtggccggcctcacttagtggaccccactagtt

SEQ ID NO: 70296 - DNA, 1021 bp, Cannabis sativa
gacgagtggcgcactgccgtcgccgacgaggctagcacctcaggaaacccgcctctgctcctcgcggcggcggtttctttctcttccacacatcaaagtgaaagtgggtcagccgaatacgtcgtcccagccctggcgagaagcttggattggataaacgttatgggttatgacttctacgcgccggattggtctactgtgactggacctccgggagctctgtacaatccggggaggtctgtcagcgctgactccggtgtccgagcttggatccaggcgaagtttccggcgaataagatagtgttgggatttcctttcattggatatgcttggaccctttctaatcccggtaacaatggatacttttctccgacgaccggagctgctttcccgaacaatggagctttaacttacaaaaggattaaagagttaatggttgataacaagtcaagtttgactgcggtgtttaactcgtctgtggtcaacgactactgttactttgggtccacgtggatcgggtttgacgatacgcaaagtattgagactaaagttaggtatattaaagaaaaaatggggttacgtggctattttgcatggcatattggaggtgatgacaatatgctactctctcaaacaggtattattgattaatttcttttgttttgtattattacgttaattaaattatagagaaatgttaaaaattattaatattcctaccagtctaatgaagtatccagtctcgtatagtttaatataatagtttgtatcggggtgataagcaccgcttgtatccaataacaatgttttaaattatattatgactttttgttattaaattaattgttttaaaataataataagtgcaacgaaatatgcataaatatactgtatatatctggattaacatttactattttaaagagcagtatcttttataacacaaactactgcgtacaaattatattgtaagaaagctcacttagatattaattttcaatcaaaaaataaattaagtatt

SEQ ID NO: 70297 - DNA, 2452 bp, Cannabis sativa
ttgttggaaaacctgttgttgaacttggttaacctgtttgaaaaataaaaaataaaatttatgagatttaaaagaagacacttttgcgaagattaataaatgctggaacggcttatataattcccttcatataattagctctaatggtggatgcatgtaaatcaacttgctcaacataaaactctaataatgtcatctattactagatttgatgatgattcggtgtatttagagcactctcaattcatattttactctttttttttattatttttatttattattatttttttttatatataatatctcactaaattattattgtgagtgctctaaattcgtgaggaacaacatggattgtataaaaaaaaacatataaattgtaattagccaacaaatttcattaagggcatgttggaaaaactatataattgaatgtaattatacaatttagtatatgtctaaccatataataacataataacatgtaatagtgtaattatacaatttagtatatgtctaatcatatctaataaaatagactgaaaactaaaattaatgtggagcttattaatttaaaaaattgtcatagtagaatcactattaataatggagatactaaaaccaaattgatgcgcaagagtcaaatctagacgaatggtgctgcaagaactactactaaaaacaactaataaagaaaagatatctaataaaatagattgaaaactaaaattatgcagagcttattaatccaaccaattgtaacagtagaatcactattaataatggatactgaaaccaaattgatgcgcaagagtcaaacctagacgaatgacaagcagctctgccacattagcagagaaatcccctaacacatttgatgaccacgccaaccaaaccacactctgtgcatcccgtattactcccctaattcgacaaaaccctccccagaaccaccgaagcatccgtcgcaagagcaaaaaattcaggaggaggtggcatccatcaatcgtagctcgatttacaactgggtttgtagtatattaacccaaatgaagacctcgccgaccatactccttaaactctaccagatagttattgactaagtttggaatgacatccaatcttgactgcttgttaccaaataatactgagtttctatcataccacagccagcaaagggttatcctcatcaattcaaaagcctcgcggtgtagcctctcaaagagaaatggaagaatttcctgcattggtccacttacacatcaacggagcaccgaccccacccccaaccattgccacactagaatcaagccagaataggaaaatagagcatgctcaggagtttcagattcttccccgcatcgagaacaacaaaaagttacttgaacttttcaggagagaagttgtgttgctacgggtaaagccaaatggaacatacgccaaacaaaccctttcacctttggtggtatatagattccatactccattccaccaacaagataacttggatgaatctgcgactccctacttaacctggagcgaccacaccaatgagtagtcactcttgacattataaacccaatctctatcgtagtgctaacaccaaccatcttatgcctcacgcctcgctaatggaatagataaaattatgtccacgtccattggcaaaaaaatctgttgaagcttccccacattccaattactagatggaataataaattcactcacccgacagtcatcatgaatactcctcgtgattggctaaaaagacctcggacgcgggagccatgggtccttgaaagtcctaacttgtgttccatctccaatggacctccgaagaccacatttaagcatctccaatccctggatcaaactctaccaaagatgagaggaaccaacttttttagtggcctcaaggatagagcaattaggaaaatattaatgtttcaaaattcaagcagacaatgaatctggatataaaaataacctccatgcatgctttggccaaaagagcttgattaaaaagttgaaaatcccaaaatctaagcccactcattgccttaggctcacaaactatttccaatttcactcaaggaatcttccattgatcaccacaagaactccattagaattttcttacaatagactttaattcttcacaagttttcgccgagaatttaaagacactcatcatataagttaaaatagcttgaaaaataaatttgataagaactctctctaatttttatgctcccataagaatttaatataattacacaatataattattaaaaaaaattatttttaatattaactactaaaaaatataaatttttttgtataaatattaattattctgccaaatatgatattaaaaatttatatataattaccattttatatctaaacacaatttatattttataatacaatatatttataccaaatt

SEQ ID NO: 70298 - DNA, 1829 bp, Cannabis sativa
gacatgatgaattcagaccaatcgactttattggccaaccatccttacctgtatccacttttattcttgacactatggaatggaatatgtatctcctacaagacaactttgcttggagattgtttgaaaatccaaactcactattaggccgccttttgaagcataaatacttctcaagaaactccttcctagaggcgcatcttggacatgctcctaaagggactgcgatacaagattggtaacgaatttcaagttagaagtggtttagatccttggatcctaggacatgatgaattcagaccaattggctttattggtcaaccatccttgcctgtatccacttttattcttgacactatggaatggaatatggatctcctacaagacaactttgctcaaatcgatattgatcatattgttaccattctcttgagcttttaccaatcacaagataggcttatttggcaccataacacatctggggtatattcggttaaatcaggtttccaccttgcgaattcaatctcagagaaacttcaagaatcatcttctgatgatttcaaaagctggtggaaagttttttgggctctacagttacctccgaaagtaaatttttttgcgtggaaggtcattcaacaagctttccctgtggcctctactttgcaaaagaaaagtcattaattcagcttcatactcaaggtgtaaaaacgcatgggagtcgattggacatgctctgttcacatgtaaatatgccaagtctgtttggaagaaaaccaattttacaattgattttcatcatgcacatggtatgtttaatggggattatctaattcacttggcaaaatcgatggagaaagctgactttgagctcttaatatgtgtaatgtggtgtatctgaatgataggaataaagttctccatggtggttcacatcgtgagccgtcttctttgacagcatacgcaaataactacatggaaaactaccaatcggccaaacttacctactgcaaaaaaaaaataaaaaaaaaaatagcagaaccacacagcctctgatcttgaccagcagctctctacacatttgcttggcactactttcgatcaaatatcacgaacagggcttgatgctacaaacaaggattcatcttctcagcaattacaaccatggcaatacttggacactctccagcagttagcacaacaccataatttgaccataaaccatgattcacataatatggctgctcgatataatattcaccatgatgcctcaaatcacaacctcaattcatgtcatgtagcaaaccagcagcaattgcctttaacatctgagttgcatgattatgtcatattacagcagaatgtcacaagtgacaatgggaggcaaaaaaataagatagcatggatgccaccagaaggtaatttgcttaaaatgaatattgatgctgctgccaactttcatgacaaaatattgggtattggagctgtggtacgaaacaacaaaggagaagtaattgctgcattttcaaaaagagtccaaggttgttttagaagtgaagaaatggaagcaaaggcactcttccacagtctgaattgggctacacaacaacaattgctaataacacatgtggaaactgatgccctaagagtatcctctgctttgaattctccgcatggagacgtatcttgttattctgatctaattgttgatgttcgttgtcttttattctcttttcctggagttactgttacttatgctcgtaggcaagctaaccaagctgcccatagcttagcaaagtacgctctaaaattggatgaagatgtatcttgga

SEQ ID NO: 70299 - DNA, 958 bp, Cannabis sativa
aaaccgtaaattagaaaaaaaaaaaaaaaaagttaaacaaaatagtatatggggtaattctcctatttttaattttatattcaaatccctattacaaatttttttaattgtcaaactatttaattataatatacataatattttttttttacaaatattagacttcattctaaaataattttttgaataattaattatttttttacagaaccgcttaacccatctttctcctttataaaaaaacaaaataaaataaatctccaatttcaaaaattaggttttcaatttgttccaattcaatcttatgtgaatttttcaattcgatttaatctcctacatcagtgtcacaaaccctttcctctaatctaccagctatatcacgtcctatccctttctctctagttctcagtggtcttgtgacacaaccagacctaatgatgttgcacgtcgttcataaatcaattgacaataaaaataaaatattattttgccttatttactttcttcaaaattttttccacatacttatttttttattcacatgatatcatttttaggtccactctttaaatgacatttctagcatgatcattatgtcgttcatatatagtacttgtttcttgttacttatttattttttgctaatctgaaaaatttcatattaaagaaaaactaaaacaccaagttcatggtgagagtctagagacaagaggtttcaccccctcaatcaatgttatttttggtgatcgttttcaatatgtaattttgtcccacttattttaaatatattttttgaacacgataagtagaaatagtaaaaaaatttaacttatttctaattttataattgttattaattttaaactattttttatttaatttattaaattaaaaaaataactaaatgacttgaaccaatttagaactaacatactgatttgacacttaaagtattaaa

SEQ ID NO: 70300 - DNA, 1311 bp, Cannabis sativa
tattaaaatatatttattttttttgaatgggttgcccaatatactttcaccttccacttaagtctaacacataatttacataaacctaaagagtataatagaaatattactataaaaataggtatatcttaaaaaaaaaaatacagaaataaaaataaatattaatacaggtaaaataaatgaaatataaaatgtaattttagggtacgagagagtaacaagttcttccttaggggctagggcaatcattatttcatactgttttttcttttttctttttgtttaatttttcccataaaatatcattttaaaaaaggacatatatttacacaaattgtataaaaactgagtgtaaatttcaataaaaaaaagttgagtaaaaagatgataacccatttgctaatttccaaagaaaagcccagtttatcatccatgggcatatgaaaccaaaaggcccaaaaatactgactaccactaacgcttatggcccacctattatctctttggttcaaacccaaacctcaagaaaagcatctccataataccctatcccaaatactaatttttagtttttcatcaaaaaacaaaataaaatactatttttgtcattcttttttggcctaacacatgtactaatttttgtcataattttttgctgagaatttttaaaaccaactttatcatatatcatccattttacacatgaatgaaaattggatttttcatattatttattttagataatatatattctttataagaagggaatctagctaggtaagagtaataaaaggtatatatgttgtaatgtagctgattaatctggtcccctcacttgaataagtttctggctaattaatttctgccactgaaactttagcagtagacaatacattatcattttactgtttatttatgcaaccagacaaattgaatcagtagaaatggtcgtaaacactctcaccattattattattattattattattattattatttgattcacaatttcttttattttctgtttttttaattagtttaaaaaaaataataatatttaaaaaatttcacaacttccaaattacttatgtatctctagatatattgaaattattgagaaaacttggtatggttggtcttcatatatatggacaggtcacattattaaaaatttagaaagattttttcaattttttattaattcaaaggacgtaattttagggagatttaaaggtcactacaaaaaaaaaaaaaattattataattgtaaaatataattattatattgtggctaaaatattagttacaaaa

SEQ ID NO: 70301 - DNA, 804 bp, Cannabis sativa
ttagcttgtggttgggtttgttgagtggaagaggatccaactcctgtgaagctcttgtcaaaccggtagtaacaatcaagaaccgtgtgtcccagtcgatgacacaattgacactgaactcttgctggtggtgctggaaatcttgcccctctgcctgtgaacacaccactacgactggtttgaataggttgatgagagtgaaagccagtgtccctgctgttgttaccagtgtaggcgcctcttgatgtgtgaaaattgttgcgatttggcaagaaaaatcgcatgttacgattatactgagctacattagcttcaagattcagatcttgatcaagattgtaatcagcttcaactttagcaagattagcactgatttcagtatcttgatcattcttctcaattcttgattcagaggctaacaacaatgcttcgatttcagctactgtatatccttcgattcttgtgttagtggagattatgaatgtatcgtactcactagggagtcctttaaagattgctgaaatgtgatctcggtcattgagattttctccaacacttgctaggagatcgacagtctgcttcaccttcaacaggtactcattcaatgtcatagatccttttcgaagattctgaagtctggtgcggaattccagaatttttgaggatactcgaagagtgaaatacttctccaaagcattccagatttgccttgcagtgttgcaacccaccattcttgttaacagactctctgtcatggaggacaaaagccatgagaccagtagttgatcttgaacatcccattcg

SEQ ID NO: 70302 - DNA, 1466 bp, Cannabis sativa
  modified_base (1056)..(1069): a, c, t, g, unknown or other
aaaaaaaaaaaaaacaatataatttgttttatatcaaattccaacaattttagtaaaaaatttatctgcatgtatttatttatttatttaatataattaaaatttagatcgacaaaatgattgatttctactttaagccatataaagttagacataaagatatataattttagctacttaagaaacacataattgctttaattaattgtatataaaactcattacttctcattattgttatatcattcattcattaattataatttatgttagaaggtgggaaaagaagaattaattaattaattaaaatgaaattcattaatttcttagtgaaaaatctcattcattatatttcatgggtcctacatatatattttattccctcacaataaataacataattacaacaaatgaaaataaaacccatttatatatttatacataaatacaaattattgtctttaagtgtaaacttaatttattttttgttttttattttttgagaaaaaccaaagtttgaaataatgttgataacataattcttttggttttcatataatagagcacaattagtttacaattttcttaatatatatgaagaaaattattgtatactaatattactaattgtgattaattaaagccctaagaatctcaataattagagattatattaattattaatataataataaatggatgtttgtatttaattatatattaatggatgtttgtgttaattaaatattattctctcattttgtttggatgaaagtttcttgtcctaattttcaagccaaataacaataataataaattgttttcaaaaaaaaaaaaaaaacaataataataataataaattgaataattaatttattattttcaacagaatttttaatgtctttcttaattaactaattgattaaaagttggtttatataattcgttgattggatgacatacatgaaaactaataattattttcaacaattaatatttaagaaaagccacaagagataagagaaatttaagttacattaataataataataatannnnnnnnnnnnnnaataataataataataatataaacttacattatgtgatttaattattaaatcatgggtactaattataataatttaagaaattaattgtcataatttatatatatatataagaacaaacacaataattatatacaacataaaatatgtacaaagtaattattacatataattaaattattattttccataattgatttgtaaagtaccccaacaactgaatattaaattttaattatgaatatgggatcaccaacagttaggttttttagtcattattattattattattaagatattttaattagttagccaattaataaaaatttaatgccaaactgataaatcttaattaaataaatgaaacaacaaagaaatctggttgtgagttgatattaa

SEQ ID NO: 70303 - DNA, 1959 bp, Cannabis sativa
gaatgtagctgagggtaatcaagcatgtacagaaaaacaaaaagaacaagagaataaagaggaacaattgaactcaacaagaggagggggagatcctcctctatcaaatggataagatcctcagttggaacgtccgaggaattaatagccagcaaaaacaaagtttagttaagtatgttattgctcactagaaagttagtttagttggtcttcttgagacaagttaaagggctccaaagcttggagccttataagtagatacgttctcaagttagtgctttactactaataatgcatggaataaaagaggttgaatcattgtagcttggaatcctttgaggttcaatgtaagtatccttagttgttctagccaacttatccatatctttatttcaactgttgacaataagaacaatttttacgtctcttttgtatatggttttaatgatgtggatggaaggaattttctttggaaagaattgcaagggttcaatacattagagccttggattgttttgggagatttcgacgaaatctttaaaagagatgaaataattggggacagagaaaagtttgtgccttcaaaattttagagctatattttttatttcatctcaaagatgtgaagtatagtggtaatttttacacgtggagtaacaaacaacagggctctgattgaatcttttcgaagattgatagaattttggcaaaccaagcttggctagataagtatccaaatgcaaaggctgtcttttttaatgaaggtctttttgatcacacctttcgtattaagtgtataccctaaattctctagaggaaagaagcctttcaagtacttttgaatgtggagttacatcctcagtataatcagagaattaaagaggcttggcagtagaaggtaagaggtactaagatatatcaggtggtagcaaaactcaaggccctgaaaaatatgtttaaagcaataaacaatgaaggattcttggacattcaagctgcaaatttacaagccaggaaaaagttggatgaaagtcaaagaaaagtgcatagtgaccccttaaatttggaatttcaggccatggaattagaagcaagggatgagtatgctgcaacacaaaaaccttttgctcttttatgcatcagaaggcaaagcttaactgttgagaaggggatacaaatacataactttttcattcatctattaggtagaggagaactcaaaataatattctctccattgccaatagtgaaggtattagaatagatgacccaaatggagtgactcaggcattcctagatttttacaaaaaaattattgggaactcgattagaaaaaagaaagcaggttttaatggagataatttgaaaaggtcctttgatctcaaaccaacatgttgaactgctggaagttgattttttttaatagaagaggtcagcttcctgtgttcaacatccctggtatgaaagcaccaggtctgaatggatatagtagctacttctttcaagacaactgagatcttattggaaacgatatttatgaagctgttacatctttcttgcattctagacaattgttgaaggagatcaactcaacaatactcactctcattcccaagcttaaatgccctaacactgtgagtgattatcgccctatagcttgttataatgtgttatacaaaattgcaacaaaacttatctgctctaaacttaaagtaattctccctgatctcgtgtcccaaaatcaaggaggtttcattaaaggtagatatatagctcataatataatgatatgccaagacttgattaggcattatgggaggaaattaacaaaggataattgcatgataaagcttgacttgcaaaaagcttatgataccttggaatggagttttttggaggagttcttgcatgcttttaattttccaatcattaggcttattattgttaggttttatgccc

SEQ ID NO: 70304 - DNA, 1018 bp, Cannabis sativa
aaaacctgaaaaataagacaccattttattttgttagcagtatctgtagatctaatagaaaataaaacaacagttgtaaatgctgtgtttatgaatttattttttactcctagatttttttgaaatatttgaggaaatattgataccaattggaaatttttgaaagctttatcaaaattaatagtaattcttaaaagccttaacaaaaagaaatagtaattcttaaaatgtaaatgaccatttattcttttttgaccaaaaaaaaaatcacagttaaaagtgctatattcacatttaataagaaaaaaacaatctgtcataatctatccatctataatgtatttattaagtggtcaaaattcttttcacctaatttagatttaatttaaggaaatgtgttgagatttgggacttatgattctgatcagtattatctaaaattattttctaaaaatttgcttcaattttcaactctgatttgggccatgaaaaccaacatatggcctatgttctagccatgaaacaatttgttgcacctgaagagcgtctcaagtctacctcagtaagtcacaatgaaggtctggtcgcaattaatcgtgatcgacctgcccaaaaattcgtaagcagtggagatttgtcagatatcactagagatcaaacggatacaactagagatccaatagtttgtctcttccatcatcaacctgctcaaaaatatttgttcttaggcgcttgagatcagactcagataattagtgatctcatataagtggcactgtaaatcctacaaagttaactagaggtcaaatagttttagctgcggaagaaagaaggagaagaggaaagtaacagaggaaaacagagagaattgagagagaagagtgaatgagaaaacaatctgtttttcattaatgaacaatgtacatgaacaaagcctttatagcttgattatacaactcaaaacagttagttataacagctgtcataacagtttgtttaaccaactaatcaactaact

SEQ ID NO: 70305 - DNA, 1471 bp, Cannabis sativa
acatatataaatacatatttctactcatcattagatcgtttagtacgctttatttgtattgtataatatagactgaattgtattttatgtaaaactatgtggtatagatttttatagtgtaaattaaaataatataataggacttaatatggcgtacaaacgagtcttaaagttactatacatgacatcaatgttaattataaagacttctatatcaagtgagaagtaaacccaatttcaaccaaatacgcatccagttcttataacttcatctcttttcaagagttttctcatttcatcatatacacagcattgcctaaccaaaaaaaaatgcaagaaagtgtattcaacatagaatagaatggcaaacaattaagatagtgaccaaagaaagttgttaaagaaatctagaacagaacaaatacttgtaagcctcttaagaaaccatcgttatacttgttggacttttgagttctgtgatgtgtacatgaccaggtactctgcatgaaaatatatttaaatagacagaaaactaataatgattttgaaaaccaaaaaagttgaaaatgttaatctgttgaactagattattgttgtatctaaattcattcttggaaaactctggaatgaagtaaaatatcagtttctttctttttttttttttttgaaaaagaagcgttatattaaaccaacgaactagttagaccgtaaggtcattacaaattagattcaaaagaatgtcattagtatccagacaaccataacgattctgtgtaaaagcccacttcattttattatgggcacaaatattacaaatacgagctacattagaaaaattacaacccgcaaataaagaagaaatgcttaaacattgagaaatatcagtttctttcagtatgataaaaattatttcagctgttctggagcaatgaatgcaaaaatacagaagctattatcaagatcccacataatagatacatttaaaaatacttccagaagcaaaaaaacaaaaaacagcagaataaatgtattgaacagttattttcattctatatagtaaaatatttgaatttgtagctttataattagtaaactgattagtttaacaagtgtactcatataaagacaatatacatattagattattagaatgtgtatatagttccttaccaaaatagaaaagatgcattaggaaaaaaaaatcatactataatctctgctttaattttttttttaaaaatactatttttagtaaaattttataatttttttacatttttacaaaaaaaaaattagttttacaattttttattttcttaagagtaatttctgatataaatatttaagtttaaatatcgattacaaataaatacttagtttaatttttaaagataataatatttaagttatatatttagaatttgactaagtgtcaaatattcatgtatcattttttttaaaatttaatcac

SEQ ID NO: 70306 - DNA, 2361 bp, Cannabis sativa
  modified_base (2303)..(2322): a, c, t, g, unknown or other
aaaaaaaaaaaaaaacctgccataaaatggccgcggctactgggtttaaaaacccaatttccaaccatggaaaatgcatccaaaaacaccaattttcatgctaaaccagcccataatcatactaaactttcacctagcataaattaaataattagagaagaattacacctaatttactctccaacaacaccaaaaaccagcaacacgaaaatcagcccaaaaacacctaaatccaaccaaaacatgcatcaatccaaaataacctcctacagaattaaacaactacagcagggagctaaaccacaaattttaaagctcaaaattacagcctacgtgcatagaaattcagattcaaataacataaaatcaaagctccaaacttgagcacaatatcaacaagttcaagctcacatcttgaatcttcaaatcccaaaacataaactcaaacacaacactaaaattagagttgcataacagattaaaaacacttataaaatccctaaaatcatctcaacaacattactcaaacatcctacatcaatttctaactcaatcaagcataagatatcaaaattacaccaatatcatcaagcatgcattcgaagaacatttagagcttaaaatcataatattcatcttcaattccagcaagaatttcaaattaaaaacagtgagaagagctacctcaatttcttaacaatccaagctccaaagattcccacaagacaagcttgaatccaagcaattctcaccaaattcacaaatttgagttaggtttagagagaaatatggggttcggctatttgggctgaggaaagcagaaaaataattctaattttacgcgaaaatactttttgttgaaagtaatctaattatgcaaaaattacaaaaatgcccctagggcaacatactcatttaggcattcaagggcaactaggtcaattctattacataccacatattcaattaattttcacgtttctcacataaaaataaaataccaataaataatcccaaaatacccggttgtgactataccgcaccaacttgtcagaacacatctgtaaaaggacataacaggtatactatataataatatagtccataagcatgtaattaaattaaattcatagttttacctttctcaggtcaaaattactaaaatgctcctagctcaccaacgaggtcttaacatgtcataattcacaataattcacatataataaattatataataatataattctataattatacacagctaactagctagggtttgctaatccattctcttaatcttagggtattacatttatagtggagtaatcatggaattaataaataagagattatttggttgatgagactcaagaaataatctagtatattggagtttagaattataggtccatgatccatgaactgccaccttgaaacattgtcatgggtaggaataaagagttgtataaaaatgttcgaaaaaactattttaaattgaaaaaatagtaattatttatttttgtaataaataaataattttttttcaaattaattaaataggaaaaagataaaaattgttaagacaaaatttttcgagacaagatttgttaggacaaaagttgttaggataaaagacaccaagcttgtcttaaagacataggtaggcgcctagcattgttctcatccatatgggatttatctttttgggttaattaattcaattaggtaaatatctaatttgaaaattggttataaatatttcaaggttgttgagatattctttcaagtagttgagagattctctcatgaatatcagtaaccatattcggttattgataggagcctgatttgaaaaatcagattcattctttttattgctattttcgaaatagggaaagaaaaagaaagaaataatttttcaattgttcttgctcatgtgttgagaactcaacaagaatagctttatacactttatcctaatagcccacattattctttgtgtgtggtggatcgataaaaccaatagattgacaccttgcaagaatgtttgacaagtaatcacacaagaaagacaagtcttgaaaagggcctgaccgattagttaatatgttggccaagagaaacgatgacataaatgttggacaaagctacacaagtcttgatttcttcctcaaacaactttcacatatatctttaactgtatcctacaaatgtggatctgactgatctactcgagattctaggagttccaagagatcgtaactacgtcctagatgttggaattttattttaccaggatcttnnnnnnnnnnnnnnnnnnnntgtttaaacaccctaaatatgaaatttctaaaacgataa

SEQ ID NO: 70307 - DNA, 558 bp, Cannabis sativa
tcaaaaaaaaaaaaataatatattcggtaagtaaaaaagatagtattataggaaaaatttatactaagtctaattttgtatctaatttaatttggtattcaacagttttttttttttaataatcgtatatgttataggtatttattaaacaacctacaaattttcaaaaaaaaaaaaaatcaaaacaatttacaataccaccaaaaataagaattaaatattttgttgtaccagtaattattttatttttcaaatatatgtgtgataagtaaatatcttaaccttattttcaacactataaaccagaatattttaaaaatttaaaagtattcttaaataatcacaaacgtacatgattttaaaagaaatatacttacaaaaataaaatggtccagatccactagggtaaacttagtcagtacattatatttgaaagtattagaaattgatacatatttttacaatactcaattaagtttagaattttctacacatttgtagaaaaacatactctaaacttttaaataattgtagaataatttagaattttctagacat

SEQ ID NO: 70308 - DNA, 2980 bp, Cannabis sativa
agaacaagaaaatgaggatgcttcgcggtattatctacaggtggatcgtttgctcggggattgcgctttccctgcattggattagtgtaatagtcaataccatcattgaagcacataatttgaagtactgaagagttccggaaatggagtcttttaaaaatttatcaacaataagtcagagtaaagtgtaagaaattcaattgacatcattactgcattgtatattgctcgaagtttaggaagctgctttggagaaatgacagatagagatatcatgcactgcagaggaaaaagaaaaaagaaaaaaccattacggtgatatgcaaccctcttgaagtaaaaaacactagcataaaagaaaaaaattacaaacctacctgagaaaatgatttagctatggtctcggcatcggatagacgactttctgtttgggcatcaatattttcagtctgctccaagctttgaattggtggtctaaagactggagtggacaggggatgaggattgcttgcggtaataagaatgcaatgcctctgacaatccacgttttgttgattctgatttccattttgagcaccaggaaacatctagaatattcattaaggaaaatatataagcacaaaatcatgcataacaactcaaataagaattaggcaaggttatactaacaaataggttaatgcataaactaaattgctttcagtttagttgttggagatcaaattttacaagtaaagcactcttcctattcaatacatattgtacagacagaaaaaacattaaggaaaggctgaacagcatatgttaaattttccatacattttaaccatttaatgcaaacaatgaaaggctgaaaaagaagaaaaaaaaacgtattatttactttccctattttttccccaaggaatccaagaaaaataaataaatacaattaagaagaataatgcgcagcctggcagaattacacaagagtacaataaaacaaaaagaatatgaaacacgtaaaattatgtctaacagattcaacacaccattaaagcttcagaaagcccttccgcaattgcagcatcattgaaaccaccaccagaaaaatgtatggcagaaagccattgtaagaaattatcaatatccttagtccagccacttcgctggactaggcaacctgcaaaaaggggaaaatatggtaagactatcactacaagttaatttttaaaaattagcagcagcagttatgggcaaaatacaagaatgattgtgacagataggcttaccacaataagatccatgagtgttgaatatgaccagtgcaagctcaaaactagaattagatgtcttctgtgttttaagaaaatcaaatgaataagaaacacaaaaaagagaagttctgcaaatatgaaaaatggtctgtttttcaaaaatttcaaccataatttgcaagtacaacagcaaaaaaaaaatgtgggggtccacataagaatacttgattggtttggtgttttcaaaaactaaatttgaatatgattttgagttttaagcttaaaaatgaaaacaataattttatgttttttatgttttcaaatcattgaatctaaaaactcttcaaatacactcgtatttttttattttgagattcccaaccaatcacaaatttaactttttaaaactcaaaaatacaaaattacactacaaccaatcacatttttaaaaccaatttttcacatacaaaattcaaatttttgtttccaaaacactcttttagaaaacgcaatttttatatctcaaaccaatcaagctcttaatgattaaattaacacatgcatttatttttaaatccttaagacgtacataagaaacatttgttttggctttccttttgaaccatgtacttttgttgcacacaactgttgaaaatgaaacaaggttttaaagcttgacattaatcaaaatacttggtaaaagctttttgttttcctaaccttctctctcagcctaatttcttatgcatgcatgcacgcagagctatacacattttatataaatatatacacatacacatatatatatatctaatactttgaaaaggaataaaaatgtgaaccatatcaaggttagcacacataaatgagaaattcccacatgttcagcagaaaagaagattgtcggcacacacaaaaaaagacagaagtgaaatatgactttcagaatgtggaagttaaagtttaaatctcatagaagtttctgcatcaaagctcaagtctctgccaggattcttgggtgaatacatcagcgaaataaggaaataagggaaacaaaaatacaagtacaggtgtgctacattctaagtgatcatacataaaccagcaatcttgtcatatggctttccttaagtggctagcatagaaatacaatttcaaaatgaagaaaaatttcagacaacgtagaattgcagtatcattacggcgggaaaagggaaaaaagaaaaagaaaatatcagacctgcccaatcaattcacttccacagaagtacctgcaaggataccaaaacaaatcaatatccgttcaacttcacctcagtttaaaacgaagtaaaaaaatgatttgtcaaactaaataataaattgtttccacaacaaatgaagagctttcaagcaggtggcttgttcaataccctgtagtccatgcagtatttattttaagagggaaatacaagtaaataaagctgcaagtgtataaaagttacttgaaaaataaagaagtgtgaaaagaagattattgacaaagaaagaattgtgtcaaagatactgtaccagattaattagaatgggcatttaaaattagaaacaaaacctacaacagattcgtgataattttaaaagcagtatcattttatttcaaaaaataacaatttaagcagacccttggccctgcaacactgtaacttgtagtctgtaaggatactatcacttaggaaactacaaaa

SEQ ID NO: 70309 - DNA, 2086 bp, Cannabis sativa
ttaatttaagtatttaataataattcgcagcaacaagagcaacaatttttacctaccatgatatgacaacaatcttagaattaattttaagatagatctcacctttagatgattttcagttttatgttcctttatacattttatagaaagaattttttttaaaaaatattcttcttttatattttatttacaattttacagtataaaatttttaattataaaaatattattataaagtttcaaaattacaaaaatacattttgttaagcaaaaagtaaaaaaaaaaaaatataactaaaaaacaaggtgaaatcatgccccacacaactataaattaattataaaacaaccaaaaaaaatcttatgacaattataatacaaccataaataaactaacaaacaactaaaaaaacagtttattatttttattgaagaggtatttttgtaaataataaaatttaaagagtaaaattgaaattttttttcgtgttgatacatttttataaattttttcaatcttttggtctattatgtaaatttttattattttataaactaagatatatattgtaattatttaattagatagtatcagtattagttagtttgtctaatgaatattattataattaattattaacttcattttttgctaaattgtgattatatatttatttaatgcagatttggtttatgtttaaatcagttaattgttattttattatttaatattttttatttgaaatatatttaatattaatttaaattgaaaaataaatttagaagtattagatgaggacggacacccgtgttaataatagtgttagattcactatcactaattatagttcatagcgattttttgttacaggcggagctcgtctccaaaaatctttaccggcagattcctttattattatcggcggacccacctttctgcctctaaatcttatatttgttgtagtacaaactttacaaatgaacactttaatttttggctgaatggaaaggctccaaatataattctaccaaaaaaaaatgacccctagaggtaagcctccctcacctcgacttaaaaaatgtctgatagcattccaatgcccgtttaactcaattaatactcatcattgtaatgttaaatgagggtgtcatgcaaatggttagaccttggatactaccattctatatgttacaattgtgcaaataaacatcaaatctgataaattaatttgaataatttaaaatccataatttagttaattctctaaaatattgatcacactatatatataactttacagcaattatctatctttatattgatccacgtgactaaagtgtagaatatatacatatgctccaaaacatataagctattcgtaaaagtaaatattagactaaagaaggaattgattgcatgaataagggaaaagcaggaaaaaaaaaaaaaaaaaacaaaccacacaaaggctctctttaattagttcttctcttgttggtggaataggaatgtactacattacattacatatatgaacattattatcatgatcatctgtagtgtgtagtatatatatatatggccagattttttgacaaggcaaaatcgcaggaatatatgacatgaaaaaaaatatgaatttggatacaatgataaacgtcgattgacaaagctaggtttcattattgagattaaaaaaccctaatcagagagaaagttgtgtgaggaattttattaattttttttatattcttttccaattttgctacaatgtttgcctcaatcaatcttaactcacatatagtgctccagcaactaaccaaaccgaaccaaaggtttttttcattttcaattgttattgttatatagttttattaagtgacaaattaaattataagtacgggctaaaaaagcatgaagatttaaaaggaaaaatataaggaaattaatatgatgaacatgatttcgtacgaaacattatagcagtgattagtcatttgcacaatttgactcaatgttggatacctatgttaattaatataatttaatcaacactcattaaaatactttttcaaaattctattt

SEQ ID NO: 70310 - DNA, 866 bp, Cannabis sativa
cattccattatttggtttagtttcatttaatattattgaaagtggaacatcaaatttaagaagatccatattttaattggttttggaaattgtacatgaggaatgattaagaagacgtaggcaaccaattatagatgcacattaatttagttcatttagatcctaatccatgcagttggcccaattattggagatctcatggttttgggtatctcaaatctaagcatagccactggctcagtcggagatctcatggttcttgcaatatctttgagaataaatttctgaattttcccagttgaggtcttgggaagttcatctctgaacacaacaactttaggaaccatataatgtggcaacttctctctacaatactccacaatctccatcttatttggcatcacccttgtccctttcttaaccgttataaaagcacacggcgtttcgccccagaaatcatggggccaagctaccaccgcggcctcgtccacagccgggtggtcgtacaaaatcgactctacctccacgctgctcacgttctctcccccacttatgatcacatccttcgacctgtcctttatctccaaatacccatctgggtgcataactcccacatcgcccgtgtaaaaccatccatcttcctttatagctttagcagtagccagttcatctttaaggtagcccatcatgacgcaattacctcttaacaccacttcccccattgtgaaaccatctctcttcacactcaaccccgaattcggatcaacaacatcaacttcggttattgctgctgaattcactccttggcgcgccttaagccgggcgcgctcagtagctgggagaagattccacttcttcttccaagc

SEQ ID NO: 70311 - DNA, 6744 bp, Cannabis sativa
  modified_base (6706)..(6718): a, c, t, g, unknown or other
cagcctccttgtagtagccacaacgatgttcctgataacaaatcccatctcaattttctcctcaaatattatttataaataacgtgtgtgtatctgtacatatatgtatatatatacacataaaaatatgtattgtatttataaatatatttatatatagagagagaagagaaggaatttttgaggtctcgaactaaaacatggatgtatctatgtaggtgttatatatgaaaggtggggtctctgaaattgtatcagagagatttttcgagaagaaagacaaaacaaatttaaaataaaaattaaataaaaaaacaaaaaaaaaagtttaaaactacttgagagagaaagagggaaagaaagagatcttgtttgttgggtggcttgctttctttctttctatcttctctgtaagactactgctgctgttactaacactgtcactttggctttatgaccaaaaaagtttagttcatatgagaagagagataaagagaagaaaaagagggtccgggcggcagcagcagctgctgctgccatagctgcagacaataaattataaaccagcagaagatataaaaattaattatatataatagagtagcttaaatatatatatgtaataaataacgacctttttctctctttctccaatttttttcttttttttcaactactagtgttgtgaaccctttctcctctcctatattatcatcaaatcttagatctcttttctttctttctttcttctttggaataaatatagctttctttctttgtttctttctcctcggaacagaagtaactctctttctctctctaagattacttctctcttcaacctgtttcctagctagaaagcgaaaactgaggtgggtatctctcaacctctcactttctttctctctctctccaataatcaatcacacaataacaaagcaatagaagaagagaagagcaagagagtataaagacttttgttctctagtttttggtcttacgcgggcactctctaaaaaagtcacatgactgagctataaccctatatacgcttctcttctctctctatgtattaatatttttttttttgcttttttagtttggttttcttattcattccccgccgcgtgtgatactcacctctcttgagcgcgtggagtctcgacaccagccggaatgcgcgatgagcaatggcccattttgaaaatgatagaagaggcgcctaggttactgcgcgtgtacaacacgcctttaatatatttttgataataataataattattgctatattttatttttcattaattaaacgtggagtccaagtaggagtggctctacagtcccaaatctaatggttttgtcgttttggattgagtttgtcagaataagcaaaatggggttgaaagactgtcagactctgtttgtaagcttattatatgatatgataaaattgcacatttggtacaaatcattgtcttagattgcaatttcgcaagtgatcatcacacttcctactttcatattaggacttttatctaaagatattttcaccctctttgcatattatttaaatgataaatttaatactagtaggggtgttgtaatgtaaggtatactttttaactaatttcttaaacttcatcgcatatgtcgtttgagtaattttcgaaactgtactcgcacgcactgtatagacctcaaaactttacaaaccacaccacaaaactacactgccctgcaatgcgagcggtttgcacactaactaattttagtaattattaaatataaataaaattagtgaatatacttatttagtaccttgtgttttcatgaaaagtatatttggtaccttgtatttttaataatacttaattgatacctcatatttttaaattttacatatttagtaccttaaagtaaaatttaatcaatacagttttatcaattcaatcaaatagttctcagttatatgtaatcaaataattaaatttgaattcataattaataaaattttaaactgatgattgtattgataaaattttattaaaaaaatttaaatttagggtactaattaggtatgattttaaaatatagggtactaaataagtattattaaaaatacagagtaccaaacttgtatttagataatacacagagtaccaaatgtatagacacccataaaattatatcatgtagtttattcacaaaaatcataactacaaatattaaacaaagcaattaaataatatcaaaataaaatacacaaaatagaaaaaataatttaaaactcaaaaatgtaatataatataaactatgatatatatattatatattttacttaaagtattaattaaatattaaatatgcaatgtggtcacttattttattccatcaataggcgtatatatatatatatatacataattaacaaatttagtgcctaaactgctatattattttatataatataatatttagattaaatatttaagtaataaataatttaatttaaaaaataatatttattaaattgtaacataaaaatatgaaattataaatgtgtgaacaataatctaaaaagagctatatagatccttttattgatgatcatataatttgtaacttatcattgatcttcactcttaaattagtaaattgagttattaatttgtaacttattgtgggaagttttgaactccttgaagttattttgtaaaatgatgaataaattattaactagttactagttactaagatttttaaaattttacactacattctacatgttgcaaagagacaggtgacatgtcgcctggctaattttcagcatcaagttttgaacattgtgttaggttttaacaactttcataactcttaaattacttatttaagtctataaatgctcaattcaacattagtaacagtcaaggactttatggtggttattcatgttcgaataaaagttaaaactctataaatagaagacatactattcacttgtgacacatacttgaaatcacttcttgtgattaaaacattgtaaggatatgtccatccttagacattggttgagcattatatgaggcttaaaaacccttaagagtatttttagagtttttctaattgtctatatgagggaggtaataacttttaggataaactttcttgagtcttggtcaagtctattgtgtgttcttgagtgtccttttttttcttctctaattatcttctaatcttgatgtaatatatttatatgtattttgtgtatttgattgtcatccttcatattctctcttgtaaaaaatctctaacattctaaaagtcatttgtgatggcatactcttcattaaaaaagacaatatgtcatggagggttatacaatcaaaagaagttattcatgaaagaagagcatcaatcaatatcacaagaataagaatatgtggtaagatattgaagtcattcatggataagtatgataaatttattttgtgttatattatttaaatattagtaatatattaacgtatttcatagagatatgaaatttttacatattaatatatatatgtatgtgtattatattattatatgtagtgctttataattttataattgagattatagtatattagtatatgtatatatatatgtaaaagatataatatatatttgtaagattaaatatgtagaaatagtaagtttttatatagcatatatatatatatgatatatattgtgtgtatgtatattaatgtatttgtatgttatataaataaaatctgtaacatatatatatttataaaaattaatattaatattatgtgtatattatataatatgatactataagagcatatatacataccatattaattttttgtgtttatatatatgtacaaatcattatattaatatgtatattatatgatacgataattgagatgatgataatagaaatgtctttattttattattattattaataatattataagacttattttgtgattataaagagttacttggaaatgaagttctattttagcaataatcatcttatattatgaaataaaaaaattgaactatgagagttacagttttatgagatttctcttgctatatcaagaacaaatagatcaaagtgaatttaaattatgagttgagccataaaattggaagaacaagtttagactcaaataaagtaaatcatagtggattgaaaatgtgaaaagagattacaaaattggagaagccattttgaatctttaaaaatcaaaatggtgaaaaaaattgatgaaaaatttgttaataactttgataatattttgaagtaatatcaataaggagacaaccatacaattgaagaagtaattttattattatgtgaattttgtattatctatcaacaaagtttcaataataattttgttaataaaaaaaataatagatgaaaataattttattattttgtaactggtgttttggatttgacaaactttaattttgataaaaaattaaggtggcatgtggttgagaggaatgaaattataggaacaggtttgagagtagcactaagaatggatagaatcaaatttaaaatatatataaaaagaaatgataaaaaaaatattaattttttttttatcttgcattggaatgttcattccttctattttaaaatggaatagtcattctacaaacatgatggaaaagtcattacattagaatgatattccaatactttaaaatgcaactaaacaaaagaatagaataaaaattatttattttttatgtcaaaatagtatttccaaagtgatctcaaagacattttagaaaatatacaaaaagttgttcaaataatgttgagattatttaagtgaagtgtaaagtcctctatggtagaaattgtgagtgtgagcctcaataactaaaattattgtgagattatggattaaattcatgtgattttgaattgattattctaaattaattttagttatgtgcatatgtgaaattttaatatgtttggtatcaaaatttagtaaaaataattttaaaaaggaaataaaatataagagttgtaacaccctactagtttaggtgtgtaagcgtgatttttaacttaaaagtgcacctcgttgctaatcaacaagtttattgaaaatcgtgaataattaaaactttatttaactaatcataaataccaaaatatacttgtattaactgggatcctgttttacaaaatatttacaaacgtttcatagtgcaagttacaaaaatttgtcgcctagcgactatacaacgagaagtccaaatactcaagcaggagggcgaagttataactggcacctaaagggggctagccagccctatggccaacataggccgccaagttttggacatcccatgcccggccagcatgcatcttggagatgcatggccgaccatcttttggcctggcaagattttggtcacaactttcatacgtggacaacatgccatatcacgaattgggccttaatagcccacaaaaatagaggaaaaatatctattttcaagggacattttagtcatttatattttattaatttaatatgtaaaaaataacgaattggacaacataaccccttcctccatatctctcttctctcttattcagtcactctcacacacatctccataccctgttgccgtgcccccatccactcatccaggctccaactccagcagtgttctagtggaacttatcatgactccttccattcagatctctagcccttaattcctatcaataacaaagcattatcaaaatctgaactgaatcttcttttcttcaatttggttcaacttgctcttcctcactatgctaggtattgctttgaaatgtgagggcatactatcaaaacactataggcttcaaattattcagtagagaagaagaagaattttgaaactaatagctctctttattttctaattgtctgacaaaaggagtctaatcatcatctgaaaataagagctatacttttatatttatagggtagcttttagagtcaggtttggaatttaaatgtaattaaaagagataaaaataatagctttattaaaccccttggctgaaccctatagtgggcctattgagttttaattttgccattttatttaaactcatctttctttcagaaactccatattttaattctaactcaataaatgtaaattctatctatttaataattataattaaaccttacaaagtcttttatttaataaatatactctaaaacctcttttcctctcaaataagtgtttgcttagtgaaaattctcaaacaagacttagtcttatttagaattctaattgattaattaaaatcaaataaatgagactacaaaacagtattatcctagttagtgcggggaccatgaccctacgttaccaagcttctaataagtagatctgaaatttaccaagtaaattttctaacttattaattcctcctgactctactatagattcagaattgcactcctgattacatagaatgctctatataccaaaaatagatgtgctttgaattatccatagtttcaatccaaataatcaaagatcttctatagataatctacatcgagtaggaacaaacttaatattctacccctcaatgtattttatccttaaagcacttagcttcctataaatgatnnnnnnnnnnnnnaatataattactgaaataagagctct

SEQ ID NO: 70312 - DNA, 1909 bp, Cannabis sativa
atatggtgcgactaacttagagtatcacgtacacacttgcatcatatttagataatttcttgataatactctcgataatactctctaggtaattaataattttgattataaataatatatatatattatatatacgttaaaaataaaaaagaaaatatatattaagattggatatggtgcggattgtattataccgtcctcgtcctattctcactttggatattaaaattatttctgaccaccgccccattaactgcgaagttgggaaatctccactctattacgggcaggtccctacggttactcctgcggtataaattttatctctaatgagaattgtgattacggcatattacaaattaatataagtacagaacatttgaacatagagaaggttattttagaaaataatatgaaaatttaaccacttaatgtaattttttctattttttactatttaatcattaaagcacacatatatttttttaaataagaatagaaaaatacaattaatagcaaatataaattgacgtgaagaaaaaataaaacttaaggtagcgtttggaaatacttttttaatcagctttctacttttaaaattggaaaattaaaaatattttttaagaacatgttctataaaacttctttcactttttaattttttaattgagaatcaaaattttgaaaaaaaaaatcacttttaatattttattaaacagtttttttttcttaatcaatgttttgaactccgaccagacctggacccaaatgccccaccacggtcctggcgttgaacccggcctctgacctgaacccgaatccgaccccggacctagacccaacttaaataaaatcaaaaaataaaaataaactttactgaacacacttttattttctagtttttaaaattgaaaaacaaaagtggttattaaacgcatttttgtttttcaaaaacaaaaattttacttttattttgtgattaaaaatttaaaaggcgaaagtgttactaaatgatacctaattttcttaaacatataatttaatattgagtattgcatgttttaaagggagttttactttaaaaaaaattataaaagctctctattttaatatagtttttttacataaaatatatattttttaatttatgctattttttttttcttttttatattcttaaaaaatacatataaaataaaaataaaatatattttaaattgtaagataaaaatattatatgaaatgttattaaaaaaattatacattattttaaaatatttgacagttaaattaaaataattattaaaattaacaatgatgtgaaaaaatattaaattttggacaaaatttattgtctttttataaaacaaccgtaaaataacaaaacagaacaatttaaacaaaaatataacaactgaaaaatagtcttggaataaccgtgaaaacttaacacaatacacagtataaaacttacataatatttttaaagaagaacacagtattttttttaaaaaaaatccgtccttcaatgaaaatatattgagagattttgaaaaaaataaactttcttttcttttcgttcctttatatactccaacagtgttatgaatgaccactgggtagtattgggcttctaatccatctttattactcaaaaataaagaattgggccaggcccataccaaccgggctcaagtctgaacagagccatgctctggccatagctagcttccgttccatcttcaacttcaagcgtcgagctcgactctttccctctcatggcacctccgcgaattctactatgtggtgacgtcttcggccgcctcaaccagctcttcaaacgattcgctgcggtatctctctctctctctctttgtttctctaggatgttctgcttccattttaggtt

SEQ ID NO: 70313 - DNA, 1262 bp, Cannabis sativa
tatttttaacccgctcaattaacagattgggcggtttataattttttcgggttatttcggtttgtaatttttatcgatttgatttgggcagattattcagtttacaaattcttttgtacagccctcctacctactgagttaatattaagattaaattcttctattttgatgaatcatcatatttgtcattgtacacaccacaacataacaaatctattataaattagtcattatgtgtttggatcacatggtactttacactttaataaaatattaaaaaaaaaagagaaatttactgcataaatatccattttattgattttgttgctaataagtaactaattcttttattacaacattaatactcaaaacttattttttacactactcgttggtactcactaatagaaattagttttttttagataaaaaaaattaataaattaataaaactaattaataaatttgaagcataaaataaaaaaaaaactaataatcctttaatacataaaataaaataaaaaagtagaagataattctaattgcactagacgggaattcaagagtcccacttcgcaccaccatgatgagaaaccagatccccaccatcgcaccaccacagcgagaaactagagatcgagcaacccaattgtgcaaccacaaattgtaacccaatcacaccatctttttgtaaatccaatttcaccatctctctataaaatccaatcacatcatatctctctgttaacccaatcgcactatctctctctaaccgaatcgataacgagtgatgagaagcttgaagggcaatatgatgtagcaaagcgctgtgatttgcactagtcatttatgttgatttttggaattttatgttgcaatttcatgttgaagggttgtgatttctttaaaagggtggacatgaaaagttgtttgaggtgtagagaaatgattcctagcattttaagaagaatgaatgggcttgagcatcaattgttggtttatgaacacatgaagaattggaaaagaaaagggggttgatggacatatttcctatgcatggtcatgttcacgagtgctatccttcatggatgcctctctcaaaatctgagtattgcaattaataatgggagattgctaaaaaaatattgaaataattgcatattaatatgttgattttaaattatttaagaatttcttgtcagtttttttattaatgttaataccggaatgggcataccgagactattgttcattgtttttgt

SEQ ID NO: 70314 - DNA, 1941 bp, Cannabis sativa
aatatttctaacaatactttcaatctacaaacccaaccttcatcactagtaaaatttgcacttacaatacacaagtctatcctcctagaaaaagttctcctactcttaactttcataactcttgatattatccgaagtaccttcttgcttatccaatcttcaatttaaaattgtatcgctaagtagggccataagctttacaatgaaagattgaacaattttctacaacaatcaagaaaatttatataagccaatacacaatttaaactttaaatataaaatcacctcatttatatataagaagagaaattttattccataactctttagctttatatcaggttataaaatgaaattctattatctacaaatacaacaaataaaattcaacttagttggatatatttataaaggaacttagctgagttatgttttgtgctagacatttgttttcttctttgcaaagtataaacaaaattataacagtacacgagttaccataaccttaaatatgtataagctctcttttatcatcaataagaagctagaaaatagacctaagactagtaataaagcactccaatactaagagaaataatactaaatttagcataaggaatagttagtatttgactcattactatcatattgtaattcatttcttgactcattaaggcttacttttcctattagagaacataaggataaggaatagtaggagttgctgaagctctaaatcacctagaaagagtgcttgtgtggtgactagcttagctataaggaacataaaggagagatgagtttaaagacataaaatgtggaggaaaaaaatgagagaagggaacagaagagctattcctaaccaaatatgcaaccgacagaccacatatccacattcatgtaattaacaaaaaagacatcataataaatatatgtagttacaacatagacacatcaaagttgcacatgatcattggaaaaagttctctataaatgtatacttttatttttatggtttctcaccatttcatattgggaaaaagttctccataaattcattcgaaaccaaagtttcgggctatatcatactagagagaaccacaagttaaagactttaatctttgatcttatgatataaaaagtccatctatgcatccaatagcaaatacatatgtaatctagaagttagaatcatcatcaaagtttctcaattgtaaataccgactaaagacttgaactgaatgccataaataaaaacaaacaaacaagtaataaaaggtgtatacatgctgaattgaaattgttacacactacactagtcttcttttgacaattatttgcaaagtagtttttctgacacactcgacactctatcaactacactcgattcaatactctccctaatttactcgaataaatcgacattagcaaacaactcaccattatctcaataatcagaaaaccaattaaaaatattactcaaacacatgtcaaatatcattattaataacctgttggaggatgacttgttattggatttcttctggagatgaagataaacacagctcaaacctcctataaacatcataggggatgtaaaaagaagaagatttgtccctgcaaagtaattataatattactttaataagattctactaattaatggagaagaaaatataaatgatataaatctaagccatacactaataacaaaacacagtaaaactcactctttagccaataaaatgatataaatctccattaactgaattagcattttcatcttcagaaactgttttcttctcaccagaaccattctgagattcattcttggcctcagcttcttcctttgaactcatttcttcttgggtttccacaacagtttgagaatcaaacccactgttatcatttgttgttgttgcatcctcttgtaagtcacca

SEQ ID NO: 70315 - DNA, 1834 bp, Cannabis sativa
gctgaagctattggtgttcgagaggccttaagttggatcaaagaccatccgtggaccaatgtcaccttggaaaccgactgtctctcgattgtttaagctatgcgaagctctatgtccatggtttcaatgtttggcaaagtgattagcggatgtaaaactttatttcatgctttgcgtaatgtttccttttattttgtaaagcgatcagcaaatatagttgctcactcttttgctagagctgctatatcccaccctgatcgtcgtttcaacttggacaatgttcatgttgagttgttgccttgtttggtaaatgaattaatcgtttaataaaatttattttcaaaaaaaaaaaaagtataaggataaatatatgcatggtatagtgccaattatgtaattaagaccataatgagatggtcaattttaattaactatcgcatataaggatcatcgtggcaccctaatgactgtagattaatacattaatttatagtccaccactaatggtaagtcgaaacatgtccattttttttcgtaggacaaaaatgacataataatgtctttttgggtataaaaaggcataaggtcaaaagatagtttatggtagagggcttgcaatcccaatagatcctctcttgctctacactctcttgtgttcttttgaccttggactagttggcaattttaagtggctcatggaggatgagtgctcaataacaaatgtatgtatattgtttaatttaatgctctaaatagaatgtacttttggatattatgagcattgtttgtgtttattatcgctcattatatgtataattttaaacaatatacttaaagaaaattttatttcattatataattatagccccatacattgataactagttaatactgagaaactaaaccaccatcagatactccagccaaatctccattaagtctgctgcagttcgacctaatctctccatttgtgccagtcaaaaccctgatgttccccattttaatcatggacaccacaaagctctcaaagaatgcagtttgattggttgtaaagttgtttacaatggaaatagtatctgcgccgcttgtcgaaaacaactcttgatctgtttggagaagcccattttgagattgaagatttgtgaaatacctattgtcgaaagtgtttggtgttgaaagatcgagattggttaggacgctcccattcccaccatcagggcataactgccttaaattttctaacaaagttgagttgagtgatgggtcaggactaccagtgttgttaaagttatatagtctgtggatgaatgttaggcattgagcccttccaaatgtgtgagcacctaacaattcagttaagttcttgacaaaattagtttacaacttaataataataataaaaaaaaactacaattgtgtgtaggtatatttgcactaaaactcctcaatatttatggtattttgtcaacattaattaacaatattgttcaaatgggttctagcaagataacataattgataatttgactatcttttaaaaattgggtacttattatcagcaataaactcaataatttgagtatttttgtggcaaattttcctataccaaatatggtgtttaatttgagaggttaaataaaacaataatttgaagagagggtgagaaaaaggcctcacctgatagagcaacaagatcagtagtatccaggttttgatcagaaaatttgctctttaattgatcaagagtttccctgaaacctgggaggacttcattggccagagttcggtttgctattaagctgtcccttcttcctaatggcacactccatgaggg

SEQ ID NO: 70316 - DNA, 1292 bp, Cannabis sativa
atatatatatatatatataacccttaaatttttaaaatagccaaaaaaaaaaaaaataagagagctagaaatcaaacccagcacccaacactagaatactcactctctcttaccaattgtattataactcttgtataacatttattgaaccaatatatatgttatatttatatatattaattttaattttttgggaccttcgaaattgtgaagcttgggataggccccggctgccccaccttttaatcggccatgatgatcagtgagactttaataaattcaagtgccatattttccattcactttgtatcatagaataatttggtcataaaattagaattttatttagctaatcatattaaaatataaagtttacactactcatcaattcatcgtaatgctaccaaatatttagttaattgtacgacaattcctacgaatctcaccattcgaccctgttaacacacctaaggcacccattttcagcatagaattctgaaagtcatcgaagaaggcaaaggtgtcttgagcatatgtttcaacaagttgacgagtttgatcatctcctgtcaccaacacctggtctgatggaagcaatccctctcctgagatgaggttcacataatactggttgtcgaaagttgctggtgttacaaggtcgagttgggcaagaatgctgctgctgctgctgccgccgccatttccaaaacccgaacacagctgttgaagggattgaataaaggctggagatccatcagtggtgtcttgcagccgtgcgctgaacgatgagcatctcgcctttcccattgtgtgtgcacctaatcaaattgttgcaaaacaccaacaaaattttagcttacatttattattttgttcggttggattttaaagtattcgaacgaaaatatttcatcaaaaaataagagaaaatgccaaatttaacttataacattaacaactagtacgctgagttctaacatttttttttctagttacttcgttctcaaattctgtttcaaagaatatttaggaaacacattttgtttcaaccgagctaaaaaaaatttgatgcctctagtaaactaaaatttgaatggtttggctcatattttgtgcacccctaactactactatcttagttttttttaagcactatattacacacatatatgtattgttttttttgtgtatgcactaggttgaataattttatcctgtttataacataaatattaaaatttaaaatattcatctcaatccaacccaatccatatattattgtactaagtaag

SEQ ID NO: 70317 - DNA, 938 bp, Cannabis sativa
gagctttagaattttgattgtgttggacgatagtattggcagtagtggttgagctttggccaatgtttttctagattgataacatccactttgaaaatactgtttttcaagctttataaaatttctttttattattttaaattacttttaattttttaattaatgtttataataattaaaataatctagaccaatcaaaatataacacgtgtataattgtctacacatagacgacactttaacacttaactgtgaaaacctaacataagagtaaaggtcctaacaaaaataaaggatttcggctaattatggggtaaatgtaacaaaatatatacttaatgtaatatcccttaaaataataataagattttttggcgattaaaccttcaaataatcgtttacttgtactttactctttaagctcaaattttagttgtaaaactctcaaaactactaaactgttagcaaatttaaggtatcattcgattacttgccactatggactgcttatgtgtacactactgtacacgtgatgtatttatattggtacacctaatattattatttaaaaattattttagaaaattaaataaaattgatatatttttttaaaaaaataaaaaaaatattaataataatatcaggtgcacgatcaattacgcccaaggtccccacccaagtcaaaaaaactctttaacaaaaaaactctatatttatttttcaaaaataccatatgttgtattttaactattattttttaaaaatatatctattttctaaaataaattaatttttttaagatactacattaatattttattaagataaaaagcttacttatgttttcaaaatactatattttaaatttttactgctatatttaagaaacataaaaaattttatataaaaagacctaattaaattttgtggcccaagcc

SEQ ID NO: 70318 - DNA, 1318 bp, Cannabis sativa
atatagtactaattgtttacaggttaaaaaggagaaatatgttatcttccatggtggtatggacaaggagtggacagaggagattgatgagaaaataagcttcataagtaaggatttgaatatcaagatcaaaaggtttaacattgaagaaagagttgaggtcaaaaacaagttttggggtggcatagacagccttatgctcacaaagttccacaaggaagagtactactttgccaaacaacaagtgaaaagactttcttcttataaacacacacaaggatggtttgcacttaacaaagggcctaccacggtggttgttggttcccgagcgactttctcaaaggcagtggctgagtttcacatgtggaaagtgagtgttcgccagaggacctttgaagttgctttcaaagagtatcatgaaaaactttgtaagtctctcaactctactcatgagttgtcgagtattgcatgttgtagttcgatgagagccactactatccaaaaaagtttcggcaactgctgcacgattgagagtgtcctaaccgcgactggtgagtatccggagaagataagttgcccagtgtgtgaccaggtcatggaaattactgtcacatacaaatgttatcatacgtctaaagatgatttccattgctaataatggatatgtattctccattggatccagcttgttcgcactacgtagtacgacgtattttctcttatgatctaataaacacatacatttatatgcatgatgtgctttgaatgtatgtatgttaagttttcttaattaatttatgagtgtgttgtgtattttagccttgaaaaaaataaattgttttaggttttaaagttatgaatggtttctaatacttaatttatgtaatttcctaatgtattccttgattgctttatatatattttgaaaaaatgaccataaatatattgtttatctaattatcaaaattttatcataaaattgtcgatatttgcaacacaactcctcaactcctcttctttgttttttctttttacacttaaaaccttaatttaaaaatattattgcccttaagaatacttttatttgttgtagtctctataattattttgttgtagttgaggcctttcaatgtcacgaaacttgctaagtgcaaactttggtatatatcttgtgttgacatgttttaagttttcaagttttttttaagaaaaaaagtttatacgcaatatatacgttaatttggtactatactattttttgatctagattttattatttattacttatgtgtacccaccttctctctctctctctctc

SEQ ID NO: 70319 - DNA, 1024 bp, Cannabis sativa
  modified_base (772)..(780): a, c, t, g, unknown or other
taattaataaatagtaagcttactcgaatgaacaaagtcaacattactaaaatcatgcttaaaattaatcataccaaaacataggggttcatagccattcaagtctcaagaatgttagctcatgttcaaaccagtaaataaaatccaaaataaaatttgttcatccatggttgctaattagtctttacaaatcaacaaactccaagtatataaagaaaggaagaaaatagaagaaaaagaatagaaattcaaactaatgaagcttgtgtcctcctcttttttccttgactgacttcctcttttagatacttgattttcagtactttttctttctgcaattaattcttctccaaaaatggcaacttactacattaatggtgattgtacttcatttttaagttgttaggtcattagggtacataccaataccctaaaatagaagtccatttcctttttttttcttggctcaccagccttagtcgcctattctcatgtcagcaagttggcataaatttaagtgactaccacctttacgctggttcagctaaagaaaattctgctgcactttgtccatgtcactggccagaatgctaaatttgttatagcaacaattcatcccagttttaactttcatgcccaatttgaccttgcatcattccttttcccttggcactttgactcttttttttttttgagtgtaacgtaatggtattttacaatcaatgaataagttgtagcttaaaggtcttgggttcgaacccatgacctctcnnnnnnnnncatccatccctcaccactaagctagccttagtggcttaagtagtcttcaactcttctttcttaacaacaaacaaacgacatctaattaaataactgcaactaaaaaaataataatttcacaagactcaaaagctagcatactaaatagaaaatgcagacaagaactaaacaaacttaacaaacaacacactttcattactcttttcatgatattgttgggaatattttaccaggatctatattt

SEQ ID NO: 70320 - DNA, 1753 bp, Cannabis sativa
tttcggtattatgtgattagttaataggatcgatatggcatttttaaaccgacggaataaattttttgtgacagttttaaaattccatgaaacatttagcgtcattttttaaccgacgctacaaataaaacagaaaactaagtatttagcgtgggtttataaatgtcgaaaatgtttttttgcgtcgttttgaaaatgatgctaataaaaaactatttgcgtctacggtatatacgtcggttttataaaccgacgtaaattctttaagtgacacttaaaaactgacgtgaatagtgaattttgtagtagtgggagtatcatagatacgagaacaaaatctctcagaatgaccaataatgtcacatataaaacaaaatgtgggaatgaattcatatttgaaattagtccacagccaatcaccatctggtttcttcagcttcaattttctttttagtggtttctcaacattgatactaactctgacacgcaaatagttcctccatatgccattaaagtttctaggatccgacttgtcataagtcccaatataattaacaacattttagactatagaatcagacataaacccaagtttgagactatgcaattgcacccatatgtctaaacggcaaagtttcactaacatggggtcttccccttcttcaatcgttcaaagaccaattgaaacttgttaaatgtcgagagacttccttctattactctttgtatattagcttcatggtagaattgaaagagatacaaatttgtttggagttctttcacaaacataccctttccaggttgccataaggatgccatcgtgtgttgcatagacagaaaatcaatgagcctacttgttaagaattttcctactagacaccatctgacatcaattggctgccccacatcctctaccaaatcgcataacaggactccttcttcttcttcctctagttgaattttcaaataactatcttccaaatctgttggcacagtgctgctagaagccatgacaagacaaaacacagattctcactctcacaccaaactgacaccaagatcaggaaagcactcacactcatgctcacaacatactcatgtcaaaggacaagacaagttcatgcctcttttaatatgtaatgtttggagtttgagattattatgagagcagagcaatttttgtgaggctttttttttattttaacaaaaacgtagtaataccattaaatcaaattaactgtttataagagtacatattttttttttcaatttctgttctctcaattttttagattcacttctatttttaaagatttaattatatatttagtctattcttttcttttaattagtactatttaaacccatgatataattttaaaatttattacattaatttataactgtcaaagagtacaaatagtttttttttttttttttttgtattatcaatatataaatatataaaggaatgtcaaagagaggtgatgtggcattttatgtgaattttctttgcttttcttttttttctcattttttcacttttcttcacattgtttatgcttttggtaatatgagagagtcattttaaaaaagtcccacatggtttaaaaatcattgtaggtgatcactattcttttgctttggattgtcccaaagttagtattatttattttttatgtgggtgattaataaacttaatcttgcccaattagttgtagttttttttaaagtaaatgcaaaatatattttt

SEQ ID NO: 70321 - DNA, 1874 bp, Cannabis sativa
tttttttttttttttcattagtttgggctattctcaagtattttgagtttaatttaattacttttttcctaaaaaagcattagttaatttttttttttttgtagttttacttagttttgcataaatattaatcttaatatttttagattgattttggttagttttattattttgtaaattgattttatttatttgttttttataatcaattactctcaatgctgtgtattttcatgggagcttaaatataaaatttggacttgttatgtgctagttgtctcaaatttatggacacaccaaagctcatttatctttgcaaagtacccattttagttttttttttgataagtgtacccattttagtttactaattgatttttgggccaatgttctattaattaaaatacaaaagaaagcagagaaaaaaaaaagaaaatgggccagcccgttcattgagggctttgtttttgacaaaactaagcataatatgtagggattatttcaaaactacacaaaaacaacaaaaaattataaaaatacgattgtacggaatttggaatatttttcagtttttaatatttatttacataaaatagtcttttgatgtatttttatattgtactcttattattttattattaatttttgttatttgtatattattttttatgctgttttaatattatttaaatgttgttttctaattatttttatgtagttttcttattatttttataaatactgtaaaaatataaaaaaattcttcaaatataaaaaagcagtaaatattttactaaaaataatagttgatgtaaatttttctattatatattattagcacgtatattatgaggaggcgaggtagtgacaccgaaaacaaaaagaaaatgaaggaaaagaaagtagagtgccttctttaagctttttattttttaattaaaaaagtaaaaatatataaaaaaaatgttctataaaattattttaacttttttatttttaaaataaaaattaaattttgaaaaaaaaagtcctactacaatagtgacttgggtttaagtcacatgtattttaattatactagtagaccgtataccagtttaatagttattattcttgtctcatgtaagactgagcagctagcgagtttgaatattatctatcaaatttatatttaattataacgagttatttaaattgtatttaataatatatcattattatattatcagagttaattcatattccttctgtaggacacgtgttagcttctggtacatagccaaattttaggtataataattgctccttaaaaagtactttttaagtgattacaaggatattttcgtattaacccgtttttgaaaaattgcatgccttgaatttttggcggtttagagcttcgagggacatcattagcatttaatgtcttaattattcccatttgcaatgttcccatccgttagatcagatttcttttgatccgacgattatcagtaattaggtataaaagtggaagtgaaagctcattttgccatctttgcatttcaaaccttcaaactttttatgtaaaaaatttttccaattgctctttctcaactttgcatgccctcgttgtcctttatattttttttgtgtatctcaatcgatctcaactactgtcctagagaccttcgaaactcaaattcacgactttcagaatctcaatcgttaggctcttctttgcccagaaaccccaacctacacagtaagtaataccttcttattttcttaatggttttctttttctaaacttatagttttgctttcttgattgacatctctttatttgtactgtttggttatttttaggtaatttcgttttggttgtttgtgtt

SEQ ID NO: 70322 - DNA, 2220 bp, Cannabis sativa
  modified_base (27)..(45): a, c, t, g, unknown or other
tatgtatattattttttgttgttattnnnnnnnnnnnnnnnnnnnacttttatgtagttttcttgttgattttatgttgttttcgtcttattttttggaagaccgtaaaaatataaaaaaatattctttgaacgtaaaaatataaatattttacaaacaaatggtgccttatgtaattactcccttttaaatactgttaaaaattaattatttataaattagtaagattttgtattaaatgttattaatacatataaatgcagataatttctaaaaaaatataactaaataaaaaagcatttatactttgaaaagtgacatttttaggcaaatgtcattaaaatatcagtattgtggcatttttttttgataaattttaaaaaaattaaatgtcactaaatccaatttttgttgtagacaaaaatagcacatgtcagaaaattaataaaaaaaaaatattataatcaatcttaatttaaatatgttgcattcatgatcatggtattacaatgtacttacccaattagaacaagctattaaataccctacaattagggcatttcgaaaattccccagtagaagagtcctataattatattattactggctattttttatgtgttgagtttgtaccacttggttcttttgtgtattcatttcatgatgttttattttattttattacttggtagtattttgttttagttgcattaaacttgtaagaatgatatatttatctatggagcattaaacttaaaaaaatggttatatttagagcctgtttggctgtgttttcagttttcaattttaaaattatgtttttaaaagtaagaatagaaaacagttttttatcattttaaaaatttaatagtgtttgacacaaatttttaaaaactatttttagattttcttcttactaaaaaatcaatattttaacaccataccattacatgaactcattcgggtctgggtccgggtttgggtttgattttgggtctaggatctgagtatgtgagcaaaaatataaaatatatatgtaagacaaaagaaattatttttgaaaattgaaaaacaacattttggtgttttctgttttctaattttttaaaacttaatttttaaaaaactgtttttaaaaaattttgccaaacgacccatattatgttttaaaaagggaaatttacactaagtgactatttttaccaatattaaacatttatacttgccttctctctctctctcttttttttttttttttactttatagatttttcttaaatactatttataaagtttgataattacaattatacatttaatactatttctccttcttcccctattcacacagatacacttaaaaagtaaccatctccaccgtttctatctcgcatcaaacctttctcgtctctagctctctccttcccatcccctcgatgtcatgtaaaatctctactcaaccttatgttgtggtctagggagaaagagacactttatatttattttcctcttgatcaagccatctccctctttttcaaacattttcttctgctattaatattttttgaagcttcgatttgtaagttgttcttttcttgttcttttttttcccttttcaaattacattattaagagtttagatttgaaagtttaataagaatattgttgtagtgtgattgtttattattgattctactcatttgccatcaaattttgtaaattttttcttcttctttaagttgaattttttgttaaagtgtatataagggcataccatccatgtgtttgacgaaatacctaacatagttattcttaatcactagcctgaaaaaagaggacatcttcaattgtgctattgtaatttttattcttcttcaaactgggattttcattttattcctttgatgttatttatgttcgttatgattttatgaattagtcaatttatcaataaatttgatacagtgttatttatgcgttgtttataagttgtttatacgtgttattttgctactgcagtagaaaggaaaaaccttacttcgtagtgttgaagtacacccaaattaattaggatagactttgtgacaatttctattcctttggtagaacgaagtaagttgaacacattgagtgtgtacaagaaaatgctctatagttgtgtgtgtgtgtgtgtgtgtgtaaaaacacccatgccatgtgtttggtgaaatgtccgaaaga

SEQ ID NO: 70323 - DNA, 1100 bp, Cannabis sativa
ttgcacatattttgtaattaattaaaataatgtatacaaaattgtaaaatgcccttcttttttttattctttttttattttctctttttaaagaaatattaggaaatataggcatggagctggcctctaactcagactccagcctcggccccagactcagactccaacattggcctagacccagacgtcgtctcagatcctgacctcgtaccctgacccagccccgaacttggatcccagactcgaacttggatcccgacccaggactcagacttaaaccacagtcccaaactcgaaacctggtcccaaacccgaacccagaatcccaaatctcaacctagacccgaacaaggacacaaaccttgaatctcaacccaaacccggaccaagccccaaaaccccagcctcagacctggcgctcagaccctcaccccgatccccaatccttgactcgtacacgaacacggaccccaacctcgtgctagggttttatgccctaaataaaataaaatttcaatataatcctatatacttatcaataaaagattagaagtcatcttattactattatctattgattggttcacatttactttcatgattatttaattaatatataaattatgctaaataccaaacatataattgttcacgattatagtgttatcaccatagtaaaaaataatcatgattatatctttcaaactatttagtctcatgacttatcagtgtactgaatttacattgacgtgataaacagagatgttgtttacttatacttggctaagtggaatgtctttttcagggcattagcaaagtaaactagaattatacgtataggtttgcatcgaactgaatcgatactaatagtagaaaagatatcataaacttaccgttgtatattttctatgtcaatatcacttatttgatcatagatcaatcgatcttaattccgagatgattaagttctttccagttgtagtattagagttctttgacttgtccgttactggcttacctctctgaatcgctcatacttacatcttaagaacttggtagtgcaattgagtaggagtattatcatacatcattactacaaa

SEQ ID NO: 70324 - DNA, 1342 bp, Cannabis sativa
ataacaaaattccaaaatctttacaaggattataaatattttggtcataacttctggttagccaaaagaaaaaagagttgtcactattgacaaatgtaaaacgaatcttaatatatttctaaaaatccattacaccatctaggcattcattccaaaaaaatattctcaagcaacgatatttgtcaggtatgaaatatttttaaacaaaagatacataatcaaaaaccaaaagtcaattcatcagggaaaaaaaacagaaattcagtatcaggtacttgtattagtctatcaaatataagctaaacataaatagtcaaagcaatagttatactcatgacaaaaggaagaatcaagaaaagaaagcttacatcaactttccacgttctattttcaaccttcacctgcagccaaaagaaaatgcttttgaaaatccaaaataatgtgaagagtttaaaaaaaaacaagaggtagaaaattattatatatttatgtaaatagtaggctttcagttaagcaatagaaacaaaagatgaaggtaaattcacttatcgcagtgaaagcttctatacttattttcttctctctctgaacaattcttaaaaagcacaagatgaatacaacttcttttcccttaaaacttcccaataaacaaacgagggggggaaaaaataccttctcagcacttgctccaaacatctgacggatgagggccatgattagggtttttttgcccgacccagatgggccataaaagagcaaatgcgggcaatcctgctcagtaacctgtaaaagtgaaagaaaaaagaaaatcaaaaccctaactgagaaactgaaacggcaaaagagagagagagagagagagagagaggatgtacaagcttcttgaggttttgggcaacatcttcatgaaccaaagcgtggtctagggttttaggacgatatttgtcgacccacaacatggctcaaattgacaaattcacaatgtgatgagaacttctcaaattgtacctataaaataattataaagagtaaaatatacatatataggaatgttaatcaggtcgggttgggctcgactcgacattgacccgaccaggcacgatatctctttggcacgattcggcccgacccgaccacttctttcagcctggcgggtcaggcctgacccgagataaacgggtcgtgcttgactcagcccccttccttttttattttttgaatgaccgacacaactgttattgggtcgagccaaatcgggtcaatgacccgaataaagcccaactgttatggaggtagtctagctattctctttaacatattacatcacatcacacaccaaatg

SEQ ID NO: 70325 - DNA, 1172 bp, Cannabis sativa
gacatttgcatcatctccaattggacttgaggtgtcttactcctaacttaagctttgtacgttaataaatatcatgaattgtcatgaatggtaaacaataaccatcattatactactcctatacttataataatttcgatcaagtcaaaagagatttattcatttattttgcttgaagtcaaaaagagaattaattgtggcatagatgacttaattatggatagaattagtttcacaatattaatgtataaaaataaaatattatataaaataaaagtacttttttccttgtcaattaattttgaaataaaactcagatgcactttaaccacatcttacaaaattctaacaaacatcaatggtttgtgagtatatatatattaacagagaattatatttaagaagagggggacagatgcaaatggaatatgtgaacagattgatcgagaaatggaataaggtagcagattggcgcccaatattattggattcaatcccaatcccagctgctattgatgaaagtgcacacatgcacttgctatactcctgatttaattaataacataattaggtcatttcacgatcacattggctatactggacctgtccaggcatattaattatcagaagatgaaaatgatatatagaacaagttgggtgaacatatacatatactagtcttggagtgtctctgtcacttaaaccccgtcaaaacttaatgagttaaaataatatccctcttttattaattatatttaaataattatatttaaacaaagacataagtgtagtataagtatgcttattgaaaatagggtcaccagttgtccgatttgaaatgtaatagctcaacttatttttctactattatttattagaagtatatagaaaaaaaaaataataactaacaaaaacttatgaaaaaaaaaaagtaacaatacaaaaaatattaatctatatatatatacgcttgtataattttttacactattatatatattaaaaaaaaattaacaagtaaaattcaataaaaagaagtaccggagaagaaaagatggtaaaataatgtacaaaatactttttaaaaaaataaatagtaaaaaaaatgaaaaaaatgagatttttttttaaaaaaaaatagaagaaataaaatgcgagagattaaaaaaaga

SEQ ID NO: 70326 - DNA, 1720 bp, Cannabis sativa
  modified_base (1286)..(1307): a, c, t, g, unknown or other
ggttagaaaatatataggatagatccgccaaaccgactgatgtacaaccctaatcaccatttgccgatgaagaaaagcaccagtgtaaagttgttttgctgacacatttaccaattgcgccaaaaaaacctattttaccgactacgtattggtagaaggaatctgctccagtaaaagtttactgacgcatgcactagttttgctggcgcaaatttgtgctgacaaaaatcttctttcttctagtgaaactatcaacaaaaacacgaataatgacatgtcagctatctgcgatcccaactacccctatcaacttacagaagcctattaaacaccatattaagtttaagacagacacctaaagcattttcttccttcgtgagctgagtttagagtgagaaattagagagagaagctcctcagagctccattgtaattataatacataaaaccaaagaaagaaaatttagagtgagattgagagaaatcggagaagaaaaacacagagttaaactaaatgattatcaaccaatatctatggtttgaaatctaaagcaagtttgtaattacttgttgatttagtggagatcaagctactataaggcgagcttgatggagacgtagcccctattctggattgaactctgcgatcgaactcttgtatttctgatctaactatttttactctctctaaccctaaaaaatctctttagtgatgtttgtgtttgattgtgttcttgaatctgtgtgtttttctaagttcttaatttgtggatagtaattgtgtgtgttcttcacgatttggagccctagggttttctctatgagagagagagagaatcagctcaatcgagatcgatatctcaaacattctgagtgtttacttagatttggttagggttttagccttgtgtgtttaggatgaattgatcttatcggacactatttttaattttaccatttttagttatggagacatgtagggctgttcgcagtgcgggtggtgcggtttatgaccatttttttaaaccaacccgcacatccagtttttctaatttcccaaactgcacccgcaccgcaaaactaaaaaactgcagaaactgcaccgcaaataatggtgcggtgcgatttttgcagtttggactatcaccaaataactaaactatcacaaatacagcgaagcttgagcaacacctgtcaaaaataccataaggcttaaaaatatgaaaaaaaaaattcaacaatacaatagtagtgggctttgagttgaacattcacatattggaccnnnnnnnnnnnnnnnnnnnnnntttttataatgtgcggtgcggtttgggttaaactgtatattaataattcaaaaccgcaaactgtaccgcactgcgcgatttaggaaaaattcaaaccgcaatcgcaccgcaaagaatttcaaatcaaaattttttggcggtgcgggcgatttgagtagtttgatgaacacccctagaggcatgactaaatttgcaaaattatgattttttgtctttgtgtattaattgctgtattttaagagttagaagttgtagattctaacatcaaccaaacatcaaggttgtcgtgactcacggtgatgattgtagttgtattgtgaagactaaaaggtaagaattaagggatttttacaccacgtagtgaaatttcaaacttttttacttttttactgtggggcggaatttttttcaaa

SEQ ID NO: 70327 - DNA, 1253 bp, Cannabis sativa
acgtattctaatcttgataggcaacataaatttattgattaggttcaccaatcgttgtttggatcttgacttttacgagaaaaaaaaatccaaacaatctcattttcatatgattgaatttaaacattttttaaaaaataaatctaaaaatatttatatatgtatgtatattaaatgttataagatttagaccaattgtaaatattaaacatatcttatcaaattgtaggaaaatgttttatctatttatttatttgtgtatttttttctctcatactttgaagaatttcaaatgctgacacgaacactacaatcaaagctcgtagtatgtttgtaactaatatcttgtgaaactttagcaaagaaaaagtgcaataacaaattcatacttgaaggtgttcattccttataatggttatctataatattgatcgaaattgtgtttgagagatctttattactattattattattattgaaaggatgttggagtgataagaattattgagttccatctcaaattcggttggttataagtggtgttatccatgttatttttatttttacatttaattcatatgagcaattttgtcattatattctctcaagatggtggttcttttttgcttaccaattttgaattaccgcattacaagtggacatttgcttgcttattttattatgatcaaaagtgtctttttgtactatgcagatatcgtgcaaagaattttttggcttgttatatgaataggtggattgaatgtctgttaggaatatggctatgataatatgacaagaatcatggggtttcatcttaaaatcaattcttgtcatgatatcaaagccaaataaaactctcaggaatattcaatccaaatttaataaccaatcaaaaagacgaatcaaaagagtcgcttgtgatttagaaatagtgagccaaaaaagagccaatttgccaaagttccactagtctaaaacatgagctaaaagagtcgcttgtgattcagtgagccaaaagtatcacttatgaccgagttgtctaggattgatgagtgaaaatagctatcatcttgaggggagatgttaaagagtctcacattatgtgtgaaaaaataatacaatatataagatgcatgagctactcttattgtcaatttttttttgaggttgaactccatgcaccttaccttacacacacctattgacggtaagaacttgtcaacgatgtcaatggcggaaaattctatgtgtga

SEQ ID NO: 70328 - DNA, 1341 bp, Cannabis sativa
gccgcgagagccgcaccgggcttcgcattagaacgaacccctccgaacaacgacggcaaaggcctcgagcctctccggatcacatcctcggacgaatcgccgaacttgaaccgcccaaccgaagtggttcgaggcccaattctcctttcctccaattgtgtgggtttagtaccttccgtagatttgcgagtcccatcaatcgaagactgggaggagtgtctagtgagggaggacgaacggtcgagatcggaagatagacggcgggaggaagagggtggggatggaggaggagacgatgaggtggaagaatcagagtcgttgagaatgtcatcaatcgtacggtggggaatggagttgagttgatcatcgtcgtcgtcgtcatcaaggaaggaggtgaggtcgagctccatagttggtgatgggaagggaagtgttaataagggaacatcggccaattcggagtccgaagcaatttcagtttgaaggaaagggttgttgtttcgggcaagtctttcctctcctcctcaacagtttcaattccatggatggacttcctctctctagttgtcgtttacactgttcactcagcccaatattgttttgttttttcctttttaattctttaattctctaatttaaatttaaattcaaatgaagaattaaaagatttattcatctatctttgtttgaaaaaaaatcatcttcagttttgtttttctttctaaaaacatatatgttgaccacataagacctccactgtatatgttgagacctctatttatagattctgaagtcttaaaataattatcttgtttttatttgaaatatgaattttttattataggatcccaaaaattaaaccgactaaatcgagcttcaccacttgaggctaactcaagtggccatagggagtgtgtgttggaagtcctctgttcgagtcggaggttatgcatgatgtaatatataaacacttaaatcaaaaaaaaaaaaaagactaaatcgagcttcatcttttaaaaaaaaaaataaaaaacaagtctttaaatttgctataattatttagaaactaaaaaattagactattgtatcaaatatcatataatttaagaacaaaaaatttcttagttaaatgaataatgtaaaataatttttttttaaatttgctcaaattatttgtactactagtatgtaattaattatattaataaactcgtattatttatgaatgtgtgtatataatacataaatgcatcaaattataataaaataaagtaatagggaattaagactttcaatgaaaaagataagaactaaatatagtttaataaaattgtatattaa

SEQ ID NO: 70329 - DNA, 2321 bp, Cannabis sativa
gtgcccatatcttgttcggaacgctgtctttggtatatcttcttcccatattctgagttgatgatagctggatcgcaggtcaatctttaaaaacatcgtctttccttaaagttgatcaaataaattatcaattctgggtaacggatacttattcttaatcctcaaattgattagtccttggtaatcaatacacattcagaggaaaccatctttctttttcacaaaaagaactggagcttcccagggcgatacactgggttagataaacgcaatatcaagcatcccctgaagttgtacttaaactccttaagttctgctggagccaatcacaaccacgaaaatttctacacatccactgtgtagtagatccttacccttaatactgaaataaccgggatccgagacccctgaaacgatccaactaaacaaatggatcttcaccctctgactgaaaagtcaccattttccgcctgcagtcaatactttccgaatacttggatagaaaatccatcccaagtatgatgtcaaactctgttaattccaattctataaggtgagcactcaactccctatcttcgatcctaattggcatagacctaatgcgcctcttggagatatccaactccccgctaggcattagggttccaaaccctcttacaagaaaatcataaggtctacctaaaagattaattactctcggtatcacatacgagtatatagtcccaaagtcaagtagtacaataaaatgggagttgttgaaaagaagttgacctgtcaccatagaagtactagttgttgtattagcttgggtgatagcaaatatctgagcaagtataggctttgcgtccagcttctacttatctttctttgcttgagggaaatttttcttaaagtgcccaaccatggcgcacaggaagcatgctttcccgtggcactctccgggatgatgtttcttgcatcatgggcactcagggtaagaataaccctggcgtccacctctaccttaattcccgcggagccacttgtttcattttaaacccaccgctaacgacgtagggttcttctactgctcaaccacgaaacctctaccacctctgccataaatagaaatatggtaagcggtatcttgacctcatgtcataacctcttgaggtcttaaaataaattctttagggcttccagtccaaagagcattcttaatatttgaatctccctgaaggactgtaggttcatgcatccaaattttctcaggcgatgattccacttggttaccagtcatactatgctcctctagtaataccgaatcaagaatgattgccatatgacgtaaaggtactataggagacctttgttgtttcaaccactaaatctcctcatcgtgtcgttgaatcataacttccacttctccgaacctttgctctaaatcaaacagagcctgtgacggatgaccatcactcccgtcagaagccctctaaggactttcacctcggttacggggaccacttggactccattctctccaaccgctactggccctgaccacattattctgactttccatattgcaccaggtgtccattcaataggacaaacttgtcaattagaaagttattcatgtcaggcaatggcccaattgcaaatttaataccgcacttatggattttaaggcaacgcatttaaaataaataaccataatctaatatgcttcctaacacgtttaataaccacatataattctaaacaagtacgggcttactgaactgtgagctgagctttctctgatgaagattgtacatgtcttgacaagcttcggtagacaaacctggcgactttgataccaaaattgtaacgccttaatgctaaggcacgtaacagtgacttttcaattacagtgctatctttgctaatcaaagaattttctcaaaaattgtgtcaaattaaaacttttatattaaatattaaactttataactttataaaatcatttacaagtaccgggaccctgtttttaaacttttatacaaaatacttaaaatacataaccaggtcacgcggcaactacaaaataataaccccagatgtcgcgataccaaacactccaggtcgcgccgccatgacatgtacgacctcatcccagctcagactcactcctcttcagctttcgcctttcctttacctatacatggaagcaaaactgtgagtctggagactcagtaaaaaaagcatataacatatcatataatatcgacttgtatataggcacccatacacctatttgcaaggcttaacagatgagtagaacgttctaactaggatacgac

SEQ ID NO: 70330 - DNA, 901 bp, Cannabis sativa
tatcttctaatggtgtggcatcaagggagtattagtcaaatattctatcgttaataaagtgtattttagttcagttgtggataacacaacaagctattggtattcgacgttactttctaagcaaatatggaggcattgacttcaaaattaaaaatctagcttttagaagtcaaaaacatcattcaataacattacgcaatgatgagtgcctataattgaataactccattatacttctggggtgattctctcttcctctaaaacgacataaatgataacagtcaccatgatatgtttagataggcagaatcaataacatagtattttcctaaattcaaatcaattgttagtaagaacattctaaagaaaaatattactgacataggaaagctatttcttttctaattgtatcaagattgattaattttaatacctagtggaggcataggaaaactatcatcttttttaatcttgaagtactcgagaatcattggatgttccttccctcccagcgtacacataagtaaacatcatattaaaagagtatgcaaccattacattttgtgttacatctactttccttcctctatatgcaagttgttttagagctgatgcaactgcacttacatgagtaccatcaattgctccaacacaatcctacaaaatatatttagttaaaaattaatttatttaattttagaccaacataaattaaaataatttttctagttttattttattttattttattttaatataagaatttcaaaatgtattattttttttaatacattagatttcgaatttttttattatatatatttgcagaaaattaaatttgagttgaaaattaattatttaattaattttggaccagcttaaattaagtaattttcataat

SEQ ID NO: 70331 - DNA, 3037 bp, Cannabis sativa
  modified_base (500)..(506): a, c, t, g, unknown or other
tataatttaatataatttttaaagagtaatattattgcaagaagacacgtctagatagtttaaacatgatctctagtacccaataataatattttatagtacatgttttaaaattgctcattacttttcaacatgttcaaagattgctgtttggggttgttgactatttaattttaagcatatatagtgatcccatagctatccatggaagttcttcaacttatgtttcacaatttaaagagaatggccaaacaaaaggtgtagtgtatctagaccggtcctagaatatggaacccttataatatatagggatatgattttgtcccgtgattgtactttcacggaatgtattccgtgatgtacggtagccgtcagatgagggacttatttaatctgacggttgagattgatctaggagtaattagggttaaaaagtagaaacgtaccctgacactcatttaatataccccgagactcatttaatgtaccacggaatacannnnnnnaaagtacatcacgggacaaaatcatgtcccataatatatatatttaaatatatattttctaaatgttcatataaattattaatttattcaaaaaataatctaatatttgaaatattacatatttaaaggtaaaaaaaataagaagagagtcaataatgttttaaaaaatacatacgcaatttgactaattaaatatgtttttttattatgcaaatatttttaaatttttataaggatttttacactacatactgaaatttttaacttttttatttttctatggtagggcggaattttttttcaaaaataatagttttttattcaaaaatactgtgtaagttttatgttgtgcacaatgttaagttttcacaattgtttcacggttgttttttagttattctactgttgttttaattgttctattttgttgttttatgattattttataaaaagatagtatttttgtaaaaataaatggtatgacattaaaattgtaaatttttttccaaaattcagtattttttataaaaaccccatttttataatcaaatttttcattcatatccttctcaataaataacagcatgctcagattaatctttcttgatacaaaaactccccaactaattttcatcagtagtctataatttctccacatttagcaaaagtctaaaaaataaatttaaacttaatttaaaaaaaaaaatattttattaattatatttatagaaattatttttcaagggagtaaatttagtcattaatttagagttttagaaagaaaaaaaaatccaaaaattttattgttaatttttttttttcttttgaaagtttggatctaaaacatggatcctaatatattattgagtatgtttagatgaattacatcattcataatcaaatttgttacctttggtagaaatttttaatgctttgttggggtcacaagttttttgaatggaaagatggcattattttttaaataataatggatacttcattaactcaaatcatccaaaattaagaatgcaattacagtatagataaaaagttactactaaagagaattgatgaaaagtaagaactacatgtaagaaaatgcgcgactttattagcagattgcttaataaaactcaactaaacatgattccaactcaacaaaaaaatattggcatggaaaagtttgctttgttttgttttgttttcttgttttcttaagtttcaattttatttttcatccaaataaatcttatatagccttacaaaccatgggtttccgttgcttgtgcatttggtgtatgcgtgggcacctgtgcacccatggacgcctgcatgcgtgcacaagattttttttgaccaaatttgcctttaatttgttttgctttcttgtttccttaagttttagttttggttttcatcaaaataaatcctatatggtcttacaaatgacgtgtttctaatgcttgtgcacttggtggataccatgactatgtacaccatgggtacttgcgcaccatgcacaagatttttttggactgatttttcctttatttttttttttggttttcttttttttcttaagtttcagttttgtttttaattcaaataaattctatagggccttacaaatcacgagtttttgttgcttgtgcacttggtgtctgcgtgggtacctgcacaccatgcacaagatttttttgaccaagttttcctttattttgttttgttttcttatttttttttttttaagtttcaattttgatttttatccaaataaatcttatatggccttataaactacgagtttttgttgcttgtgcacttggtgaatgctataaccctatgcaccatgggtgcttgcacatcatgcatgtaacagataactaattgttgttaaataaagttgttaaatcagttagttgggatgtattttaactaactttctggttttctgttatctgttttgcttctttctgttgtctatctttttgtataaatactggtttagtctattcactaaagtaaggaatccatattcccttttccttttctctgttctttctttctctgcttttctgtttcactacaatgcacaagatttttttggcccatgtttgcctttttttttttgtattttgttttcttgtttatttaagtttcactttttttttttcatccaaataaatcttatatagccttacaaactatgagtttctattgcttgtgtacttggtgtatgtgtgggcacctacacaccatgaacaagattttttttttacaagtttgcttttatttatttatttttattttttttttttgttttcatattttcttaagtctcacaatcggtattcatccaaataaatcttatatggccttacaaaccacgtattccgttgcttgtgcacttattggataccatgatcctgtacaccattgttacgaaaattattaattactatgcaagtgcacgcaatcaagtagtatacttacgcaagtgaggtcgaaccacaggaaattggattaattac

SEQ ID NO: 70332 - DNA, 2527 bp, Cannabis sativa
  modified_base (2499)..(2500): a, c, t, g, unknown or other
ttacaattacagtgatgtcaacacagtgaaaggtaattgtgattatatgctctaagctcttaaaactagaactgccgaatcccctttcaacttcattttaaccacccaaaaagactataatttaattacaaactacccagaacttaaccctagcatcaagggaataataaaattcaactatataacaactactacataaaagaatttatttactaagagaattaccttcccttcttcctcaagctagatttaacttgaaatactctatcctccaaagattaatgctccaaggcaagcttcaattcttcaattcttcaaggaaattttgcaagaaaaaattgggttattctttgtgggagttttttactgagagagaaagtgtttcctagtattttctaaaaatttctacaacaaataatgtttatcctcaccctattagccaatttatcaaaataccctcaaaacatatatatatatatatttattttacaaatagtttcctctactagcatcataacacgcacttacaacaaccataacaatgactgcccagataaaacgtaactaaaagtgtatcctaaagacgatatttcttagttggatagctaagtttcaaagatgtatttagtccgtgggggttacagatttcatgtacgatagatatattaaggatttatattggttgttgaatacaagcatacttgggatcactctttgatattgcgtgtacacttaattatgtgagccagtggccaagtctctgtgctatgttttgagtgaatccaaataagtatttatcttcatggatatgtaaattctaatgtctcgttatgtattatatttatatcatattgatacaatatagtacaaaattagttttatagacatttgtgtgtcttgagatttttgcatgtagacattattgctcaatgagaatttgttagtttaattatgtagtccaagtggaagaatgttagaatattttatttagactgacataatttttttgaaaggtaactggcataattaagtaccgctcactagtattgttattaaaatataaggataattatatgcatggtatagtgccaattatgtaattaagaccataatgagatggtcaattttaattaactactgcatataaggcccatcgtggcaccataatgactaatggtaagtccaaacatgcccattttttcccttaggacaaaaatgacataataatgtctttttgggtataaaaaggcataaggtcacaagatagtttatggtagagggtttgcaatcccaatatatcctcacttgctctacactctcttgtgttcttttgaccttggacaactagttggtgattttaagtagctcatggaggataaatgctcaataacaattgtatgtttattgtttaatttaatgctctaaatagaatgtacttttggagattatgagcactgtttgtgtttattatcactcattatgtgtataattttcaacaatatactcaagcaaaattttatttcattatataattatagcccatagattaataactagttaatactgagcaaccaaaccaccatcagatactccatccaaatctccattaagtctgttgcagctcgacctaatctctccatttgtgccaatctaaaccttgatgttccccattttaatcatggacaccacaaagctctcaaaaactgcagtttgattggttgtgaagttatttacaatggaaatagtatctgctccgcttgtcaaacacaattcttgatccgtttggagaagcccattttgagattgaagatttgtaaaatacatgttgtcgaaggtgtttggtgttgaaagatcgagatctgttaggaccctcccattcccaccattagagcaaaactgccttggattttctaacaaagttgagttgagtgatgggtcagggcgaccaatgttgttaaagtcatatagtctgtggatgaatgttaggcatttgagcccttccaaatgagtcagcacctaacaattcagttaagttcttaacaaaattagtttacaacttagattatgattttagtcaattagataatacaagtaatagtcaaaactcatatatgcaactaatacaaaagaataacataattaaaaaaaagtttacaaaaacccaatgtgataatttaattttttttgtaataagtaataattatttaacacttacgtgatgtataattacacattagaaatttatgaaatttgaaatgtaagtgagaagtttactcattcagtacttgacatattttgtttttgaaaaattgagttattgcaaatgtcaataatatatatgaaaatataaaattgtatacgcctgcaaaagcagaatgtaattctgttactgcagaaactagttttgcagcaacaaaccagaatagacagagtataaaaataactacagaaatttaaataacttgacacaagagatttgtacgtggtattagtgttctnncggacactcctagtccacggggccacg

SEQ ID NO: 70333 - DNA, 1268 bp, Cannabis sativa
  modified_base (657)..(657): a, c, t, g, unknown or other
ataatgattctatccattgattatctaaatttctttgtttgagtaaacatagaaacgtgcttgactaaacaaaagatcttacacagtgaatatagatataaatatataaatatataaatatatataatattaataatgtaactacaaatgtggaattatatttgataaacttagtaaaaggtgttaataaaattaaccatatttaactttgaccaaaacgacattttggtagctgaaatgaaacgacaaacactaattaacagtccaacattaaaacgacagtaaactgatttttaaattttctcaggcttatatataagaatatatgaatccaatcagaataaaatctcaaaaaatatatatgacatttgaaaataataatgtgtaaacctttttatgcattaaaattcatgtatttgaaatattttgcagctaaatttgactatatatagtatagtttatattgtagctagatacgttaaagaaaacctaaatatatcatctctaatttttttaaaaaaattaaataaataggaggggcacggctaccaaaataaaattgttactgtaaatttttttacttatcattattcttatattgtgattagaaaatttatagctgaaagtattacaaaaaattataatttattgtgactnaatgtatttttagtcacaacaattattgtgattaaaattaaattagtgataatttttatctaaatactatattttagtcacaaataaatttttattgtaaataaaaattacatttaattataaatcaaacttttataaccagattaagtggatcgagattgagtatatatatcatcagcaactaatgtataaaactttaataatataggaaatttctatacatcccttaaaatattattttggtagctagttaatttttagaattacttgtaaatttttaaaaaacttcaattaattataataccgataataaagtttaaacagttgcgtactatacgtataaaaaaaatagtcacacgtacaataaaatatgtaaatcttgttttcagcataataaactattcagaatttttttaaaacttaaaagtaaattaaaatataaatattaacacgatcataaaaaaaaaaatagactacaaaattctcgtgagtgtcgaaacaaataaagaatttactaaacaaacctataaggagtatactgtaaacttacctaatattatatatgttatataataatatgaagtaataaacaacataatatatatatatat

SEQ ID NO: 70334 - DNA, 902 bp, Cannabis sativa
agttaaacaacatcaaaatcacttagtataatataatatgttttaatgataattaattgtgtatgtatatattagtaattacctgaacagtttttattcgaactccaaatttactttcataaaagtcagctctgtctacaaatacatctgtgacatgagcttctgagtttcctgaacccaagtctccaatgctgtacattagaattgcaatataagttattcatgtcagtcattaaattaaagtcaaataaatatagttatataaagatttatcattttatatgtattaccttatcccataacctgttccacatgttatatctgatgctcttacttttttagttccacttttaattgagatacagtccgcaccttaaaaatttataataaaaaatagagttacacattagtgattacatcatgtatcttttcaaaaaaattaaaagagaaaaaagatagagatatattcctttttaaaaaagaaatgaaagaaagaaagctcaatattaagtactacacttcttcccatttttcaaatttgaatagtaacacaataattataaattataataagaataatataaataaatatgtatacacacctgttccaataatagttttggagatgtcaatatcctccgtatgtgaaatataaattccattagtatttggactattttctgatgcatttatcgtcagatgtgaaactttaacatttttatagtgagtaaaagacatatgtgtttgttgtgcatttcgcacttttaaatttctcactaccaacttctcacaattatgaaaagttatagcctgtaaaatacacaattaaattaagggttatttgcggcaaaacctcctaaagtggacaggtttttgcaactaaccctctaatctaaaatttt

SEQ ID NO: 70335 - DNA, 1704 bp, Cannabis sativa
catccgtgcgccggtccctccttattcaaatttcctaccctgtcgcatccttcggccgaggattcatccccaaggccatcgataaacacctctcctttttcttttgttttttttaaattgatcgtgaatggatgctttggttgagatagtcatggcagaaaacgagtgtttgtgtgtattttgtttgcattttgtttggttgagatagtaatggcagaaaacgagtgtttgggtgctttttttaaatttgcattttattttgtgactttgtgtgtatttttattagaacatgagagttagagttgaattgacatagtttttttgtgtgtgtatgattattgtttgaagaggtgtgatatggctgagtcaaataggcttgggaatgtcaaactgaccattcctattctttgttttttttagcagagaagaagaagaagaaggaggaggaggaggaggaggaggcggcgggtagggtttctgaggtgaatgatggggacgaggatggctgaatttgggggggcggggggtcggctagggttagaagcaatcggctagggttaaaaaaagaagaagaaagaaaagaaaaaaaataaaaaaatatataatttttttttaatttgaaatttttaaaaattttattttaattttaaatatttattacgtggaccaataaaattgtgcagtgtacacgtggacattccaccatggcagttaacagccaaaaatggacggaaggggctaagtgctaacagaacttggatttaggaggtcttaccacaaaaattttagaattgggggttagttgcaaaaacctgcccactttaggaggttatgccgcaaataactctaaaaaaacaaaaattgggtaaatttcttcaacaacttgaagaaccactaagtagaacgagttgcaaaaactagtcaaaatcacccaaatttgcaacagctagatccagggacaaaatgatttctctaaaattgaggatgaatgtgggaataaagaaaactagggctctttgaattgtaaattatatccttcacaatttctttttcgtcgaaaccctgttcaacaaaatcaaaacatgaaacagaaaaataaaataattttgaaaataatagagatcgaagcacaaaataccagaagaatcatcatcatcatcaacaccgaaaccacccccactgaagaaaacctaacttcaaccaccactttaggtcgacaagatgagaaagaaattgtctggaaaccccaaaaatcccaatcgaagctgaaccagaaaccccaatcaaagccgacaagacgatgaagaaatagaccaccagtgggagccattactagcggcgaaagatctgaaaatttgaacaaaagaaaaaatataaaaaaatgagaacaatggggggagagatcgctagcggtgtgagacctctaggttccgtcagagctttgagagaatgcgagcgatggggaaggaggaggtggccagtcggctcgtgattgttgtatgggcttgcagacgagagagagggtaattgttgtttaggtttacgaaattagagcatctctccaaatggtgacattgtttaacagtaataaaaattttgatgttacttacaaatatattcaggggtgttcattgtatcacatccaatggatttggacccatccaatccaatctaattatttattggatattgaattttatcatc

SEQ ID NO: 70336 - DNA, 1492 bp, Cannabis sativa
caatcttctcaaattgctactaatctagtcatgcctaaagaatgaaatttattagaagaatttaaaatttattacaaaatcgaattaactcatgtgcataaagactacctttctaaattttttgcaactattgtaatccaaactcctaattaaatttttgaagtgttaagattttaaactcaattcaaatcgtaacacttgcactctccctcctgaaaagtgtctcacttgcactattcctcctgaaaaagtatctacgagaagctcttctcccgaagcttgatgaacgatgtctaagtatgttcaacctgcataatttccataaagaaacaaatacaaaaataatatagtactaaaatattaaaaacttgttggactcaagttcctcgtataacaaaaacactctttgaaaataatttagagcaaaatacatcaagagggctaataaaaaccagagacctaaggatacctttaaaccatttaaaaactctttagattgtggaaaaagaatcaagaaacaatctgctaataaatggaaaaaaaatcaaaaataaaaattagaatttatgcaaacacattgtgaatccgtccaaacagattgactggacaaatattcttaacaaagtttctttatataaatatggaaacaaaaaaaaattaaagataatttcttgaaaaaaaaaatcaaatagaataaaataaaataaatattaatactttcctttataatgaaaagtcaaaataagataattaaaataaagaaattacatatttatttaactaaatataattttaaaatatttttcactacaaagataaaaatattaattttaaaaatcacataaacaatttcaaaagtaattttataattattttattaaatatgtgaataaatttttttattgatttatttatagataatttacatgtatgcacaatttttgatatttaatatcattattaacatggtttttttaaatattaatattattgtatttttcttaccgttttctatttttattattgattgtgtattgaacacaatgttttaatgtcatattgacttctcacgtcatgatatgggagagagtgagcacctaatgaaaagttttataattttaaatattgattttctttttaaaagtttattcggacccaaaataaaaagggtgaatttaatagtttataatttgtatacttaatagttttttttttttttttaacttttttaggattttgttacaatttattcaaatttacttttgatactacataatttaaggcttatcttttatttttaagattttattaatgtatgtacaaatgtatttttgatactgtataccttagggtttttttttgtatattatagggttgtatactgtatagtgtactatattattttgcatttaatttattttattgatcatatatttgatgattaatataattttgtttaccactaatatacatgtcattttatatgatgtga

SEQ ID NO: 70337 - DNA, 1446 bp, Cannabis sativa
  modified_base (32)..(32): a, c, t, g, unknown or other
  modified_base (875)..(881): a, c, t, g, unknown or other
aatctgattatatgaaatgggttttatttagngcataaaacccaacaggaacatcaatggaggcagctgtaggatcagtagcaggttcaaccaaagaggaagcaacaaaattagcagcaaaaagactcacaaaaggatcaacagaggatggagtaacagtgtcaggctccttcctggacaccggcaataatagactccccctgaatatcaataacacctaactctccctgaacattagcaatagcaaactccccctagacaccagttgcagcaggaagggactgagactccccctcaaccaaactagatgaaacaaaattaggctcagaaggactcgaaaccagtgcagatgaattaaccagaggttgtgattactctgattgatgcttagatgagagaccatcatcatcagaagaactagagaaaccatcgctaaagggaatagaggagcaacctctgtcgacttcagtacctctgttatggcagtgagaacattaatcacaaccttcacaaaatgaagctatctctgctgatcacgagcattagactcatacaagctagaaattaaagaatacagtttcccttgccaagatgaagaactctgttgggaatattttaccaagatctagatttacaaacaagtatgttgattaatatcctaaatatgaatatctctaaaataatgaaattaaacacatagagtttagaaaaccttacattagttgtagcggaatataatgactcctttcgctcagatctctaacccttgttcctttctatcacagagtatcatcaagatttgagcatggatctctttctctccttcgagtttggttaccactgtcttacttactatgattgagtacttgacttgnnnnnnntgggcatggcactctatcactaagggttgactatgaagaacaatgaaggaggcttttaagagaatttcttttcttgcttattgtgagaataattttgtatgccatgaatttagttttaaccaaatcttatctttgattggtcgaaatatagtttttttatttcttccaaccaccattggcaatcccaaataagtttcaatctcttctgccatcgtcattgcgagagaggagaaatattgtactctaattccttcaggagtattgggagaaaacaaaagcaatgattttttgtaattaatcatctacaaaaacagtaagccaatattttataatatatcactaaagcttaaaatgtaatctcaataaattttttgtaaataatttatacctgtccaaaacaattagcatacagactgaatattttttgtactgatgctaaagttctctctaaaacttttaacaagagcaaactgtcatctgcaaaaaataagcggctaattggtggggcatgcctagctattttgagacccaatatatctctcttttcttttgcatgtcggataag

SEQ ID NO: 70338 - DNA, 917 bp, Cannabis sativa
ttaatattatactacaagatttgtttaatgtactattaatgattaacaaccgttcgatcagtctaactattaatcttacagtttcagtgtgaacaagataccttccgaccgaaacccttaagttggaaatgaagaaaggacatggatgaaaatggtgtgaagagggtaaaaaaaatgtggattggtgatgagcatgttggccaatatagggtatgtagtagaaaagggcaaaagagaaaactcaattctatttattatgagaaccaccaattcacatgttcatttgttttatttttatttatttatttttttttttgtggaacaattttttgttatttgtgtatatttatttatttgtgtatattttcactttgatacatggtggatacagtgatgggtgtggcccaatacaatttttttttttttttttgtggaacaattttttgttatttattctaatattttgtaggtctttttgtattgtatgaaaataagattatgtatttatttttaatttttaagggctaatgggagccttaacataagcacacattgattataccaacattagttacttcacattgattttaagctaatgtgagtttgtgagagggaaattattcttgacaatctaagtcatggatgaacattaaatcatctaaggggaaattttcaaaaatattattttttttatgttttatttacaattttacgacctaaagtttttattaataaaaatacttttaaaattttaaaattacaaaaatatattttgttcaacaaaaaaaaaaaacaattaaaaaacaactagcaatcaatctcatgacaactataaaacaactataaataaactataaaacaatcaaaaaaataacctcatgacaactattatacaagggaaatttgaatttatatgc

SEQ ID NO: 70339 - DNA, 1081 bp, Cannabis sativa
tcattttatttatcgtattcgtgacaatacgtttatgacatgacatgattaaggtaaacacaaatacgacacattaattaaatatgtcataactacaaacacgaccacaacacaacatgacacgacacgattatcattataaatacaaaaattttaatttttttataaaatatataacacgactattgtgatgatcgcttgactttttatgataattagttgatatttaagaatttgtttaaatcttctatagttatatacctcttagtagataattaggacttattgttagaaataaactttagataattattttttcaattacgaagatatatttaaactctaggtgtattatgtatattagatattaagttttatgtttttcatattttatgcctagttttattggaatgcgacgatttggccattagagtcattcaggtatagttgagtaccttaaaattagcgaggcaaaatagttgttagacatttagaatgtcgagtttattcaggattataatttttttagactattttacccctaagtatatagattatttcttagtgaagtaaagggcaaattgataatttggccttagtttgtcttttagtgagtaagtggaagttgtaaaaaatttcttagtgcttttgtgttataccaagctgaacattaattaattcaaagttatccaaaaatcaaacctctctctctttccttgtgttcgtccaaaagtgaaaacccaaggaacccaatattttttcatccattttagacctggattaaggggttttggcaatgatttcatgtgttatagtaaggtgttgaagcaacgtaagctcctctccctttttcttcttgaattttaaggaaaaagttaggttttcatgtagttttggggatttaggttctatttaacttgggaatgtttaagattatacctttacttttatacactaccaacttgttttattcatatcgtataatcttaattctcttgtacatccttataagattatacattctccatataaataagtaattttcagatatttttactaattatactattataattaatgt

SEQ ID NO: 70340 - DNA, 1045 bp, Cannabis sativa
aatcatatccctatatatataatatatataaatcaattatttattataaacgatccaatctgatttaaccattaattatatattacgaaccacagttgaaccattaagtggtgaacgatctagattaattagaccacccaaaactgtctccacagttatggtgtacagcggttcaaattgcaacggtccgaatttaaatcgcggtttgatggtttctatgaacatccttaagtgccacgataaaactactgatttgataaagattaaatgagtttaatcccaacattattattgttatattttcatgggaaacataatttgtcctttagtgcaatatgttattttttgtttttgttaatcaactatgattgtttcaaagtttcttctttgatattgtaagaaattttgttgaattattattgattttgaatatcttttttttctttcatggatggcaatttcatgctattttgtagtgtgttctcttataattttatgtactttagttagtgaatagttatcacgcaaatattaatttgttcctttttggtttatgtttgatcaattctatattgtaagtttgtcatttttttcgttaattgaaaagagtttctcttatttgtgagatctgtgcggctttatttttatctaactcgtaacatttttgtctatatagccaataaatattctttcattaaaaaaaacaaacaaacaaagactttggcataggaaataagctcactttaagtattattagcctaagttatgagatatcattgtcattaaacaaaaaacaatcaccaagtcaaaataaataagcaaaaggataaaagggacggcagtttttgtagttacacttaaggaaaaataatactaaaataaaaattataaattaattcaaataataataataagaaaaagagtttatttgcaccccaaaatcttataaatacacctaatttagattatattagtttttttttttaatttttttcttctaatttatattcttaaattatacttattaaacaaaaataaattatat

SEQ ID NO: 70341 - DNA, 1565 bp, Cannabis sativa
tggtcttaattatataataagcactataccatgcatataactatacaattatttttatcaactctgtgtgagcaacgcttaattatgtgtaagtccatataaaatattctaacatgaatacgatggaatgaatttataatgcatataaaaattgagaaatatgtgtatatatatatatatattatcttgtattggaatggtgttttattcttttttttttctttttaaatgcaacaaaaaaaaaaatgaaatataaattgatttttttacatttcattttattttattatacctctaactaaacacaatttaggtatattccaacctttttaaattataatttggactaaattgctctttattaaataatgaagctagatttcaaaaatagcaaatgatcaacaattaaatcaaaatctgacccattcaaaataatttgcattgcttagacatgatccatttggcggtttcttctagggcttgcactcttttcttattaataatttttcctttttctttttcatattctttaatttcttttccccaacacctagtaaacctcagcagataacattgtctttatatatgcataaagccaaacatattaaaagtaccaaaaataaacaaataatacattattattaatattaatgtatatttatataattaagcaccaactcttattgcgaatgagacatctcacttgttctcttatataccatatacataattaactacatctatattgctggatttttccactatcttgcttgatcgaaaattaaagatagatatagattaacataagcataacacttttgctttagacagcatgatttaatactgtaatatacatattcacgaacctgctaaagctgctgtatttatatttaattaataggcatactctatataagtaattgttaaataataagaattaattaatttatgtaataaaataataattaattaatattgcatgcaaccgtgccaaagctgctataccagcctaccaccaggcacaactttcctcacaacaaggcatcagatcagactgcctgccattatatatatttatgtatattacacctgctaaaaggtatatatgataagaatattttgaatacccaaattttatattaaaattaacaataaataatcatatgtaggggcatctaaccatgcaaacccctcaaactcaaactttcaaattaattagttcaaaagagtgttgttattttacactttaatgtgtctaatatcatatgtaatactatatattaaactaaaatatgttgttcgatttcaatcacacatctaccatttattttattatagaagaaaaaagattaaaattatatatatttgtctctaatttatgaaatttatattacactcataaatattagagcattgctattaggcaccagtggtgcctagcacctttgcgacatgtcgcgttgtgatgggctaacgatactcagggccggccctgggcataggcgggctaggcctgtgcctaggacccacctagtccaggggcccaaaaaaaaattttgcccttt

SEQ ID NO: 70342 - DNA, 2041 bp, Cannabis sativa
  modified_base (43)..(68): a, c, t, g, unknown or other
aaaagaggtaaaaatgatagattttaaaaaagaaggtaaaaannnnnnnnnnnnnnnnnnnnnnnnnntagagtgtaatttcctctaacatttgcccatatcactagcattgagagacaaaacataattggctaaataatgtgacacttgatttgcattcctactaacatatacacaattaatgactctataatgcaatggttggtgtatcttctgcatcaacctatcttctctatcgccaataagtttcacagctttgaaacgcactagttcacgctgaattcccaccaacaatctgtctcgaatggcctctaatactctatttgcttaggcatgttactgtggtttttcacttagtgtacgtgtctttgttaactaaagaatttctcgaaaatcgtgtcaaatcaaaattttaattaatttttaaacatttatacatttataattatacataaaaattcgggatcccgtctttaaaatttacttttattttcaaaatacatctcataaatatgttgcttagcgactacaaaatataggcctaagtcgtcctgaaaccgaactctctaggtctaaccccctaatatgtacaatcatcttcgagctctagactcactggtgctcagcctttttctttcctttacctacacatgcaaacaacaactgtgagtcgacggactcagtaagaaaagcatataacatttaacatactacagacttgtatttaggcacctatacacttatttataagacttaacagataatcaagagcgttcttaatagaagtataacatctgtaccacatgcaccaagtacctttggtcgcattatcctcaatagttgacaaaaatcgttgatagaaaagtgttgacagcacattggctccctgggggactgacacgtagactcagttcctgatggaaaggatgacgtattagtagacagctcccatagagctagcctcgcttgatgtgaatttgcgagaggatgcgattaagacatggtctagtcccatactatgcctcgcatagtcaaaagaataagcaggaccaggaggatttaatactggtcgcacatataccaagtatatgcgatgaccaagtagacttctcttgtgactagtaaagatcatttctttacatatgtttggtccaaatgactagtgtgttagacgaatcgttagggactcgcatgttccacattgtcaacacatggaatgtccgattatccaatcatgatgaatgcagacatccaaacgattggcctgaaggccatcgtatgagcataacactacagagattgcgtacctaacgacaccatattaatgtagcgtattgtaagtggttactaattttttatattatttattaaattaaaatatttaaagttgaatattaaattatagagtaatttacgtcataaattcttaagtttaactctctgttgcaaataaatacatacgtgtaattttttgcggtaataatacttaagttataattatggaactccgtaggcactcgaccattaaatattaagtcattttcttattggtatatttaaactattttaaaaaaaaattaataacctgtaccaatcaaaaattgtcacgtttaacaacaaagtacctacaaaagttacaaaattaaaatttaaatattattatcgtcaaaaattaaatttaagtatttatttaccactaaaaataaaatttaaatatttatgctgcaaatacgtgatcccaaacatttctctttgtttaataagtgaaaaaatgtttacaattaatggttaaaaataatgtgtgattaatgacaattgacaagaaaaaatgaagggtgaagatgaatagtaaagtttgatcgtgctcagctcaacaaatttttaattaattatttaaaaaagaaaaaccagcttcgcaatttctcatcaatctctctctctctcctacattttcttcttcttcatcgaacatctcttcgatatttttagagagagaaagaagggagagagagcaagggcgaacatggatcagatactgaac

SEQ ID NO: 70343 - DNA, 1425 bp, Cannabis sativa
acaaagagttcttcgaggctcgtttgaatgttagcttctgactcgccaggactgtaagcctcaccgagaaaatgtctgaagttaactgggtgagattataggaagccttcccacagcgagataggcatcttgcttactaggtctcgagccaacccgactgttgcacttagtttgttcattatacactaagtgcttccgcagttgatatgtgtcgcttttgtcttcctatatatagcgtacttgatgcctcgctatttgcacttagcgacatatggtttctcgctaatatactaagtaagtttgtatattgatttctcgcataagaccttacagtcagcatgttacaaatatacttacttacgcaattaatgagttattccataaaaagcgatttcattgatccatattccctttatattgacacgtgtcctctactgagattacaaagggtattttcatcataatctgctttttgaaaagacgcgtcctttgattttggcggctgtatggtttcaagagttattatgaatcgtttcttcatattttaccctactcctaacctttagatttcctaatccttggccttcttgtcactggactttatgtataaaagggcggctcaagctttccatttttcacaatcttctagttttttatgagatccatcttgagactggattatctcttttttgctaaaatgtcccatctgagttcagaggttcaccctcccaaattcatatcactaggatgcaccaaccattttccctctccatttgttcccaaggacttgaaacctcaattggaaccaaaaataatggattctaaggctgaggagcttccgactaatccaaactaagggaaccccttagatcgttatgggcgatcttcacaagtgattcttgtgggtaggtattatctcttatgaatggtggtttgagtcggattatttatattttttgttgctctattgacccttctcctttttttatgtctccgcaggaatagacatagatcttgtgggcgatcttagaggtccttcccaggctgacagggaatcccgaaggaaagttggcgcagtttcaaatgaatccaggagggaagttggcgtggtttctatcagagaatccaaccaacccaagacccaaaccttcaccagaagaccattgtgccaacctctctctagtatcgagaaatttcctgaggctgggaatgaggtctcggctgcaggaaatgggatcttctgatgatgagaatgaggtctgtgcacaggccaaggctctctacatgtagacggtctttctcgagctacgtttagtcggtctttctccaagctatgtgtagagagtctttctcaagctatatgaagacaatatttctcgagtttatcgacccccgtctcattctttgtttaggaagatgacttaa

SEQ ID NO: 70344 - DNA, 2881 bp, Cannabis sativa
gtcgttctaacaaactctaggacaaagtaagaactgatatatgaaatactagaacctagatgaacaactaggttctcacataacaaagaaactctcttccctctaataagataaatgggaaaatatgaataatggaagagctcattcgaatggctgctctctaggtcctatttatagagcatagaaaccctagagacagccacaagatcgaatttgcagctgcacaaaactttcctaagataaatatgatctacaacatcagaatcggaagctgacgcagcaaatcagaccagaaaaaggaaacaagctataatcgggtccgataaacaaattatatattctgattgtatcaagatacaatcgaatttaatgaggataaagcatttaatcaaggtttcctttataaaccaacttttcataggagaaaaagattctcttacaagaaatttccaaacaaaggaaagtttagcattaaaagcatctttcctaactaagaaaagaacaactaaatccaaatatacaaggtaaggcaatcggtcataaatgcaaaaatatcttaccattaaataaaaaatatttttgtcaactaacttgccaaaaaagactttacaattttaagattgttgaaatattctctcaagtagttaagagacttgcttataaacatcagtaactaagttcggttatagttatttattcaaataattaaaaaataatttatcctaatagcccacactatcccttgtatgtggtggatcaatttagaagacaatggtgtgagtccaaattgcatatttcacatcaactgcattaagggatacaacttacaagaagtttttaggaggccctgataggctttaataggtatattctaaacttatattcttttttatttttatttaatgtacatacatatagagatcctaagggctatggtacgatgataattaaataatatgaaactcttccgttgcgtacctaatttagtaccataaaactaacaattactatcaagagcagttttataaatgtatatacattaaattttgtatgggttttatgcatttatatatatgagatatgtatatgtgaatggatttttatattattgtgaatgtataagaggtgatgaatcgttaattatatggtataattgagtaggttttgttgttattatttttagaaaataatataaactaatttggggcatagacatttttatgtaatttatttattttttaaaattaaattttatgtaaaaattaattgttgtaatgttcgttgcatgtgaactcgatttgtaatcttgaaaccaaaccatagacattgaaaacatcacatgcatgtgagcttgagttcatggaggagccccgaccatgctcctccccaggtactaggcccacgtgaaaggccatgcatgcattgcattcaaagggacgtgagtccctaaacagaagcaaatcacaatcgggtcttatgacccgtgtgactgtgatggacagagtaaaggacttgtgagggttctatggtgattggaccaccgtcaagaaaaatatgagggactcgtttacctcctccccttgctttgcctcatgcacgaatggacccgtgatggtctgaaattgttttaacccatttgggctgtgcaagcttcccttcctcgtggccaccatgaccaccgttcgctatgtggctgtcaagctaccgaccacggtgactggtcgtggtgatcgaccccttttctctttgacatccgatcgtatatgtgtatgtatattcggtataaatatgtatattatatatatatatatttgaattaaataatgtaattgattttaggtttgaaattcaaactcaagcccaaaaaccaaattaagacaaaaattgtcttaacctaaataaaataataaatgttattatttttagaaaaaacaataaaatagttatcataaataaaaggtttacttaagaattaattaactaaaattattttaattaattaaaaagggtttaaaatatgaattaaattaagaataatcaatgaaaattgttttaattaatttaaatgcttacgatgatgctataaaattacaaaaaaactattgctgctatgtagattaattttgtcatttaatttctaattttaaaggttttaagattagatatacccaatttatactcggtttattctcattgttattttatttcttttaaataaaatattcattaatagttgattaataaaatgctcatgcattattgaataacgtatcatacatagaaatcccaaaaagttttaattatcatgcatctcatactagaaacatgatatactaggattgtcctatgtgtttatgtgtttaccatttttgaaaccaaaaatattaaaattggctaagtttaatttataaataactttgtaatttaaaattaacttactagttttaaaagagttttaaattatgaaataaaaagttaattcagatgtaataataatgatgggtaatttatttataattggaggcttttattataaataaattaatcctaattataaaagttgttaatatgtattaattatgagaattaataaaagaaacacattaacttaaaatagttagtgggagaaagagtacatgtcaatttaacctacgacatcccttatttgcaacaccctactagtttaggcatgttagcgtgatttttaattaactatgcagctcgttgttgaccaacgagtttattaaaaaattgcgattaaataaaattttgcttgattaatcttaaacattaaaataacatacttatattaaaccgggatcctgtttacaaaagtatttacaaaagttttactgtgcatatacaaaagtttgtcgcttag

SEQ ID NO: 70345 - DNA, 1138 bp, Cannabis sativa
  modified_base (1095)..(1096): a, c, t, g, unknown or other
tactaatctttaatgtgaaaaagatgagacaataaattagggacatgagactttttgttccttctgatatgtctgtctttataaaggacataagctagacttgtaatatcatcgaaattgaaagacacaggaaaaatataaaagtaaataaaagataaacattatggacacacagagaaaattgcaagcagagcaactatcttgcccaaccaagtctcatgaactaatatttgatcataaatctgatcatcaaagacgttcggccaattatacgccaaccatttggaaatatgatttcctcgagtctcttaacaacaaatatgatgtaagaatttttttcactaccaacctccattatatatatattttcatttgcagatataattaatattagtagtggacgttttttttaactaattatttaattatatcttgatttaatgatttttttttttcatttgttatgtatttttatatcacatgattcttttgactgataatgatatcattatgcattgattcatatacagagtgaagagtacaaaaagcggtctgagaagcttatcgaggatgtgaggcataatattgttgaaactaaagacttaaagggtatgctagagctgattaacaccatcagaaaactaagcttgacatatcatttcgaagacgaagtcaagaaagttcttgacaaaatatcatcttccaattactactacaataataaagacattaaagatccccgcctcgtaggagacgatctctatctcgctgcattatatttcaggctccttaggcttcatggatatcaagtttcacaaggtacgtacgtatatatgagtataattagatcagtttacttaaagaagtcatggtttaaataagaagagcagatcaataagaataaatatgggagatgaaattagaattatatacatatatatttaatatattatataattaaactgaataatctgtgcattaatacgttttcttctttggatggattgaaaatagaatttcaccaaaatatagtacaaataaaaaaaaaaaaaacaaaactactattaacaacattttagtcacaacataaatttnntgtgactaaatgtgacttttataattacaacaaaaaattact

SEQ ID NO: 70346 - DNA, 1018 bp, Cannabis sativa
aaaaaaaaaaaaagtagaagaagaaaaagaagaagaaaatgtttcaagtgtaaaaataaaaaaaaaatttaaaatttttccatgacccattttacaaaaactttttcaaaggtgagtccacatgcacactgctgcaatcaaattccattgctcactgttctggtttcaacttaccaactttacctacaatagataacatctagataaggcataaaagcttaggaaatcaaccttacatgcataagataagcaatatacatctaattcattaccagagaattacaattaaagttggaaaattcatcgaccttatcatttacttagattaatgccaagacgtaaataacttcccatgaccatacataagagcctactttgtaactttgagagcttcccagcttctctactctataacccaaattatttgcaccttttcattataacataacttgggaaactcccgtctccctaagtttttactaattccttatacattcaacagttcaacaaatcatagttcaactatgttaatgcgaaaagagaaaaaggcagaatgaaaattgtattattgaatgaatgaataagaactattttacaaggctacatatacagggcagatcaggggtgacacatcaacccaatttaacatgtgcaaaacaccaggacaagaacgaactgactcaactaaataactaacctatctgacatatctaaactaaaataaccaattgaggataaataggagaagcagttaggattagtagaaacagctgacttagtaattctgatagccccccctcaagatggacggtaaatgtcatggacggacatcttggcaatgtgagaagagagtgtagtagaaggcagcagttttgtaaaagcatcagcaagttggagggaactattgacagggatgagtcgtatggaagaattcttgattttgtcacggataaagtggcaatcaagttctatgtgtttggtgcgttcatcgaatgttgggttgttggcgatatgaatg

SEQ ID NO: 70347 - DNA, 3644 bp, Cannabis sativa
aaagccataagttaagtaaatctctaatttttccatatctatgaaatttaaggaaaaaataccatattctacttaatttcctcttgcaaattctttattaattagctatttcttcaacttcgaacctatagttatagcaggcccatagggcccaagagaatcatgtgattgcctcatgagccactgactttgtatctttatatgcagaaaagcatgggtaattgtgtttattaaccccccacaaaagaaagtatattttattgcaaaggtaggaaaaatgttgattttgtgtcttcaaagtatattccttgccaactttagcatagataagcatcattctatactgaggtctcttctatactagattacaactagattagatatttgatcgataacgatggggccagggccatggccattggccattggccacaatcacatactacaaagtgagtgaagctagctaatacttttttttttatttgcatatccaaaattatttcatattaatctaaattatcttcattaatcctcagattgttttctgtctttattcaataagataataatgtaacattatctaaagtttcttaaccgtaacttcattcaattatataatgatattaacattatttaagatttaattcttttaagaaaaatgtaacaaaaatctcaaatttcttaaccgtagcttcattcgttaagataataatgtaacataaatgtataattaagtttttttatcacaaaatatattagtttagacaaaagtctaatcaactagttaggggtgttcatcaaactgctcaaaccgtccgtacaatttgaattttttctaagctgcacggtgtggtttgcggtttgtagttttgaattattaatatgcgattcaaatcgcattacactgcaccgcacattatataaataccaattttttttatatttatttaggtccaatatgtgaatgttcaacttaaagcccacaaattattgtattgttaaaacttaattattttttcatatttattttcaagccttatcgtatttttgacaagtgttgttcaagctttattgtatttgtgataatttaattatttggtgatagtccaaaccgcaccgcaccacactattttttacaatgcaatttttaagtttcacagtgcgagtgaagtttgagaaattagaaaaaccgcatgtgcgagttagtttgaaaaaatagtcaaaaaccacatcacccacactgcaaacactcatacaactacatgtgttgaaagagactagtttatgaactaccatctaatcccatgacatccaaataatgccacgtcccttgctagaagaagttttctaccagaactgagccatgagttggtaatactttgagtttttatttctcttgagatggtaattacagcaatagactaagtatcagaaactccaagctctagagagagaagctctgaccttgtgggtagttttctgaatgtaaaaaatgagctaagggagctctcattttatatgtgaatgaggcccacaaatataggagaaacatataaataaggtattttctgcggttgatgatgatctaatggtgaaaattagcttcttgtggcgatggccaatttttggtgcctggcaggtcccgctgtgggttactcggagcttatttttgtaactctcttagagtgaattttgatgaagataactttagaataattattggggtgtgagacatgattttatagagtgcttaaatagtttcaaagcacaagttgaatcacatcaattagatacaaactgaaagcaattcagatcccagtgcccaggttgacatccagcgcgcgaggttgacacctgacgtcaacctagacgttgtgtaagtataaaaacatccaaagggtgtcttttgagatgcctaagtgatagtttaacaccacttagtccatttataggttctagcgaagctagtcactaattctcgggatgttactgttttgtggaaacagaagactcgaaacttttgatttccgagtgagtcaatttgttaaaaaattgaagttatgaatgtaattgttctaacttcatggatcattgtacttgtgaaaatctagacagatggtcaaaacatcatcatatttagataagcagaacccaataaaccaagccatttgttgacctgggcgcttggccctttaaaccgagctttcgggattctgtttttgatactttcaagtcttctaaacttaaggacgaggtgtcttcccctgtttttgaccatgccagattcaatggtcgcattagatttgacatttgagtaattgacgacagcgtctcaagttgattgttaacctgggcaatgggccctatttttagggacacgagtttgtggttttttccttgagtttacttgaatattcattactttttatgacagttcaatcccgggagcactttttgctgagctgaattggaaatagcccaggttgacaaaatgtcaaccttggggctgggcccagccccaagtgtcaacttgggcgctgggtcctaattttgcccctttagaaattttgtttggtccccgaaaataattgaaactcaatattttctaaagacaaagatgatgctcaaagaattcttaaaaaactccatttttgtggcccaggttggcaaattgtcaacttgagctctgggctctgttctttaagctcaggaaatgttataaatcctccggaaggacctatttcctcgtttttgatgaagacgattcaaagcaaaagtcaaatctctaatcagacacttggaaggcgcctagattaatagattgtcaacatgggcgctgggtgctcggggcgcaaggccccgggtgctcaaaaatcaacttgctccgattctgatttcgatgcctcaaatatgtctgtggtatgtctagttgatgtcctaatgcaatttttgaccactttctactaagaaagtcccagaaactgaaacattaggtgctcaggttggcttttgggttgcaagttcgtgtaatttcagctcccaagtcttggattaggttgctctatgtctttatggtacaaaatattggaagatagtggattggattcaagttattgaagtttgaactttcattctggagttctcgaagttaacctgggcgcagggctagggacccctcctaagtcgacctactatgactcgagactactcaactccgagatgtcatctttcttgccacgtgtcacattgatgttcacgtcatcgaagctactcttggtgtaaacactatttttcatgattggagctcatttttttaagacacaatcgctattttatctaaagagtgtttaaagaacatagttggagatgctctagtcttttaaataataaataattggctactggaagggtgaaatttaaagaattttaataatcgagggacgaattggtgaaaatagtttatgggaaaaggtaataacaattttaataataaaaaaatcagaggtagacgatggagaatgcattgaagaaggtaagtgggtcccacagagtgcttaatcagcattcagcagcaacaacaatcgattcatgcaattgcaaacttcaactctcctctctacacgtatcactcctctaccactctc

SEQ ID NO: 70348 - DNA, 1218 bp, Cannabis sativa
  modified_base (1183)..(1187): a, c, t, g, unknown or other
ctctctctctctctctctcgtgcgcaacctcctctctcatgtgttgactatcttgtttgaaagacgagcaacacccacaaccatcgccacctcctccactgagcctctgtctctcactcctcctcattgttctcattcttagtcccaatgcactaccaccgccacccaccttcgagccgacaatccaatcgtaccactaccgccacccaactccacctcgctctctctttctcctccttgtctcttctcgttcatggagaaccataggtaagagtttgatatatattttccttttgtattatgtttttgttgtggaaattctcctaatctcttgaaaatccatgacaaaggaacaatatggttgagtatttcagaaaacaattatcactgttaatggatgggtatacaattaatatatttgtaataaatatatatatttactatattgaatcgaaatgtggtgagatctgattttagtggtgtacgatttggttccgagggtgagatatggttctagatctataattttttaatggtataggtgatagttttaaatagtcatctatactgctcagtattggtgactattttgcatagtcgagaaaaagttttcctgatgtttttctatcttcgcctaatctgtctagtttttccaataatcgaataggtgtcagtcttagaaaccgaaaagaatattttacctgactctttaaaaatgttagaaaaattcaattttataatagtgattatgattaaaatatagtaaaacttttatcaagaacgtttagtcacatatgttattactaaattatccttaaatttaatacatttatagtcgcaaattaattatcataactaataatatagctagaagatcagatagatacattgacaaaactcacagaccgtttggctcggaagcaaagtggatccgtatctaattcaaaagatgaggatccacaatcatgtgtgaaaagagttattgagacccatttgcctaaaaaattttgaatcccacaaatggagttgtacggacacaatacgggtcccgtgacccacttctccaagtacaataggttgatgcaagtggcgtaagtcagtgaagatgggacatgtctatggactacaagaaataggtgttgggttttgtgccctaactaaactcattttaatataatcagannnnntaattaataaagatcaaaaattattttatgt

SEQ ID NO: 70349 - DNA, 1891 bp, Cannabis sativa
taaaaacttgaagtagatgtagatccattactatcacgatatagggagtgaactactataaattttctatgtctctcttataattactatactgtttattcattcttgtgaatctagtgagcgggtgtggcttagaagtctagtccagatttctgaattaataatttggtcctttgattgagagccatagctcaagaaagttactaagcaagatggttgcaacgcgttctacaagtgttgttagatagactttgacaactagccaagcaactgggggcatgccagttgatggagttggaacatgactacttctgcgccctaagcgccagtagcaggcctcagctcggctcctcaactccccctccaagggcaccaccaacgactagttcccacatggggagcctgacatggagatagacaaccttgaggaggccaatcctcaagtcgctcagcttagccaaattgtggctgacttgcaacaacaattacgagactctctcgataagcaacataaacggtttcaacattggttcatggaaaatcggaagaacattgaaagccaatgcattgagcaggaataatagagagctaacatgtctcagtggattatagaggcttattgctataatcgtggaactacttctcgtagaggtatttctgagttgatgagagagactccctgtcaaccaactagtcacgtgggaactagtgttgaaggcaacacccttaatgctcgaaacacctctactacacctgataattaagcagtgactaggcaaacaccagacgtgacgacctcctggaaggaaggtacctttgagcaagagcatgagaggactcaagctcgagggcgccaaccaatgggcactccatttgatgttgaacaacctcgcaacaatgagagagccaacaagactcctccaccaagtccttctcatcattcttaggagaccatgccttgagaccctacaaggggaaatggatttaccactcaagctgaaggaagtagtaggagacgctactttgagaccggaggctatgagatccgacgggtaaagactaatgaaccacttcatactcggaagtactttcgagatgaagggatgaattgtgccgttacttttcccatggcctcgatggccaatagtacgagtacttccctcgagtacatgaagaaaaattaaacttaagcaaccaattcaattctcttcacacttgtgatcctactgaagactactttcagggaagtagccattacaacgctctgaatgaacactctcacagcgggttgtcctgagaaaatctagagtcaatctggaggcttcactagagtttccttcacgaccccatggtcaagagacaactaaaagacacaggtcaacttgagtacaagaacgacttggaagaccaagagacatgcatgacctcttaaccaagaagagaatgatggatgtgggaacttttttagaagaccctgtctaagtaaaagaagctctatctgggacgcgaacccccactcacaggatcaatcaggcagaatttaacaacctagctgctttagtgaaggggatcatcacacttaagctgactgaattcgagctcgacagagaatggcgctcaccactctccaaacgaatcaaagctcttcccattcttctgaagttcaagaatctttcttggcatcaatacaccgggaaagaagatccactgactcacatccactactttgaagtacagaccgatctgcaaggtgtgagagattacgttaggtgtagaatcttccatgctacgctgacagtcctagctgaacgatggtaccttaagctctcccctagatcaatcgattcatggaaagatctagtagataatggaaattattttaccaggatct

SEQ ID NO: 70350 - DNA, 2861 bp, Cannabis sativa
attttagaacaaaaagtgccaaaaaatgatgtataagagagataaaataaaataatatatttttaagtgatgggaaagtttttgacaatcttaaagaatgccactattggagatgttctaaccaaaaaaaaataataataaaacactaaatgaaaataccctcttcctaaccctaactcctcagtatctgaagatcgatttccgaacttgaaggatccaaaacaagagcaccaacatcgatatgtaatcctctactaccaccgctcgacccttaccaatccttggttcacgaaacaacattggggaaggctaaaagaatcaaaactttgagccacaaaagatggagaaaagttttgaccttcactagcaaagatttacaaccctcttggccagagccacccaagcctagcatgggtcatctagctccaaccgagagaaatgagaaattcccccaatggtgtcgttgcataagatagggaaattaagcccttaattttcgaaattaagcccttattttattttcaatcttgtatgtacactgttattcaatatcctatcttaaaatttatttatttttttcgaatttatttggttaaatcatataaaaaatttacttaagatttgtagagtggataaaatctatgaaatagtgcaggggtttattagtaatttgtaaggagtgtgaatgactataaatatataattatgtagcaattgttggaaatagaatgagaaaataatacttcgattcaagtgggagattgacattgtctcaaagagcgtattttaggagaatttttcatgtctcaaaacggactattatctatcattgatgccttcattgtgaggtcaaatctcctaaaatgcactcttcaagacagtgtcagtgtcccaattaaactgaagttctattttctcattctatcctaacaataactacacaattacatatctatagtccttcacacttttacaaattactaataaacctctgcactatttcatagtgtaacactttcccattcttcaaaatcaccttgtcctcaaggtgataaaaataaaaataaaatgcaaaaatacacaaaataataacaatcaagctccaatgtagcccatttgttattatggcctaatacacttttcagtgaagtcaagcccaaagtacctagggcaatcactcttcttcctcttcacgattcacgcagccagcttcttcaacatttttttcaaccatcaaactgttgccatcatgatctccctgtagcaattcatccttctcaatgtgtgaacccacaaaatatatgtattgtatgtatattcatcttgcagcaaaatagtaaacataattgagtgtatatatattttttctacatattgatgaataaggctaagattttcttcaactcaattgcttcgatgtgtttctacaatctggggcgaccgtgctttcgtctgcccggcagtgaccacagtcctctgatgaacttctactatccagcgcaaccacaattcccatctcccttctgtgctctaatttggaccacgcccaatttcctccaccaaccgacgatgtacctctattgcagtggtatttagtgccatctctgtcttctctggcgttggagtttttcaagctaccattgttgatgtagattacgaatccataacatccgatgaagttgcaccgatcttcttcgcctttggtggtcttcgagttgccttttttgtcgtcgattgtgatttacctagattgatacggagaggagcctcactgccatccatggtgttgcagaaaagatcatcgacactgtacacatctccaataagaatcaccaatgaattctcctctctctccgattcaagtggaccatcaatgtggttgtcaaccttgagagatgtaggtggtgccggagaggtgggaaccgaaggtgtctatattgatgtaagatagctcttaaacttggcatcttgtttctccaattgagcattgagaagctctctaaaatgcagtttcattgccttcatcttctatggctgagagttcttatagtgaatctctcactgtaatttttctcaatgaaagcaccaatgatagataatagtcctctttgagaaagaacaaatctcctaaaatacacttttcgagacaatatcaatctcccaattgaactgaaattctattttctcattacacatttatatatttatagtctttcacaccttttacaaattactaataagcccctgcactatttcatagtgtaacagatttacagcgctcttggctagagccacccaagtccagcatgggtcgtttggctcgaaccgagagaaatgagaaactccccgatggtgccctagcaaaagatagggaaattaaatccttgatttcctaaaagaaaatatttgctttatacactgtttttcaaatgataattatattttttattttattttcaatcttgtatatacactatgttatttaatatcctaccttaaatttatttatttttttgaatttatttggttaaatcatagaaaatatttatttaaaatttgtagaatggataattttattaatttttgtattaacatgttaaactaaaaaaaggcaattggggagaaaaaaatatactaatcctcatcacacacacaaaaaataatactttaaattttatatatgtttataatgtattattatcatcacctttttattatattattcttttggtaattttgcagttcaaattctaggaccaagaacaacatttggactcttatttatcatcagtcttatcatttataaatggaaaagacgacacttgtcaatatataatggcattgaggaatatctccaacga

SEQ ID NO: 70351 - DNA, 1307 bp, Cannabis sativa
ccaaggttatggatattacacatatctgccacatagcctagggctcgggtcgtgacagctgagcaggctaaggctcagatagactccagtaaccatatgcctcaagaagagtgggaagccaagttggcaaccgaggaggagaagtgggatgccaaatacctgaagaagtatttaaccctcaacgcctaaattgagcatgaggctgcaaagtcagcataagaagctaagaagtattcacgctctctatgagaaaacttaaccaaagtcgtaaaggagaaggacgttgctgaggctcgcgtgatggaaaagtctgagaccatcactatcctaaataacaggtcagcaatcttcaagaggacacgggccagaaaggcttatacattcagagcctagaagatgaagtgaaaaaggagaataagagagcagatgcctaagcggttaaatgtgacaaccagacccttctctacataggagcctgtcgcgccagtgaccttcgtgaggagagcatcgacaggctgcagaagcaagttaaccaaagtccctcaaattgtgtaaaggcatacattgccttagctacaatgtgtagaatgagggagactgccccccaacttattctagacgcgactaaggcagctaacagggtagcagctagggcagagagatttcaccttggcaccctcgagatgtcttatgtcgtggtccttcacaacttctagaaggtgaacccttccatacttcagcatattggtgaggcagacaaggaggaggttactaggaaggtactttccatgaatcgcggaaaatacctcgaggagtttcctctcacggtttatagcgatagtgatgaggagattagtgttcaggcctcaagttctcaataatgtaggagctaaggtgtcttccggtagggtcgaggaaagggttgctcaagatgctaccaatgctaacctaaagttggaggagctatctagtttcccaatcaggaccgactcagtaacacctttaccttccacggaccattaagggccttttttttttcttttcgcctcttctacttgttctttttaagacaactctaatttctttctctcctctttacgatgtgcaattgtattactttagcccaatctgcggggctatttgtgatacttacacccaaattttgttcttttaatacggcaatataattaggccgtaatattttcaactcttaactttattcgttggcatacgcagttttgtttaagggctgtcttcttacactgtttaaaagtgtgtggttgttggaagttattttaccaggaact

SEQ ID NO: 70352 - DNA, 789 bp, Cannabis sativa
taacaactgtgatctgagattggaatgtttactgataaggaggcaatttcgataatagagaagcccatcacgaaccgaatacagcgatgtatcaccctttccttgttgcaactcattgtgtaattgtcgtaagtcaggacaggtcaagttttcttacctcaactcgtccaagaaatcgaaagagccagtgctgagtgctagaagtatcatcgactaccgttcagttggttgtcttgaaagcgcatctgccgctgcattgtgtcgacccgacttgtattcgatggagaatttatagcccattaatttatgcaagaattgttgctgctccggagttagaatcacctgagtgagtaactctttcaggcttctgtggtctgtccgaataacgaagtgtctgccaagtaaatattgtcgccatttcgtgaccgcttcaattattgctcgcatctctttgctgtaagtagaagcatttatgaatttcgggcccaacttcttgctgaaaaaggctagtgggtggccttcctgcatcaaaacaccaccaattcccacattagaagcatcagtttctatgacaaatggtttggaaaaatctggcaaatgaaggactggtgtagtaatcatggccatttttagttgctggaacgcctctactgcctcagaattccattgaaaattgtccttccgaagtaatgaagtcagcggtgcagcgatggttgcgtatcgagctacaaatcggcgataataccttgtcaaccccaagaatcttcgaagttgttttagtgttgttgg

SEQ ID NO: 70353 - DNA, 1846 bp, Cannabis sativa
cattgttattgggcatcagtggtacctaatactttttataggtggtgccccacaattgattaacgatattttctaaaagttattttctttagttatatgagacctaatatttaattacactaataacagtatggcaccgaagaaggtaataaccatcaatagtgtttttttaccaattctcttttataataataataataataatgttaaagatatctatatatgatgcctagaaacagtgacgaacccagaatttttactttgtgggggcttatttatcattaaaaaatatttatacctatattataattactcttactagatttatttaattttgtgggggctttttctactattttaatctataattatgaaattaaaaaaattacatttaattttttaaaaagcaatatttttgttagtggggactataaccccacatcaataaaagtgggtccgtccctgcctagaaaaccactaactattttaggatttcacagatttttcaaaaataaagtaagtcctgatcttataaatgagttgatatgctatatatgtttcttatactaattttattttaaataataaatatgagattaaataaaatatacttcatatcaaaaattgaatgctatgctaaaaaaaaattgtactaaaattgggagagtaaatggtcacttacaatagatggagttccggggtgagtgaaaatgtaagcataacccaacatgactttatcagatggaaatggccaaatttgttgggaccaagtatcatgattatcaataaatgtcacagcattttctggctttattcctatcaagcctggtggctttccatttgagtctttcaaccgccacaactcccctttcaccgcatcctgtaagattcccttagttgtgaaatcaaacgccttcacggttccacccgctgacgcaacccaatctgccagggcgcctcgatgggcgtcctggtttagattaggttttccatcttgcccgtaggcaagtggatcccacttctctccaactgcaaactctggcattgtttgctccatataaattttggtaaattttggcgcgtaacccgtgaccatatcgaatcgaaacccgacgaatccaatctcggatttcatccaattcatccaatccgagagttctttctgaactctcgggttgacatgatcgatatcaggagcacccccaaagtctgctcctgtgtcagggtttcctgtaccgtcagagtaggcagtatcatctttgcatatgaaggaagggccccaatcaagacgatcgtctggggtaccgccttcgaagatacaatatattcctctttgatctttcttttcagctgttctatggtttatgactatgtctgctatgctttttattcctttttgcttcaaagccaaaattagtgacttcaattcctctttagtaccatattttgatgcatccaaatcatatagccttccaggcatataaccttatgaattttttgaatcattaatcaaagataatttacatcattcttaataaataaaaattaattaaaaaaaaaatacattaccataacacaaatgtgttgtttcgtcataaagagttttcttaacacttctctaaatgttatttatcataatattgaaatataacgtaactttagaccattttcagtaaaaagtaaattttatacaaaatatgaattacaaaattagtcaatgttattcggcttaattttttgtaactgtgctgaaaaaaatttattttaaatgaatgcataaaacgtaacaaaaagctttcaattaataaaagataaatagtgacatttttgggttggtcgagtccgg

SEQ ID NO: 70354 - DNA, 1046 bp, Cannabis sativa
  modified_base (978)..(983): a, c, t, g, unknown or other
aattcaaaatttataaaattgaagacagtttgattgtattgataaaattttatcaaaaaatttttagtttaggatactaaatatgtatgattttaaaatacaaactactaaatatgtattattaaaactacaaagtaccaaacttatatttagaaaaaaaaaacatagggtaacaaatgtgtataaaccctatagaaaatataccaaaacatgttgaggaaagaatgagcacaagtgatagtgatgagtgtattttgaagtttaggagtggacaatattgaaagacaaagaaagagaagaggcacatgaagaaaggaccaaatatttgggtaatgaatgagtcactcactcatagggtatactctattttgaccattagtcctttctttgatgcacaaaatttagattcctttggcctttgacatgtgaaaatggccactttacctctttttttcttttcttttctttgggaagaagaagacaacacttttccccactcactggttctgacatcctcgttagttgagcacttttgtcatctacacttgcatccactacttacaattccctataatatttacccaaaaataataaaaaataataataataaggcttacaattccctatatatataaacttcacattttgggccggtcaatcttcccttctataaaagtctggcccatctcagccctatagcccaccactttctcctaactccactctatctttataggcccacatttgtttttcttggaaatgtacaaaagtaatataaatatgtatatagttatttatttgtggggtttattcatttttacactttaaaataattttctttgcatttttacgaaattttatatagaaatttctattgcaattagcgctccaacctaaattataacaaaaaatcgtatagaaatccctatttcaactagcgctctaaccacttcaaaaatccaaaccgtaaatttaaannnnnnaaaaaaagttaaaaaaaatagtacataaatttaatactttttttttgaagagacgtaaattta

SEQ ID NO: 70355 - DNA, 3520 bp, Cannabis sativa
gcacgagcatcatcttcggatggtattgcaacgactcaaggatcataagttgtatgcaaagtttaaaaagtgtgaattttggttgtctaaggtatcttttttggggcatatcgtcggaaagaatggaattatggttgatccaagcaagatcgagtcagtgaagaactggccgaggccaaaatcagtgacagaagtttgaagttttctcggtttagcagggtattatcgacgtttcgtcgaaggtttcagtgtgtctagtattttttataggcggtgtcccataattgattagcgatattctctaaaaaattattttcttaaattatatgagacccgatatttaattacaccaaaaataatatgatatcaaaaaaaatatattagtaatatattttaacaattctcataaataaaccaaccaaaaacactatctatgagtctattaatataaattgatccatatatataatataatacataattattttttatattatatataatataactaattaaagttcttatttttcttgatttttttcaatatatcaaaccggtacataaaacaaaaatatttatatttatgcatgacccctatttcctgtctctagttctttatttaatcactttcgttagcgctcatgttttcatgatatcaaatcaattgctaattaaaatgggacacattaatgatggtgttccattcagattgaggatattcgttcatattatgcatacaataaaattatatttaattttaagtgtataacaataaacattatgctttttcttttctctttaaattatttctctaatttctctactctttagaagagaatatatactcatatatatgtttttatatataggtatatacaaacattaaaagagtatgttcgtaataaggcacaaccagaaggttcaattgcagaagaatacttaattgatgaatgtcttacattttattcaagatattttcatggtgtggatactaagtttaaccaaagctgaaagaaactatgagggtgtgaatttaaaagctagtaaaaaaaaattatcagtctttaaaaatattggtcgtcctattagaagtggtacagatatgaattttcttccatcaaatgattggctccaacttcgtctttatgtattgaaaaattgtgaagaagttcatcctttcatcaagtaagcatatgtatattcttgatttcttatgagatatttatcattataaagtaagtaatgtttgtcaacctgtgtttttaagcaggagagaaaaacatgagagaaatttaatgtagaaaaaacattcaataaaaagtttccagaatggtttgagaatagagtatgtctatcataagttatttttgaacttagattttattttgtacaagtgctaattatttctcataatataaattaggtgatgcagttgcgatgtactgaaaaagttgattatgaattgttttcacaagcccaaggaccttctaatatagttaatttttataatgagtatctcatcaatagttttagatatcataccaaaagctattcaagtaaaaggactactcgaaatagtggtgttgttgtgaaagtagagcataattctagttctcgtgactattatggtattttggtagaaataatcaaactctgttacagtggagatttaagggttgtattgtttaagtgtgattggtgggatgtcaaaggtgataaaggaatttttgttgatacacatgggtttgcgagtgtgaacacaaaacggttattcaaaactaatgaaccatttgtattagaatgtcaatgtgaacaagtttactatgtaagagatgttaacaatttggactgacttgtagttgtaaaaactgaacctagggatttctataatattccaatcaaagaagttgatgataacgaggataaagtatatgaagatatggagccataccaacaaaataaatcatcagctcatgcaatatttaatgtgcaaaacaaagatgatgacatagatcaacctgttacatgggaaagggatgatatttcaggatttacgattgatgatgactttcaaacattagaaaatgacaatgatatattgctatgtgatgaattattctttttaagtttatttgtcatattaattttttgtttgttaatgtatatatatttattcatgttttaacacaatttattaaagttattatttttacttcagtttattatttatttcatttaccttatatgtttttgtatattacaggaagcatgataaagaaatctaaaagaaagcatatgcgtgaagtctttccaacaagagatggagcttcagatgtagaacaatctacaagagagagtattacatcttcaccaactttacatggagacgaacaaaacacacagggaaaaaatgacggtatgggaaagttaatattcaattttcctttgttcatcatgttaggtcatttatattaaataacatatgctatttcgaaaaatagatgcagacaagaagaaaatttattctgaaactcacaatcttaaggtgttagaagaattcaaaaataagaaagtacctgtacaattcaagatgggaagacctgtagagaaaactgctcaatattttattactcaacttggagtgcttttgaaaaatacttcaaattctcttttgaatgttcaaacttgggattgtattgagcaatccaaaagagataaaatttgggagcttgtaaagaaaagtttcaaagaatattgaatactattgcaatccaatatgggaaaagtcgtttagtccttaaaaatatataatttaatgcttctttttacaaaaaatcttcttatcactcttttagatttgcatgatacaagtcattacttaattgaaaattttcattgttgcagaaaatatttgaagtaaaaaaggaagacaaagaagttgtcatggatttatgtcgtgagaggtaccgaagtagaaggtacaagctgaaagtcaaatactttgacaacaagatgactcaaagtcaaccaaaatcaattcccgaagaacaatggaaatcgcttatttcttattggtcttcagaagattttaaggtattaattttactagtttgtataagaattagattttttctatggctatatactgaattgttgtttgtctagcttaactataatccataatcatattttctaacttgtaagtataattttatagtttataagttcaagaaatataaataatcgatctcatgtgaatatggcgcatacttttgtttctaagagttttatgcgaattaaagttgatcaggtatttaatatataatttctgtacaaaatattataaattttgatgaattcttttattatttttttcatctatcttatattatatatagtttataatgttttagattttctgtaatacccagtttaaaatagtatttaatttttttgtttggatattgattgtgtgaggataattatcttttatttgtgttgttagtgagttaatattatt

SEQ ID NO: 70356 - DNA, 867 bp, Cannabis sativa
aaaaaaactattaattttttttttaaaactacctaaacgtgtaaaaaataattaaattacaatcatatgatttatgattaaaaattaatatatattttgtatcacatgcattagatataaatattattattttatttaaataataatagttcaatctttataacataggtgtactattttattccttttaataattattaaagtttgattattgttgttatttatattattttcatttgaaaaaagtagccagctagagatccaaatctaatatcaatcacactaataataatgataaagtaattttatgtatttatttaagaatttttccttgaaggtggtttacatgatgggactaattaaatgtcatttttcaagtttcaacaatataatctagacttataattaattattatttatggacaaaaagacaattatacatattgttttaagtggatttgtaaagtattagtggtgaacatcattattaatttattattataaggtattatattgttattagtacattttattaagtattaggtctaatatatttaaaattaataattatgataaataattttaaattgattatctaatgggggctttaggctttaactcccaatgaagacaatggtgttgttgattctcttttttttatggtgaacaattatgatactcttttttctttttctttttttttttcacatgcacctctatacactaaagtactactcaaaagtgtcacaatataattaaatattggtatttatataatttaatgtaataatttttataaaatattattaactatttataagacgccacctcataattaagggcggagtcatttgaagcctaaataag

SEQ ID NO: 70357 - DNA, 2212 bp, Cannabis sativa
  modified_base (2172)..(2187): a, c, t, g, unknown or other
ttttggaaaaacgtgttttcaattgctattacaggattagtttatcaaatttgaatcaatagaaatgagtgcttattgaatcaaaaaatataaactattgatagatgtgttcaagcaattcaatttattgtgaagaatagaattgtatatattagaaaaggaaaggtttcatatgtggatatagggtggtttgagtcattgtaaatggaattttgattggcaagttagctcaatgaaagaccttggttatgaggagctgtataggttgtaaacagttcttatggaggaatacaatgtaaactgattcatcaaaaaaatattattataatgttttctaatacttgtattttttttatatataacgggtgttgctcgttctcacgggagtgatggaggaagtgatcctcctcacggtgcgacaaatattggagttgactatgtgcgaggttatataatttaacatatttaacttatgttattgatatttacgtaaatatactaacttatgaatatttaaacatgacaacggttcctccgaagaaacgtggaccccataagggattaaaaatatgagaaaagtgagaaaaacttaacttccactgtctatcgagttggacatcaaaggaaaaatatacaaggcagtaggtttgtacagtttagattttttgagggagttaggattactcctacaacaatacatgaatccaaactacaaaaattgggcacaagtacctaactctgtgaagatgaggatgttgtctagagtagagataaattatttttacaattaaattgcttctcataaattttatataatattaactaatgaaagtttgttttataggacaatatttttgagatcggttgcgaaagatatggagcagatcatctctctagtatcttaacaggcactgataaatcttgttttgaaaaatattgcgacttcaagcatgaactcgaagaacacttcgaaaagaatggtcccacaactccatatgtcggctgcactataaaccagtagaaaaaggccatcacgttttttgaataacctgaagtgaaggtgccttaattttattcaaacccaattgaatttttactaaactattttaattttacatattaatatctccatatttatttttgatagagacgctcagagatcaatgtatcaaataggaaaaaattgaaagagttgagccatggagagtctcaatctatacttgctttgcgttataaaaagagtgatttatttataatataattatcatatttttttgttgttgttattactttgaataataaaaaaacatctatatcatagcgtgatccagaatttgggcgactggcaccgatcccaaatgcttggcagaccactcaccataagcagggcaaaggatgggtgactgacactgcaagagagacatgggtatggtttaaacaaatactatcttctttatatgctttgtataaataaattttatagttaatttaaatattattgtataataggagaaaatgactgccatacgtgagatacaacaaacacagtccacccaaaatattgaagagttagacaatgtcatgaatccaaaagaggaagatctgtcacttgtccaaactttttttttggaagatatcatgggcaccaaaaaggttacggacgtctaattagcacaagagagatggcaacaccacttatgtttactgaactccttcagctcaggctagtgtatatgttggagctcatgtcatagctaggagcagcttagacagttggagaaactagttaggactccaggatcgcagaatctgcctcaacaatctgatcatcccgatgatggaagactgagtcagtagttatttttatatgcattgtttatttgtttcatgaactcttttattagcatatttagtatttagataactgaacctataacttaaaaatataaaatatcaaatttatgttatttttattaataaattttatttttatcattattttgaagaaaactaatgtcaaaatgaatatgtataagatatatttagtatgaaagttaatattgaaaaaaaaaacatagtctgttcttgttaaaatcttctactaagggccgacccaagccaagcacttcaggggccttggacaaaaaataaaaagaggaaattacactctannnnnnnnnnnnnnnntcctcttttatttttaccctctttt

SEQ ID NO: 70358 - DNA, 2215 bp, Cannabis sativa
aaaaaaaaaaaacgttattaaatatgtatataaggcaaataaatagcttagtagattgagtaagatatatttgataataagattgaaaaaggggtatgatatgtaaaatctcttttactcacaaaaacaaagttatttttgtaaataatttctaaatttaggtgcctcatgaaaatttccctttatattacacacctcttaggcccagtaagctcatcttaatatttagattgggctgccaatcattttactttcatatggctggatcctttagcccaacaacttctatttttaaatattttactaaattatatataagttttattaaaaaaaaaatgctcatattaagatttgactaactatccaatttggctaaagacaccatgtgtgaggggtagcatttttaaaaccaaccatttgattccaattatacccaaaaaaaaaactcaattagccaaatcatttctctaatttcaattttattgatagaatatttatatttatttacttaaacccaacaaaaaaaaaagttcattttgctccaacaaagcgtttactttcttttagcatgtaacatgcactcacatgaagaaataataaatagaattattaagaataagtgtctttaattaattaatattataattttttaatattgattaattattatctgtaatgaagaacaactacacacttgggaattatatattattatttaattttgtctataaattcatatgaactgacttagtcatattatggcttttaatctataagatattatagtgtcttcctcttctctagtattaaatataattaattagtttgtaaatttttgtcaaagtaccatattccaaataatatatattaaaaataaaagcaaaccactttgttacatgatatataaagaaggcaattacaagtactatatattaggttgtatatatataaagagaaaattagaggaaacataaccctcctataattatttatatatatatacacacaaaaatatatatattatatacaaaaaaaatatgatgaagcaagttatggcgtccaaagctcttgttatggtggtacttttgtttacatgcttattttcaaaggctcttgtccaaggtacaatacaaaaattttagtttttttttttttcatattattattattttcttttgaagttttgtatataaaatggtattttttaacaaaaaaaaaaaaaaaaatagatctactaataaaaaaatctccatcaactccattatgatagctaaagttaaactacttatttctctaaattttttgaatttttttttctttcatatatttatttatataaataatatcaaaaaatataaagtaaaaatagagaagtacttggatctatttttctttttttacacaaaaaaaaaataatatattgaaaatttatttacttaattataaaaagtgtaataattttttatttttttataggacgaacaatggagaccttgatgaagagatctgatgaaattaaaagcggttataatattaagaagattaatgatgataataatgaatttacaattaaaatggagcaaggttttgtttttgcagcagactaccatccaccaaaaacacaccctcctgtgcataatatacatgattagcacagttagaggcttcataatattattgtggcatatagtcaaataacatttgatgtaataaggtatattccctttatataaagattctttcttgtgtttggcaaagatttatagaaataaatttatatgtaatttaagaataaatttacatagtgatgccttcgagttaagggggcagcacccatgcatgatgtgatttagtccgttttagagtgcatttgttttttttttttttaaagattcagatatttaaatatttaaatctaaatgtatatctgaataatataaaatattatatcagaatttgaatataaaatatttacacgttttttttacatctgaatgtatctttttttatatatttttttaattatataatattaataaatttattaaattatatatttttttataaaaaatatccaaatacaaagcatgatttttttaagggttatttgcggcaaaactccctaaagtagagaggtttttgcacataacctccaaatctaaaattttggtggtaatactacctaaaccactggtccgttagcaaatacactccc

SEQ ID NO: 70359 - DNA, 1458 bp, Cannabis sativa
cggtagggaacttttgctaagtcctaccatagtcttgccctatatatatatttttgtataaacaaattattaaatctatttaaatagcattaaaatttgaaaacataaagggaaagtatatagtctagaaaaaatctaatttattattaaaatatactcatacttattttttacaaataattcaaattaattgataaaatttaaaattaattaataatattcaaaactaaatcaaatatacattgtcttatttacttttatacctttttaattttaattaatgctataaaatttttgtacaaaatgaaatacatttatatttcattaaattattagtaaaagacgttaataaaaaaaaaattggaagatgctatacgcacctatccacaaactataattttatattttagtgttggaaaaaagttaggtggcgtttgttagaggtaataaaatagaatagaatgaaaagaaaataattttttttctatacctttatttagttgcatttaaaactattgacatactattttgatggaataatctttcaatcattttggtgaaatgactattccattttaaaatagaagtaaaaactatttcaatacaaaattttaaaaaaaattaataatttttttattaatttttttatgaattttaaatattatttctttccattcctatttcaattttcattccttctaatcaaaccccacctaatttatacaaaactacaaatattgaaagaggcatgttccacggcttatcatctaaaaccggccaactctcaagtctcaattacaaaacaaatattttacttaaatatatatatactagtcattggtatgtgccttttgtgttttgtttcaaatatttaaataaaagttagtaaaatatctatttgttttatttgtttgcaaagaaaatatatagaaattaaatcttttgctcaataattatttataaaatttaataataaaaatatcttatgtaatatatatatttctttaaaaaaaaattgcacatactttaatttaaaattacgtttagttttttttttttttgattaattttaataagcttcttaaaaagtatatattgtaaaaagatatgtggaaaaaaatgaaaatgaatgtgtttgctaagaacattaacttgagattaaaacaccacattaacttttaattaatgtattgagtttgtgattaaaaaatcactccaatttggaggaaatttggtatgcaagtacttttactattttaatagcaattaaaaaagtgacatttagaataaaaaaataagctatagtatttttttattgactgaagtaaatatttattttttaaaaaataataataataaattatgttaggtatatatattaaaatgaaataaaataaaataaaaggtgttatccatgtatatatttaggtatacatattaaattgaaaaaatatttaa

SEQ ID NO: 70360 - DNA, 1721 bp, Cannabis sativa
  modified_base (32)..(41): a, c, t, g, unknown or other
taattggtcacttaattttgtatcacactttnnnnnnnnnnatcattatacatatgtgcccacacaggattttagctaaaaaaggctttgaggatacaatgagtatatgttctttgaagggtttgatgagtatttataaagtttacaaaaattatacttaattttctttttcctttaatgaaagtttacatgaattatgaggtttcatcttaaaattaattggtatgagaatagtagcccatacatcttatgaataatatttactatttaattttaatacattatcaatgtggactgtgcattccaacctataaaactataagagtgctgactaggtgaggtgaacacctaatagatataacaaaatgtgggcaaacccattaatgtccaactttactatactgtaaaacttgaaatgtaaatgcaaatattaattgaattaattaaaacgtgtttcattccatcttggccagttggccttgtcacaaaccaaactagaatgacgaaaattaaaatacaaatacaaatacaaatacatacacacaaacacactttacgtactcacctcactttcttattaattttctatcctttcctttttgtttttgcttaaataattaatgtaaatgttcttagaatttatataaaaatatttaagtttaattttcagtatcaaataaatacttaaatttaatttttagtaataataatactaaaattatatttatgtaaatttgtaagtatatgcttaagttttcttattggtatatttaatatgaaaggcttaccaaattaattaaatatgtgaattaatatgaaagacctaccaaattaattggttgatctatctatacatatatgaagtagctacacaaattaactcaacctacaaaattttccagtcctacttaattttcttatatgaattcagacctgtacaaggcagcctctaatggcgaaatcggccccttcaagcaaaatcacgatgaacttaatcttgtccaattagtcacccaaggaaagaatacagttttgcatctcaatatcatttctgaaaaaaccactgacgaaagcttcacaagagaaatgctggagatgtgtccagcattgttgatgcaaactgatgcaagagacgagactcccttgcttgtggcagcaaggtgtggtcgtgtctctatggttaagtttcttattgaaaaatgtggagacgaacaaatggcgaaattagagatgatgaggatgaagaatatagaaaagaacactgcgttgcatgaggctgtgaggttcggacatcatgaggttgtaagtatattgacaagagaagaccctgatttctcgtattcagctaatgaaatgggtgagactccgctttacttagccgtcgaaagaagctactggtgcccggaattggttgatgaaatactgaacaattgctcgttgttggacactggtggtcctaatggaagaactgtactgcatgctgcaattcaaacaggcaaagaaggtacttaatattatccactatatgctaaataatatataaggcattaatagtgccaataatatataagcagtagttctaaccaattttaagacaaattattaaattaaaatataattgtaagcacggtgtctattgattgttatatataattgtacattaatattttgagtatatgaatacttacaatcttattttactcaggtttggtgaaaaaggt

SEQ ID NO: 70361 - DNA, 2072 bp, Cannabis sativa
taatcctaaccctgcttttcaacaatggcttcgatttgatcaattcattatgcactagctaatgaactctataactgaactaatgcttggttatgtgatcaactgtgaatcttttgctgagatcaggacaatcttcactcaacttttcgcaaccagatcatgagccagactgcttcaaatccgtggccttctgtaatcaacaaagaatggcttactctccattgatgaatatttcttgaagatgaaatagtatgttgatgctcttgatgcaactggacaacctatttccagtgatgacttgattttctctttatattcttttggtggtcttggctccaaatatgaagcagcgattgtaaatttaacctctcgaactaataatctaactttgcaagaggttaagtttatgctccacagtcaagaaatgagaatcaaacaactaacaactgaatctcttacgaatgtccaagcaaatctcaccaatataaccaacaccagaagtggttatcaaagcaatccaggccgtggctatcgtggatttagaggtggctaaggaaatagaggtggaagagaaaatcgacctatatgtcaactgtgtggcagagcaggtcacaccgggcttaaatgctaccatagatttgatatcacttactagatcccctcctaatcaagaagcttcatcatcttccttgattcctcccaatactaatccacaagccaatctctcagaaattctcaatgtacctgatctatcgggaacctggtatcttgacacaagagcaacacatcacataaccaacacccctgaaaacatggccaattctgcagactacaaaggcaaagcctaagtagtggttggtaattgttctatcctccctattcatcaaattggtaacactgtcattcctacacagtctagtaccaaatctttagtattaaaagacattttacatgtccctactttcactaaaaacctgctcagtatttcccagttcacttcatataaaaatattactattgaatttgactatgtttcatgtcttattaaggacaagacaaccaagcaagttcttcttcggggaattgttatgctggcctttatcaacaccaagtcgattccaatcctcatgttttcaattacacaacaacttgtaatcctatttttgacagatttaaaactgttccaatttggcattgtcggttaggacatccctccaagaatttcctaaccaaagtcctgtctagagtttttcctaatacaaaatgtaataattttgattttcatactgcctgtcaaatagacaagcttcactagttttctttcaagctaacattaaataaaattacaatgccttttcaattgatcttctctgatgtatggagcccctccttttacccctttaatgatggatacaaatattatattagttttgtagataattttaccagatttgtatggcttttcccaatcatatccaaatctgaagctgcacctctatttcttcaatttaatgcctatgttgagaggttctttcaaacaaaaataaagagtgtccaacttgatttaggaaaagaataccaatctctctataacttgtttgccaagcttggcattatcaagagaaactcgtgcccaaacacacacatcagcaacatggaagaattaagagaaaacgtagacatgttgtcgatgttggtctcacacttcttgcccaagctgagatgccacttcatttttggtgggaagcctttacatcagctacctacttgatcaataggctccctgcacccaatatcaattatgaaacacccgacttgctacccaagctacgcaagtattttatcttgatgatttccttagaggtaaatattggaaaatagtcaagaatgtaaaccattgacaaattcgggacattgaggaggatgaagatgatgaagatgttgtacatgatttaagctcctcaaatttttgattgactgtggatctaggagagttaattttgcaaccttctgaagtggcgacaataattgatactacacaaaatttgaatgttaatcaggctgatgaaaat

SEQ ID NO: 70362 - DNA, 724 bp, Cannabis sativa
atttaacagaatattctttttatttttaagtatattctgttaaactaagaaatgccgttagataggcacttttaatatatgaagatatcaaagagaggaataaccgtttaaaattaatttaaatagatttatgtatttttctttaactctctcgtgattctaattttttattatttataaatattctatcaaaatataacttaaaaaatatataaaaatataaaaatagcacggcataataaacgtaactatatttcacaaattaattacttttattattttaatagttgattatataaagggtagtttttttatataccattttctaattttttttttacggtttggtttgctctagtagttgttgtatgggttgcaatgtgaatttgatttacgatttatattgctccgatggttgctctatgtatttccgtataaatgcactaaaaagttactttaaaatgtataaataaaaaaaatttataaatgagatctaagcttcattacaacaaagtacgcaacatctctattattcgtatatttttctccttctcttttatgcgattttaatttagttccaccagtgaagttaaataatttagttgttttaaaaggcaattacaagttattcaaactaaagaaagttcttaactgttttaatctccaaatctatagtggcgcaaggcaaaattaataagttagggaatttacttaatgaattcta

SEQ ID NO: 70363 - DNA, 1829 bp, Cannabis sativa
gtgggaatcaatttcaaaaatacagaggcataaatctaaacatatgcggttccataacaaaataagtaaaaacaaataatacacagtaactcaaaatataagataaagaaccatgttatatttatcaattagttaaaaatatgtgataaaaaactggttctgtaaagaaactaaaataaaaacttacacacaaataccagttaaataaatgaataaatcaaaagtcagtttttcttgaattaacaaaatcaaaagtcgatttccaaaataactaaattgaaaaccgattccttaaattaattaaatcaaaaaccagtttttgaaataaataatttaagaactattttttgaaatgactaaatcaaaaattaactgggacataaattaaaatagaactagttccacaacaaaatgactaaaaataaataacacacaataactcaaaaattgattctaattgaaaaaaaagggagtaaaacagttatgaaaacattgatacataagttaaaccagaaacggttccacaacaaaattagtaaaaacaaataacacacaataactcagaaataagttactaatttaaaaaaaagagagataaataatttcaaaaataccgatacataaattaaaacaaaaccggttccacaacaaaatgagtaaaaataaataacacacaataactcaaaaatctgttctaattaaaaaaaagagggaatcaattcgaacaatactttgtcaaattaaatagaaccggttccacaacaaaatgactaaaaataactaacacacaataaatcaaaaccggttctaattaaaaaaatatataatatatattatgttggttaaactatgcacacaaattgaaaaagacacattcatcacaattttgtcactccaataacactctaagaattattactcaattacacaacatgagccactaaaggaatgaatgatataaatgtattattttttttcatcatgattagttgagcacgaaaagtacactaagcaaactactttcctttcctcacgagagaccaaaataaattataaacaactttaaatagctacaacatatacaatcatgaaacacaaaaataaattaaaaggtttttttgaatgctgaactagatatggatatttgggaaaaagataactatattagaaatttgaaaatcatatcttgaaagagcaaatgagatgcctccccacttcagctacttttcattaattgaaaaaaaaaaagaactcaattcccttcattattttgctatgtaaattttcaaaatttccaattttttttatcaatgccataaatcgaaaagcaaatggcaagtcacaattagctgtagcaaatttggaaatcatactaaaataaatttttaagtttgaacataattatattcattttttctttttcattgtaaaataagtttgacacacaatgactttcccgtgtgtacaagacaataattattgaatttgaatacttatttttgtatcaaaacaaaacaagaagtagaataagtatcttagaaagagacccaattgtaaatttttttgccaaggctcccaaagatttgaaaagaaaatgttttaagatatatattgaaggatgtatcttatttgaatatacagatcaaccaaagccaagattgggtttggagagcaataaaaatcttagagatggtttggtctcctctctgtataaagacattagacacacatcatcaaaaggaaaaaaaaaaaaaaggcaagacataaaataacattaattttagctaattaatcaagaattgcagatcccattttcctgtgcatgactt

SEQ ID NO: 70364 - DNA, 1191 bp, Cannabis sativa
caagagtcatggctatgtatttcagcaggttttgacatagtttccttacttcttttgaataaagatccacagtttcactgaacataaagaaaagaaaagaaaaaagaattataatgtttggttatgaggttattttacgggcttatttactaagaatcacgatatctcagtaaaattgagaattaattaggacatatgttattttatttcatattagaaaatttatagaaccccaagatactatattgcatataatttaaaacactatgaataattcaattcaatgatatagaaaatatacgtgatggctccataaacataatttgagacataatatagtttggtagtgcaatactaacatattaagtctttctttatagatctataaaatagagtagacccaatagatcaattaagacatacaattgtaataagacaatatgtattgatagagttagagaggagacctaacaacaaaaccctagttgcactggcctccttatcaaaagcttcggtttactaaaaaatttcacacttctacttcaactaaacatgattcagatgttaagaccactaattatagatcacaaacattatgtgttaaaatgacaaaaaactaatcatcaacccatattttaacaaacaattaaaactttgtggtaagtctacagtatactcccattaaggggtgttttagtagagcacccaagagaacttttagtttaatttttttttttttttttatgattgtgtatgttatagttatttaagattacttgtagatttttagaaaatttctagtagtttacaatgccgaaaataaaatttacatattttgttatgcgcgcgactgttttttcttatacgtatggtaagtaattgtttatatcttattttcggtattgtaaactattcagaattttcttaaaatttacaattagttttaaatagttacaacgtacgcaatcatgaaaaaaattaaactaaaaaaaaatttagatgtcgaaacagataaaaaatctaccagaacgatctattgaagtttactagtgaaatttttaaaactttaatgtaagatcatataaaagtgtaatatatattaatattaataatactaaatatatgaaagggtaaatattattttggaccctctgttttacaaaagttaccaattggaccctgtgttttgtt

SEQ ID NO: 70365 - DNA, 1311 bp, Cannabis sativa
gttcagacgattgatgttcccaacaatgtttgtgaatttcccatttagcaacattatgagcaatgaaattgtaggttcttggagtgtgaatgagatcccagctcctgagcttgctgcaacgcttgaggaatcgattccttgctgcatccaatttgaagagagatcttgctttcgcccgtggtttcaactcattaatgacaatcaagttatcgcagtgcaataaggcctggtcatatcccattgagtccacaagttctaccgccatacaaagagccaaggcttctccaatttcagggccaataacttctacgtattttaatggcacaaacctcacccttatcccttatcgtttcggatcacagccgctaagatggagctatcatgagtgactgctacatccgaattgcagcatacccagccaataagggaaggtttccaaggggtcagctcctttagacaattggtggcaaccatagtatgatccaccactcttctacgggtctgctcaatgagctgctctagtggtgttgtaggagctccatgcacctttttatttctttccctccaaacagtttccactatacatagagttgttgtcatgaattcatcaaaaaggtggtctattcccatccattagaaaccagagtgcccaatcattccaattatccaacgtaacacactcagtccttattcctcatctggtatggaaccagattgctttgtctaagttgcacttccaaaataagtgtaaggtagtctccttttgttgatcacacacagggaaaaagttagagggaagattcataaaggatgacagctcacccctcgttagaaaggagtctcgagcgagttgccaccataggaacttcaaacgttgatgtgagttggagttccaaattgttttctaggttggagtaagcccacttgtctctgtactccttgtgattaatcggcaagccaattttatggaaaagttttcacttgcttcccctatccataaccaattgtcattcatatcatcttcaggaagatcgatgttgagaattgcattagcatcgttcttatcaaaccactcccgcaccatgtgaacattccattgattgtttgcgcctatgaattgtttcacccatgccacacccagagttgcattctttaatggtgtcgggcgtgtgttaccatacggaacccatggatcaaaccatatagatgtcttgtccccattccctattttcttggaaatgctattgttgagtagtgttctgctatttaggattgctttccacatacccgagtcgccaagattctgctcaa

SEQ ID NO: 70366 - DNA, 775 bp, Cannabis sativa
tttttttttttttttcaagttctgaatagtttatcctgctacagatatttccatttacccacgttcaaaaaacttaaattgattttggatgctataaaatatttggaaagatgtcaacttttgttttaaactttcactgtcacgtgtgtatcacgtgggatgcatatgccttaaggtaactctcatttagattttgaagaggacgaatcgatcaagtgcacaaactcttcacgaggaggttgcactatgaagattaataatgttttcatcctcaacacaaataggcttagaatggtaacaagatcaggtattgccattcccccaacctaccaacccttgatatatatatactataaaagttgtatttatattatatatgatgctttgtatactgattttttttagctacatataatcatatttatttaaacattccatcttaattataactattcaaacagttagattcaaaaaatgaattaacatattattctcttatcaaaataaataaataaataacatactaatacattctaaattcctaattattttcaatcttcttcattctttctttctttcttttttctatgtatcaccatctcattttagataaatacaaatataaagaaaaagtatagcttatttatattttttgaactcacaactattatatatctattattattatatttaataaaaaatgtatttttttccatgaaaatattcttagagtccatcaaatagaatccaaaaagatatatatatatatactagg

SEQ ID NO: 70367 - DNA, 1321 bp, Cannabis sativa
tgtaaagggttttatttagggcacaaaacccaacactttgtaggagagggaacatttcaacttaagagaatggatggattagagattcctagggcatggaatgcataccatttatgttgttattgtcaataggttgggggtatctggttttgatgttcctctacagttgtatgtgaaatttttgtaaactttctttttaatgtaaaactatgggtacaataaaatgaaaaagaagaaattcgcacaagaattcacgcatttgtttcccgcacaagctatgttttaaataagtgatcacaaatttggagacgtctaaacttcctagatcacttgggggtgtacttaactatcctcaaaaacgtacgagtgccctcctcattgcttttatattcatgtcttaattgcttttgtaattattcatactttgaattttattttgtaaaaatggccacctgtcggtcaaaaatgttatttgggattctagtacgtcttcaaccctcattcctggaaggaggaacctcttgaagtatattgcatgaccaatttagttttcacctttagtcttgggagagaagccatagtttggattttagcatgtcttcaaccctccttcctggaaggaggaacagcttgaaacctgctgcatgtccaatttggttctcataaaaggcatagccagtgcattttcaaatgtgctccttgagaagggaacactactggaacactgttacagtctccctgggctgttgacaacactgccaatttttctcgctagaagtgggaaaatagaagcattcctgtaaaccctccatggtccagcagctctctcatcacgaactcaggaaaatctatttgaatgatgaatcagccctgtcaccttggatcaaggaaggatggtttgaacatcgacacaaacacaaccatgtctccctaaaaagaacctgactagggctttgtcgcacacttggtcctccttctctcactaatccaaaaaatagaaacttgctgtaatgtcctggctgaggtaattaaccacaagaatcacaaatggggagtaagctccataactcctgtagcgatttgggaatgcagtttgcaatccctctgggaaagaatgcgtagtattgtatgctttaaagggttcaacaaagtagtcactaaagtgttggtcattggaaccaaacacttcaccaaatcctaaaagttaatctatcgagtaagaagcaagaactaaggctggaaataaagtaagcataaaagccaaatgaatatatgtgaggatattataaatgtccccgtagttagtgttggaaattatttt

SEQ ID NO: 70368 - DNA, 1814 bp, Cannabis sativa
cttatgaggtggaattaatgggccggatttgttgtcgtggtgatggaagatatggaaaatgggtgtgctgttttgactaggaacatataataatgttttccctgagcaaagagtcattgaaaaaattgaataaacaataacaattacaacagcaacaacaataataatacaaacttaatcattgtagaatttaataatcaatagggagttcgtgttaaattagtgaggtactctacccaatacccattattagattctgcccaaaaagtcaaagcattgtcgaaaactttagatcactttacaattcaaaattgatacgagtttaaggctcttcttctttttatttctttgcccattttccataatggaaggttgtatccgaacatggtgattgcaggaggtacatgggggaccctctctgacacttctagagaaccaaaaacaacaaacgcttgtttttctctaatctctgtttcgcagaagacaaatatttgattttgtagaaaagagcatcaaacaaaactaatgagggaacgatacattttaaggcaacttcattataatatttctcaccggccgagactattaatacctcacttttcttttctttctttttctgcttcgcatatagacacaaagcaagcaaacaaaacgattgaacagaatcattcatatacataccactttagcctttacaacgcattatttatcatattctcatattaacaaatttttctaggcaaaatttccaactacaattgacatgcataataaggcttgagaggcagtagaaagattctatgtacatttgagttcatagaaaatgaggagaaagatgcattgaatgaaatgatatggacgaaagttccttcttccagcattatgtagttgtacctcagctctggtccactaagacatcataaaagtatggtcatcttcagatggtaggtgagcaattgttatctatatagttctgctataacactgtcaagcaaaatatttgaatgttgtccactagggaaaccgaagggtgaatactaaaattatttaaaattctgagcatgaacactctcaattctaaacaacacaggtccaacacaggttcataaaactaaaactaggtggcgtttggttggaggtaaaaaaaatagaatagaaagaaaactatttttatttcatttctttgtttgattacattttaaagtatcggtggaatgactattccattttgaaatggaaagaatgaccaatccagtgcaacataaaaaaaattaataatttttttcattctattctattcttatttccattctcattcctattcctatattttcattccttccaacctcatggatttagtgttggtagcaatactacttcatgctttatgagtcatgatgatagttccaaacaaccaagtagcaagttcataatccacagaaaaagaatcagcagttagaagataaacataagaagagatgataccgggttcatcataatttaccctctccagtagaaaagatgttgtggaaaatggctgtgggaaaatacaagagtgatgtgagcaacaaaaatccttggaaagaacccactaattctacaaagaaaccagatccaactgcttgcacgattacgaaaaatgttccagcagcatttgacagtcctacggggaaaagaaaaggttgttgcaagttaaaaacttcagttttgtcatcaagtttggtattaaaatcaagaaaaaggtttattgatattatatatacttgcttttattgctatcctacacagtaattgcatagaaacaataatgcaaa

SEQ ID NO: 70369 - DNA, 2078 bp, Cannabis sativa
tataaaagtatgttgaatatagatttgatctatacaaaaacttttcaaagtaacacttacaagaatgagagtcttcaccaagactcctttgagataaaacttttgcccactttccaattttctactggactatcaactgtatagaatacatgagatttttgcatgccttcgaagcaaagaaagccaaatttacatgagacaaatatcatcttgaatgtgttcagtagtagtgtttatatactgataaataggttttacttttaggtttgggtggttgtttacctctagagtaagcaacaatatcaaaactattgttaagactgattttaggaaagcaagtttcagtatcatcttttattcatacacatcacaacacagcactgtattgggtgagctagctatcaatgtgaacttgtacgtaacatagcttgaatgttgcaataataagcaaaatttgttttacctgacacttggaaatgatatgggcaataataggcaaaattctccacctagcaatgataaagaaatattaataattataatgcagaaaaacaatgacagctggaaaaatctctttaactaaatccccaaacaacccgtactcatatctaaacagtgtaataccaaagtgagcttgtcacaaaaggaataatgtaagaagtaaaaataaatgccttagaaataggagagccatagaaacacaatatatagtatcgttaagagttaaccatggaccctgaggctgagcagagaccaaagatagcaccaagctgaggagaagataaagggagagtagaatgtgtgttgtacattgttggataatagatctttcgaaagaagtacttgacctcacttctttgaccctcaacaataggaatttgaatgtgttacatggttgatattgtcatgccacaaacaataggcatgtgtttgattcaaataacaatttatcagtcgccatttggttggttcataataattatgttatttgaaccagtaattatcacaaatgtaaaatgatcaattaaaaaccatataattaggctctattaactcaaatttctaataagcagaggataattaaatttctatcaagcagaggataacattttaagtttgtccccaccccatccaatataattttcttgcaaaaataaagtagatgattcatatgttcaatggaatatcaaatgtcagaacaactaaaaataagcagtagaatcttaaaagctccttgatctaattgatgtaaataagtcctccaagaactcttatgttgcactacatataattagatcatgtggccagtgcataaagtagttatacttattttgttgtactacaattgcaagtgcatttgaagcttctccgtccttttcaactaagacaacatacaatcatttaattatatacttttacatataaatttaaataggtagagtaattataaaaggcaataaagaaaaggaaaacaatatttaccttgtattcttcaagatttccagtaactttttatttatctattttcccttcttttaaatcactgatatataaaagagttattccatgggagataaatattaaacttgtatatgaaatgagaaatggattgaaacaaacctttctttcttatgctttatctcacatctcgccttgcttggatgaactccctgttgaaatcaaaatataaacctcaacatttacagaataaacatccggcgattgaaacttctacactcagcgactgaaatcgcaaatttcaattggaaagtagcgattgaaaacccaaattgttctttatacctttcctccaatcgttttatatctccatccgactattgaaatctagattggaaatcatcgttttttatattctatcgcagatcaatgaaatatattttagggattgctataattgtcatccaaaggtttggctacgggagaagagcaattcatatttttttaagattaaatcattgaagaaaatcgaagcaaaccttcaagtgagcagcagctttgtccttgtcagtggaaactccagttgattcaacaacaaagtcggcaccggtctcgcccca

SEQ ID NO: 70370 - DNA, 4929 bp, Cannabis sativa
aaagtgttttagcaaaaaaaaaagaaaaaaaagaggaaaaaaattgtattgtatgacacgcaccatggtagttgtgttaagtgagcgaaaatctcatactggttgccctcttcagtttcacttggagagataaaaatacaataatacgaacgcgcccataaaaaatcaaaaaacacactacacaccaacggaccctcaaactgaaaaaacacactcgctcgctcttcttccaagtcttttttttttttttcttttttcaaaaaaaaccttggaaactcgactccaagcttttaaaccctactcaccacaatggaagaagaagatcagcagaaggtggcagatctgattaaagagcttgttctccgtttactttcgggaaaccccgcctccggttctcaacaactcacctctacttcaccaactttccagaaatatctccgttacgccgttcgaatactctccgctcgattgaggccctccattgctcccgactcggctgccattgctgagtccatcaagcgccgactcgctaatcaaggtaagtcctctcaggccctcactttttccgagctttacaacaaattcgaatccaaaaccggtcctggaagtgttaataacaagtgggcagttcttcatttgcttaatattatatccgaggataggaagaacactacgacccagttggattcttcgtcggttttactgcccaatctggcgtttaacgatgccgaattgggtaacgatttaagggtttctcgtaaaagaggaagtaaggaaaagggttggaataatggggttttgttggtctcaaaggacccggagaatctaagagagattgcgtttaaggagtttgtgaatttgttgaaagaagagaatgaaatttccgaagaggttttggtgagagatgtgctttatgcttgtcaaggaattgatgggaattatgtcaagtttgataccaattctgatgggtatgttttattggattcgataaaggttcctagagctactcggataatggttcgaaagctttgtgaattaggttggttgtttaaaaaggtaaaagggtatattcaagagagtatggatcggtttccggctgaagatgtgggaacagttgggcaggccttttgtgctgcattgcaagaccagctttcagactactataagttgttggctgtactggagtcacaggcaatgaatccgattccattggtttcggattcggcagcttcagggaattatctttctttaaggagattatcagtttggtttgctgagccaatggtgaaaatgaggttaatggccgttttagtggacaagtgtaaggttttgaaaggtggggcaatggctggggctattcacttgcatgctcagcatggtgatccaatggtgcaggacttcatgaggcgtttactcaggcgggtttgctctccacttttcgaaatggtgaggagctgggttttggaaggagagctggaagatatttttgcagaattctttgttgtaggtcagccagtgaaagctgagtccctttggagggaaggttacatgctccactcaggaatgcttccttctttcattccacaatctcttgcccaacgcattttaaggactggaaagtccattaatttccttcgtgtctgctgtgatgatcgtttctgggccgaagccgcaaccgaagctgcaactgctgctggaacctcaacaaggagagggggtcttggatatggtgaaactgatgctcttgaatccttagttgacgaggcagcaaagagaattgataagcatttgttggatgttatgtacaaccgttacaaattcaaagaacattgccttgctataaagcggtatttacttcttgggcaaggggattttgttcagtacttgatggatatagttggaccagaactttctgaacctgctaacacaattagctcttttcagcttgctggtttgctggaaactgcaatccgggcatctaatgctcagtatgacgatcctgatatattggataggttgagggtaaaaatgatgcctcatggaacgggagatagggggtgggatgtgttttcattagaatatgatgcaagagttcctttagatactatatttactgagtctgtcatggctaagtatttaagaatatttaatttcctatggaaacttcgacgagtagaacatgctcttattggagcttggaagactatgaaaccaaattgtatcacttccaattcatttgataagctgcagcatgcagttaagatgccactgctctcaactttgaggcgatgccaagttctttgggacgagatgaatcattttgtcacaaacttgcagtattacatcatgtttgaagtcttagaggtttcttggtccactttatcaaatgaaatggaggtagctaaggatcttgatgatctgcttgctgcacatgaaaagtatctcaattcaatcgttgagaaatctctccttggtgaacgttcacaaacactgtacaagtctctttttgtcttgtttgatcttatattgcggttccgaagccatgctgataggttatatgaaggaattcatgagttgcaagcaaggtatttgtttttctattcttacattgtatatttctgagcgctgtgatgtgcatttgctttactaacatgtacctcctactacagaacggaatcttctttaccctctcaagacaagagtagatcaagaaagaaaacgagtgataaatctaataataaatcttcagagcctggatcctggattactgatggtaggaaggccctcactcaacgtgccagtgagtttcttcggaacatggggcaagatcttaatgcaatatccaaagaatattcctcgttactcgagaattttatttctcagttgcctgtgcagcaacatgtagatttgaaatttctattgttcaggcttgacttcactgaattttacagtcggatgcatcccagtagctaatgcaagggaaatatatcattagttttgagttgaaacaaatatgttgacaggttgaattaagaacaggcaatccacatttggagttgcccctgcttgtgtggctcaataatcattcattggctggctgacatcatgacccctactatttcaattttttttggctcaactttaggtatattttaaaaatttcttatcccatttaatttttcgctctctttttcaccttgctgtttttaattcttacttttcacaactcttgttggcagtgtttgcttctttctgatgttcaagtgtgagagttcagttgacataaaggtacatttttacctttcagatccgggtttgaagggtcacagtatacacgtatggtatctgatgttctaacggtttgttgttgatttgttgcggctttccaagctgcgcatttagagcttgtatatttgtactatagttctgtgtttggataaatcataaatgatgagcattgtgttggtaatcttattgcattcattctgttgtcttgttttcatccactttgtgctggtattagtagttgattaaagccctcatgtaactttgaatgtagtcctgcagtataggattagatggtcaccattcaagaacctcactgtaattacaactaaattaaattatcatgtggattgtgaaagatattgagtagcttggaggctgattatattgtattccttttgctaatctggagccaaaaggcataggcattactacattttttttacctgttataaatttatttcagtcattgaaaacaatggtttcatttttctgttggtattctaggttagcttttgattacgccaaacttgttttcacaaagtgtgcgattgtgtttattgagagatatattaatcaaaaggtgattagcagaactaaagctcaaaaagtaattaaattattggtgttttttgagaaaatgttagtaataaaattaatgcaaattaaattggtaaaaaaaattcaatgtcaaaagtaataaggtttcaataatcttttagctcatttatttagatgtagattcacacatataacacaatttatttggaagatgagtaataaaagttctatcttaaaaacataaaaaatcatcttatgaaaaatctgagaattacaaaagtaatcataaaattaatatattaatatatttatactaattatattcacataaaaattgtataattatttctatataatattaaatagacaaaaacataaataaatttttcctcacatataagattatctcttactagaacatcagcctagaaaattatctcacaataatctaaaggaaaatataagaagaaatagacaatgtgattaattagggttttacatcccaatatgttggggaggtcccctttaaatagtgtcttgaagccacaattgaaacataaaatcatataaaaaatgtggaaactgatatattgcttgaatagccatgatcatgcacgttattgtgtagtcaacacactgtcatttttcttttatgagagaattaggattgagatacagagaaagaatgagaaaaaaatatttcttattattgagctgatctgaaaaagaagtctttatataggcaaatgtacaatgtgacatgtgctacaattatacaacttggcaagaggataacagaatctaactaactccaagaaacagttggagtgaccaaataacagccataacaacttctaatagcccccctcaaagtggagtgtagatgttaagtacacccattttgaaaacaatgtttgagaaggggttaggaagtaagggcttggtgaagatatcagccaagttttgttgagaagtgacatggagaagctgaagagatccttgctgaattttttctcgaatgaagtggcagtctatttcaacgtgcttggtgcgttcgtgatacacggggttttcgctgatatg

SEQ ID NO: 70371 - DNA, 1599 bp, Cannabis sativa
ctaacctttgggcgaaaccaattatctgttgagaatgcgaaaacagtgagaacctcaatccccaacttgcaacagagatcgaccaaaactctcagcgaacgagcaccagcttcgtacccagaatcaaccggcaagtctctgaggcgggcccatctccggttaccgtccatgatcaccgccacgtgcttcggcaacagatctcgctggattcccaccgtgaaatgggagaaaccgccactgtctacatctgagcgcaaagacctatcgtttccgttctcattccggtgtcggtcctcctcctcgtcttcttcgaccaacatttggtgcacggagacgcgggggagagggagtgttgatctcggcacgtgtgagcttggcttggaatggagagaggggatgtgcgagtttggagggtggaagaggttgaatggagaaggaaccgccgccatgattgagtggagagagaagaactgcatttgtacggactgagtgaggctttgctttggttttaagggtttaagctgaaaatggttttagctgttattcattcataactttataatttggcgccataaacaattttattttagatcacaagctcatttgtttatcaattttagatattaatctaaattagttattataatcttaatcttaatttaatattggtccccttattttattttttaaaaaatatatataaaacttttattaatttgtcaaatcagtcaaaaaaaataaggttgtatctcaacaggaacattccgtattaaactaaacactcgatctaagagaaaacaggatgctctagcaagactatgagcaaccttcttagcaaatagtttaataaaaaataaagaaacattgttaaagatgtaagaagtttatgacaattttctataataactccaaaagaagaaagcataggtaatgagtttcgaatagcttagactgctaccaagtaatctgactctagctccattttctgccatagttgagttttaattcagtttagtacttcctttataccaattacttctacaaaattcagagcgcctataccaacaaaactactcgacttagccatcacaacttccccttgagagatttgagtgactatgccataatcaaacgttgctcgatcacagaaaatggcagcatcaacagttaccttgattgtattctcttgcggcttaaaccaaaatttaacttcatcactagcttcaaacactggaaaagaagcctttgaacctctattttggactaacttatgggtgttcatcaaactgctcaaactaactgcaccacacctgttatgccctaacaattaagcacgctacactaaccgattaagaaagcctaatcccctaaaccggctaaaaagataagcgcggaaaatttaaactttatttgaaacagaatgaaaactaattttgtaacaactttaaactttacaaccaaaagttacatgttttgggatcccataaatatgtttacaaagtattacaagtctttttcacgagccgacttaagcggcaaaatcagagttacaaaatactggtagatcccaacccgcttggtctagtgtgacccgaacat

SEQ ID NO: 70372 - DNA, 1051 bp, Cannabis sativa
aattctgttacctccctcaaggtgaactatatgtatcatatatatagacatcttgacagtatgggatgaaagagtagtggaaggaaaaacttggtgaacgcataaacaagttggagagaactagctactagaatgaggcgtagggtggattgtttaatcttgtctcatatgaagtgaatatagaggtcaatgtgtctggtgcgttcaaagaaggtggggttgttggcaatgtgaatggcagattgattgtcgcagtagatgaaagctggtgtgtcatgtggaatttgaaaatcttttgagtaaaacttggagccatgtgatctcactggtagttgcagccaatgcacggtattctacttcagtggagcttttagagatggtaggttgtttcttcctacgccaggagatgagttagtcgcctaaaaatatgcaaaaggttgtggtcgaacggttagtcacaggacaataggcccaattcgaatctaagaagccacgaagatgcaatgatgattttattgagtagaggagtccctgccatggacttcctttcaaatagcaaagtagctgatgtaagacttggatatgaggggtttgagtatgcaccataaactggctgagaatgttgacaacataggcgatgtttggtctcgatagagtgagatgcagtaatcatcctatgagttgacgatacgaggaaggctatttaaggggtgtgccttgttggtcatctagctagatacaagggtccattggcattttcgttggtttgctacccgcgtagcctgtgtcttctggaagctgagtaatgtattttcattgtaagagacagagaccctctggtgcacgagcaatttcaaaacccaaaaagcacttcagtggctcgagagtcttgagtttgaaatgtttttgtaagaaactttgcaatttttgaagaagaatgaggttagggcctgtgatgatgatgtcatccacatacattaataaagcaaggaatgtgttgttggagcctttgatgaataagttgtgtagtcggcttgagattgtgtgaatc

SEQ ID NO: 70373 - DNA, 833 bp, Cannabis sativa
taattttaaaaacagaaaactgatcaaaagtattaccaaacggcacctttgttatttaaaatatttgctccccaaattatcgtttatgtattattgtgctttcagattttttcaatcagataaaaatatgtagtttctaaactattcaccatgtgttgtaaagtggtaattctttttgtttgtttgttttcttattttatttttcatttaaaaagtactatttctattaaattttgtcaaacgtgacataaaaaatgttgatgtggatgagattatttacacgtcaatgccacatgtgtaatttaaataaatataataaaaaatatttatttaaaaaaatattaaagtaaaaatttggtgtgttcatcctattcaattcgcactattttgctcatagtacatgtattcacttcgcactaagtgcgaatttcatattttggatctagtccaatcactgtaataacttaaatccaatccaagctaatttgtgaaagtgcgaattcgaattggatcgatgattttggaatggttattttttaatatttattaaaaatatttcgtttcttcataactaacaataaaataaaataaaataaattattattcttttatgtcttcaacaacaaagtaaaataaataaaataaaaaataaaaaattcaaagaaagaagaaaaaaaattgcatgtataaagaattgtttaattttgctttatattatatttttcttagaaataagaataaaatataaatttgatctattaaattttgaaatatatttttattatatgtattagattattaaattactatttttttaattaaaatattaattg

SEQ ID NO: 70374 - DNA, 3171 bp, Cannabis sativa
tgacgttgaacaagtagaacattattataactttcccaaaaatttgttaattgtttatccatataaatatacaaaattattcaaccatttcttctaccacatttcaaagaatatatgaatatagttttcgcataatattcaagatgtatgaaaaatctaatttttaatatgtcatttgtaataaattcataatttctaatataaagattgtaagtagtaacaatacatatatataataacatgacttatatatagaagatgaacactcttaaaaattaaataaattcaatttctatcattcactagagggaattatgaacaagaaatacatgtttatatgtttaaataatatcagtcatgttcattgttattcttatactataatgtttcaataaaattttctgaatattctttttgagtattcgaaacccatcgtagaattgcatcaataataatcattttcaatgattctttaattgtattcatataaatacaatatttttgacaaatataaaatatttatattaggaaatatttacctaaatctataatgatattagattgatttttattatcatcaaagaatataagaacatatatatgaatatgtattcatctcttttattatatttaagtcaattatacgatgaatagtatgtttacataatcttcaagatatatgcaagattttatcaatgttacataatttttaggatctatgtataatttacgtatacatatattatttaccaagatttttagaaactaaataatttagaactaaaaaaaaaaaattcaaaaataaatgagatgaagatttttacgtggtttagatattaattaaccttatttcacgagtcagtctattagcctctaaaggcgtgttttgcaggaaatcctaaccctatgttcttagtttttcttgaagaagagaaaagcttagaaattttttagcagagcttcagctatttaggtttttatcctccttcatatggaaatagaaaggtatgtatagactaagggcgggtatggacatgcctatgacccgcttaggatttttgaaaaaaaatcactaatggggtaaaatacacgtaaaaggagagatggctattgggccccttggaagggactgtgctcatgcattgcattagctcgaaaatcagggaccattttatgtagtggacgtgtgtcaccaaaaggttcaacctttaaaagtagaggcctagaaagaaggtgtgcgaggtgcgcgcactaccatgttctagcaaaggggacaaaattttattatgtgtcataaaactataatcgtcgctgggcgatcctgattgcattaaaggtagacatctgcgacattcttgggcgagcatcatccgtggtaggcccttcgagtacccattcgggtatctgttgcgaagactttgagtttggaccacttcgggtcctagagtgataataggtcatcagtgtctatgaacctaagataaggtgatgtagacttcttcttatctcttagtcttgacttgttctcgcttctgtgaagcttctccatgactaggctttaatgggattttaattaacgagattatgagattatctcttttctttcatgacatgtgtcacctatttagaaatgcaaataacttttacccctaagttttttggactcttcaagttacgggagctggcaatcttattctggcttcactactacaaaaataggtttcagtcacacacattgagtgactcttaaacgttttagtgacacttgactgcgcgtcactaatgtgggtgactgaaaaaccaatatttagtgacccttcatagtgggtcactaaacccttctagagtcactcactgagcgtcactataggctttcagagtcacgctttgtcaaattataaaaataaaaccacacactatgcgtgtcactatatccatttatttattttttattaatttttattcgtgacatagtgacactctaaagacgccactttatcattttttttaaatgttaaaagtaaaatagaaaaaagaattgaaaggaaatttctcatcttcatttattcttaattacaacctacgaaacaggaaatacaatctaattttttttatacaagttaatctctcaattaagagatctgtacatgatatgaaatttgataataaactaaaatggtttaaatctagacaaaatttagaatttggaaggcacgatgtcttgcacttggaaacctaatctctggaaagactcttttcttttctagagatctgaaggaaaataataaacagcaaaatatcaccataagaagcaaaataaaaataacaaacaataagaatataacattattaaaatctgaaacctagaaaatcatcaaagaattagaaaagaagaactttgtgtcactcaacccagaaaaaaaaatctttaaaaaaaagagaacatcttgccactgttatattcatatatatatatacatatatatataacacatccatctctatctccattatcatatattatcttcatcttctctatatatttataattatttcacttattctttaatatagcacatatataactatttctctcatacttttcctaatttataatcctcaactaataattcttactaaatatattaaaatcactattattaaatgaaaatgttaaataaattttgaataacaatataatattatatcaatttagttctacaattgcgtacaaaatattcactaccggaaaaaaatcagatctttttgtaaaataaaataaaaaaatgggcatctcgtatagagagatcaaaccctttagggaaaaaaattagatctttttgcaaaataaaataaaaaatgagcatctcatttagacaaaccagaacgtttagcaaagaaaaaaaaatagactagagagagattgtgttgaccttatgattttgatgtcggagaagctcgtcgtggggtttcttagcttatggggtcgtcgtgagtttgcttagcttgtggagcagatggccggtgacaagacagaaagagaaaggttgagtgagtggtggagaagatggccagagaagattaggaggttctgagatcccttgcgaccggtggtagagcccaatcggatgatgtaaagctggatggtcggactgctggtggaggccaagg

SEQ ID NO: 70375 - DNA, 1282 bp, Cannabis sativa
ggcgcacccctgtgtataagatctccaatttcaaaaatcttgtgtgtgcttcctctctgatgttcacttcaacttctgtactcttaatcatatctcttccaggcatatattaattttggtactctataatcttttattttttagttttcttttatttttattatttttccttttccccctttttctttcttcttcttcttctctctctttctttttattttccttccctcacttatgtctccttttttttaaaagaaattttatcttacccctctctatttgcgcacaatgtttgtttctgtgtttcatttccatcatttttagtttctatattttcctaaaataatatttttttagttgcgtcattactgtttttggaaaggggaacagttgaattcttaattaggcttctgaatttttggtttctttgcttagtcccgagttccaagtatatttcccctttattcctccttattagatttataatttcaaatgtggatcgtctaggcgcttcttccccagtttctgattccctctcttcaagtactgctcatgagtttgccaattctttgttagtttcaaattctccttcaatggaggataaggaaggtgttatacctgccgacccagaaattgagtgtttgggtagtgtttcgatcgtcccccattctcgttctggggatggtgcaggtgtgagaaggcaaactgtttcctcaaagggggtaacctttgctacgcctcctcaaaagaaattgaagcgtaagcagcttactttggggcgctctcatttggaccataaattgaatagtttgtcggttttaactcggtcagagcttgattccttggtgtcctctaatggctttttatttgtagtagaatttaggcttcctaaggctcacgagagggctgacacccctcaagttgagtggttgtgcatatattctaactagtttgagtcaaaaattaaattaagatttcccatccttcagttgataaaggaattccttttgcattattcccttgctcttgctcaattacttcctaatgtgtgggctacccttctaggtttaatactttttggagataaggctggaattaaatgggaagtgtcggatgttcttcatttttattccctaatggagagtgagcaaggtcgctatcatctctgacctaggaagaactgtgctattatcactgaccctagagacttctcatagagggtggaagaattagttctttttcatcaaagggcctatcaaatttgtacttggtgatcccactg

SEQ ID NO: 70376 - DNA, 1577 bp, Cannabis sativa
  modified_base (702)..(705): a, c, t, g, unknown or other
cttcttcaaccaccgctatcaaataaaggctagtagcgatctactttggcgtatgcaagtacgtagttgtattttttttagtacgtctataaaatgaaatagtggattttttagaagtatttttgcatgtttaaattttaaatatataattcattagtctttgttatcgttagaacactcacaatgtcttcaaaataatttgcaatgtaaaaaaaacaaacgaatatcaagtaagctaaaatagttcaaaattttacattatattatgaatggtatttctctacatgtagaagcattattcattattcaaacaatatatttttaataatttctctcttcttttttttttttttttttttttcatttgacatatatttttttgtttatataagtaaaatatattataaatataatatttaaataatatatagaaagtgatgtagtactctgagttaatatatagaaaatgttttggtgaggtattgtgaagcatagagtagagaagttgatgagagtgctcttagaacactagaaaaaatcttattttaagtcataacaaaacttgtgactaaaagtgaaaaagttgttactaattataaattatcctcctacgttgtgactaaaaaatccgtggctaaaagtattagttacaaaaatcacaatttattgtgactaaatgtgtttttagtcacaatacttgtnnnnactaaaattaaattagtgataatttgtatctaaataatagttttagtcataagtaacttttttattgtggctaaaagtcacatttagtcacaaaaaaatcttgtacgttgtaactaaaaagttatcactaaaagtgacatttttttttgtagtgaaagctttaaaaaatttaaaaaaccatactaaaaacacgctacagttgataatctaaatcgtttcttcattttaaagtttctttaaaatttattattcttactctacatttatagaatattattcattactataaatatattttattaattattttgaattttaatgattatttttatacgagaatatgtgtacatattaatattatatattcggaatgaatacaattttataaaagttgagttttgggatgtattttaaagaaattgatgtataatgtaatgtaaaagagtatgctgtaaaataaagaaaataaaagtttaataatatattttatataataaagtaagaaaattgttgggagtgctctaaaaaaagggacgtattttcttttttggtaagaaaggggaggagtgctttttttatacattatataattatatgtttaaaaaattattaaaaatggatataaatttatatttttaatagtgttaaatataatttaaataacaataaattgtttggcattattttttttttttgaatggaaaattaagttttattaaccatcaaactccgttaccaaacaaggtaacaactcgattggaacattctccaaatcgaagatacaaccagaatgaaaatgagaagctctagcgaagctatgatgtaaagaccgcctatgaataatactttatattattaattatttaaggttt

SEQ ID NO: 70377 - DNA, 5647 bp, Cannabis sativa
agacaacttcactggaaaatgcaatgatgctgccgagtggcgtgatcatttttggtccatatgaccacaaattcaagttcagtttctttcttctgagggtccagttgacagccatcttttttcgctttgatataatatatatattttcaaagtaaatgaggcaaagaagtgtacagtgaatcatggagatgaattttcattttgatagcaaggtaaatctaaataatagtaaatcataatttgaatgaatgatgtttgtttagcttcttcatgttgttgctaagcaataaggtaatagttggaatattaatagtcaagattgttctccatttcacctttctttgattggcacaaccattgattatgctgaaagatttctccatgacatagatgagtgagtgacttgtcgaaattgctagtttctagaattagaaattgtacaattgttctatttacttttgtggtgtttactagaaacaaatgatttattctttgaagccatgaataaatagaattgcacctgcaccccatagactttagaatagcataaattgcatcacaaaaatgggacgaagtgccgtgtgaccgatttaccctaatagccaactaatttaataaaaatttcagacaaaattaaaaatacaaaataccgtagaaatgcattcaactaaaagcattccaataaaacaacaaaaataatagcaaatttagattcttatatagggtgtgttggttgtattataggattgctttcagttttccagatagaaacattaatacttttggtgggggtaagatgcgctcaggattacattacctctcaaaagggttttcttagatttgttattgggttttttttcttcataaatatggggaaaatgaatgtagtttgcttttatatggcataagtgatgcaaaagatatagaattaaaaaataattagtttaaaatataaaaattaaaaaaaaaactataaataaatttaataaaacttagtcgaaatttttttggagaagacactggtattgaaaaattcgttgaaaaagtcattgaaaaaattattgaaaaagtcaacgaaattgtgtcatcatcataaaagtcactagagttagatgtcttaaatataaatgaaaatagaatcaaaattcaataactcaacaattaaaataagtaacacgcaataactcaagttggttataattaaaatagaaccggttctataatataatgaatgaaaacaaaccgaataactcaaacaagttataattaaaaaacaaagaaaatcagttcctaaaatactaaaatataaattaaaaagaaaactagttacacaacaaattaagtaaaaatgaataacacataatacctcataaatcggttataattaaaaaaatatgtatcaattccaaaaatactgagacataaatataaactgaaccagttccataacaaaataaataaaaataaagaacacacaataactcaaaatataagataaagaatccgattatatttatcaactagttaataatttgagatgaagaaactagttccgtaaagtaacgaagataaaaacttacacacaaaaatcagttaaataaaataaataaataaaaaaaaaggttctttaaattaactaaattaaaaatcatttcctgaaataactaaattaaaaaccaattccttgaatcaattaaatcaaaaaccaatttctgaaatatataattcaagaaccgttttctaaattacttaaacaaaaaatcagttgagacataaattaaatagaactgatttcacaacaaaatgagttaattacacacaaagtttaatcatcaacacatttgattgaattggataccttaggttgaaaaatcttctaagtatgatcccaaaaaatacacatgtcttacccaaatttcggctaataatgagaagctgactgacacatgtaccagggaagaaatacgaatcagccaaagtagtgtattgttaaatacacattaaataactcaccttaagaattacatttgatagaaatatttgaactcacaaccacataggcaaaagcgagataagaataataactattaacgaataagatcggcgagacaacaagtccatctcagaatgaataatatacataatgaaagttgttcaagacgagtaaacaaagagcttgtacccacatactcgtgagtaagagcttgtaatttattgacccacatatatgtaaagcttgcagctaattgacccacatactcgcgagtatattcaaagagtgataataatattcctttatctcgctttttatgcattgaagtaaccgcctcgctaatacctaccaaaatggcaaaagagaatcgcgagaagtattgtatctccgcactctgtatttttttctacaaagatggtaaagaaggataatatatacttgacaagaatcatccaatacagtcagcataactgtctatggatgaagacaaaagagcagttgagcggttatttaatattatcccatacacataataatgaaatgtgggaaatgtctacgtttcatgagcaattatgaatgaataagatcccaagggaataattgtcaccctacacatctataaatagagacagaacctagggtaaaggggacgacaaatctagagagaaaaatcaaggtattattattactgatattattgtatcgtgtattccaaatattatccctaataagatggactcgttgacagtgaagaattaacttcaaaactacgttaaaaacattatgttgttcatttattgctataattaatttagtagttcatttattacaaaaaggctaatatttttggttaacgaaaaattcgtgttaatagtttggtgctttcattgagagcatttgtagtaaaaactcaaaaaataccctcctcacagacaacaactcgaaatctgtacttatggtggacgatactcagcgtaataaagagaatcagccaaaggagacaacctgtcgccctggaaaggaacctcagggttcatagagagccaacacaactgaaactcctagttctagaaggaacgatggagatttcaacccaattggtgaataaattctagaaaggcgaagcgaagacgcctatgatccaagatatttcccattggtggaactagaaaataagaaacttcgataatgcctggctaagttaaatcggaggaatgtcgagttaaaacgataagcagcggcagccaaggctgcatagggagccactctactcaacctgatccatctgtaagacaatcacggggaaggccccaaggttctaggaccagaagacaagaaaacaatcaagggaaccccacaaacactcaggaagaacaacctagaaatgtgaaggatatcccaatggatagaaaaaacccataaaacactagaaatacgagaaatcaagaggctcgacgtgacattcagagaacttcccatggattctcaaaccaaggattagaggattagaggaacactcaggaagaacaacctagaaatgtgagggatattctttataaagaaactttaaataagataggattagaggaaccaccattatccacaactcaaatgcaagaatttctagttgttgatatcccttctgtttgcaatgtgttgataggtcgccataccttaataggaatgagggcaataagctcaattaagtaattgtcactaaaattccccactcactctggagtaggtcctattaaaggcaaccaactattagctcggtagtgctatagcgtggaactggaaaatagaaggaccaatcatcaattgatggtgattttggcagaagaaaatgagaaagagatagaagatttggatcctaggatccatgatgagaacaaccaactcaagccaatcgaagaggttgaggaggtgaatttagatccaaataatcccactaaatgtgttaatatttagaagggtttggaggaagaactaaaaaagcaactaatcgcctttctaaaggcaaactaagatcaaattgcttggagttattcaaacatggtcgggataaacccgaatgtaatataccatcacctcaatattgatccaaatcatccttcaaaacgtcaaaaacgatggcctcttagatccttgagagacaaaatgcactaaaagaagaggttgataaactattaaccaataacttcatatgataagtattttatccttcgtggatatctaatccagttgttgtcccaaaccaaatgggacatggagaacatgcatagatttctccgacttaaataaagcatgcctaaaagattactttccactgccgaggattgaccaatcagtagatgcaacggcatgatatgaattaatgactttcatggactcatattcttgttacaaccagattaaaatgcatgtactagatcaagaacatacaagcttcgtaataaatatgagactatattgttataaagtcgtgcgataagaattgaaaaatactgaagcaacataccaacacctcatgaatggtatgttcgaaaactagatagggcaaaacatggaggtctatgtcaatgatatattggtaaagaatgtcaaaagcgagaaccatacaaaggatctcgcagaatgcttgccatactgaaaacatatgatatgaaattaaatcccaagaagtgctcttttggggtttcctcggggaaattattaggtttcattgtgaatgcaagaggagttgaagctaaccttgataaaataaaagcactactcgagatgccttcaccaactaaaccaaaggaagttcaatctttaactggaagaatggcgacactcaacaaatttatctcaaaattaattgataaatgcctcccaatttttaatatcttgcgaggcaataaaaaattcgagttgaatgaagagtgtgaagaatcattttgagagataaagaaacatctttctacactaccaattttggccaaaccaatcactggagagacattgttcatttatttggctatctcagaaagtgctataaaatcaacaatagttcgagaggaaggtaggaaccagcaacctgtttactatttgagtaaaaggttactggggccagaatcaagatacccaccactcaagaaactcacactttgcttgatacatgcatcccgaaaaattgcacccttattttcaagcacaccctattaaagtccttacagatcaaccattgcgacaagtattgtttaataccctatggtttaataactggattagcaaccctaactatattaattatgtatcaatgaggaattatattattatataatttaatatgtgaaattattatgatttatttcattttaagaccccgttggtgtattaggggcattttcgtaattttgacctgaaggagttatattattctgcttcgatcaatgtaagattttctaaactcttatttgtttattatattattttagagaattcatacttaaggtgttaattaaacatacatgttagtaaatctagatccttgtaaaataaatcccaacaattattttgtatgtgatgcgggaaattgagaatagggttattaccctaaatttagcggttatgaattctaggattttactctagaatttaaataaatat

SEQ ID NO: 70378 - DNA, 969 bp, Cannabis sativa
aaagcatggatgccactggtgtcaatgtcagttacagctgcaatataatattattttgtgacgatgagaaagttaatgaccacaaatatatataactatatatttgagggtagattaattaattaaagtaaaagagataatgatttattaattgcttacgggacatctctacaatcaagtgttgaatttttggtagatgacattcatccactcgctcttcttcctctgttagccatctcaaaattctggataatgaatgatttaattagtcacaattctcagcatcatcttatagtgctaataaagcatctcaagcatactgcaattatgtcaaatttcatttcatcgcttttttaatataaaaatataattttgtaaatctctacagttaaccattaattagcttacttagtaaatcatgttaatcaacttaactcctgtttctgcattcaaagtcttttagttactgtatatgagatagaaggtaactagctaatactaatagtgataagatacctctctttaatatagttagagttggtgaaataaatggcagagtcaactctgataatcaaaactccaggaacctgcctagcctctgggtattgaagggtgtttctgtacacactagtcctcggtagcttaccaagtactgcagttcgtggcctcgtcacttgcaaaagaattttagcaagagataaagaaacctacaatataaatatatacatgagcatgtagataaaaataatcaatatctagatcacagacgtaaatgaggtttaaaaacaacatatgtaaatgtataaaacatgggttaattaccgcaattagtaaaccaatctcaaccgaaatgaaaacaacgccaaagaaggctcccatgcaagcgacaaagtcgaatttgtcgatcttccatatgagaatggcagcctcatagtcgagcaaattgaccacggcggcaataatgatgga

SEQ ID NO: 70379 - DNA, 1493 bp, Cannabis sativa
atttacatattgattggtacttgtacaagaagtcaaaagttaataattttatatttgttatctcatattttctattcattagacataacaatgttctcttgattttatctaataaacttttgaatagtttaaatggaaaagaatatgtaaggaatttagggtacacgtgaatttggaggtaaatagtttattgtttatcttgaaaccgtaaaataattttataaaaaaggacaacaaaaaaatgtgaaatactttattatatggggtaaagaaacgacaatctggtagaaaattataaaaaaacagggaaaaaaaaaattaaaacccatttgtgtgcacttttgttcagctactattaatattatttatggaagggatatataggtctactatagtagtggaccacttgatcatatcatatacgtacatatataactacaactatgtgtacttctcttatggttaaagctttgaaccatgttaagttaggcaaaatttatcttaaatttagggtattagtctagtaatacaacttaataaaaataatgcgtttaacaatgttatagaaatctctagattttattctgcttcctttagggctttgtcctgttttttcctctggcctgttctagatccctctcgcccttaagctaatcatcccaaatctttctctgcacccataattcctgccttaattgcattctgagcttccatttattgttttgattttactgtttccccttacatttattactccacaggcttttcttggtgctcgtctcttgctcaatcttttccatccctctctctgccatcgtttccattcccaaaggtgttttggtgatgatgaggcctaacatgtgaagatattgcctacagaagatcgatagttgaattgacttgacatcttttttctttccaagatggctcttccatttcatgtatcttcacccatggcatttctatttaaggggccttcattttcatagctgctacacaatcttaaattatatccatttttgcactttcttttgtgtatttttctgcttagcgaaaatggatagccttaatcttaatattactcaaaatgtaaccctcatcgatgaagagagtcttattgacgagtttgatcaggtatccctaggttcaggatcttcctctgagtcatatctccttattgtcaaaattcttaccactaagtctcttaagccaatctgggttgaaaaagctacgatggaggcttggactctccgctttcctgttgatttctctaatttccattctgggatgttcttggccaactttggctgtgggggagataggcatcatattcttgaagatcaaccctggcatttcgataagtgccttatgctttttgctaatcttgaaggattggaaacccttagttctgatcagcttagatatatctctttttgggtacaagttcactatatcccatatggaaacaagtcctctcaacttgctcattttgt

SEQ ID NO: 70380 - DNA, 1115 bp, Cannabis sativa
aaaaaaaaaaaaaaaaactataactattttaaaaaataaaaatgaaaaaaccactttttttaatgaaaaagttgtccactttatctattcaatgtgttaatcaacaattcattcattatctcattatcaattatcaaatctttctttttttcttttactcaattcatatattttgaccttttttctttcaataaaattaggtttattttttagagttcttttattaattttatttttttaaaaaataatactttattttgaataactttttttttttcttttgactttgttctttattatctttattcgataactataaaatatttttttttcaaattttatattaatgaatatttacgaagaacttcacttaatatttgcagttgttgcacatatgatcataatagaaaaggtaaataacggcgtcagtacccaaagtttaatatttgtaagtgacataaacccaatatttttagcagcataagtagtagtacccaatatttataaaactgtaattttcttccagtttcgtcagtatagaatccgttttaaatttattaaaagaacttttagaagtaactgatactacatgtttctgtctagaccaaatgatctagaatctgagtcttatatgtgccctatttaagacaagagttgagacgtaaaatgaccttaaatttgaaaactaagttagtaaatatgtcttttttaaaaattaaaaaaaatagcaaaatataataaattagctaatcataattataaaaatacatttactacatattattttttttaaaaaaatatacgataattaaattaagttatttaattttctcaatattgcatattattatattgtaacaaaaataaataaatatattagatcattgaatatatacaacaatatttgatatatcatatcactgataattaatatattgtagtaataaaattatataccacaaaaaaattataataatactaaattaatactttaaaaatatatattatacaaataaaattatgtataccactattaaattatgcatacataccaaaaaaatgatatataataaaacaaaaattgaatatcatcttaaatatatgatatactatag

SEQ ID NO: 70381 - DNA, 1814 bp, Cannabis sativa
  modified_base (46)..(55): a, c, t, g, unknown or other
agaagatcgtcgacaagagacatagatagagagagggagagagagnnnnnnnnnnagagagagagagagagatctgaggttggggtttcagccgctcatggtgggtcaccatggttgccttgtagccgcactaagaaataaaaagagaggggaatgatcgggtacaaagaattagggttatggaatatgagtttccttttaggctatttaggatttacctcccgaactatgacttatgcattgttgtgccccttgatcttttcagtccgttaaaaatagtccctgaactatttaaagtattgtaaattggtccttttgtcaagttttgtcacacgtgacaaacaaaatgatgacatggctgcttagctagttgtcaagtcagtgccatttgatttattcattaatagcttaccatatgatctagcccatacttcttatcaaggacttgatataagcttaaggttacaggagacaacaattatcctacctaagctctctctatatatggtggttgaaactctcttcatctctctctctcgaaattcctttacatgtgttacgaaaaatgatcagaattatcttaggtagttcaaagatcaatgtggaagactatagagaaaagagtggtttgaattccttgtaatacctagtatcagagaaaggacataaagttagggaatccaaagagtggattcaatattataaatcagctgtgtgtttataagtatttttgacataatatatatttatgtttaaataattagaaacatgttctaggtttttttatgtatttggatgatgtaatatataaaataggttacatgttataattcttaacagtattccctttcctcaatatttttttaccatgaaccggaccaggaccccgactatcaacctcggaccccagcccctgggacccgacttggaccccaaccctgacccctggccctcgaacctagctccaggccttaaccccataacacccaatcgaacctagaaaagactccggcctctagctaaacccagaccccacttgaacttgatcattagatcccaatttcaaccctgacctgaacctagctcccaggccctagcccttgtccctcaaccccaacttagacaaaccttgacacccttctctccaacccaaacccgaaccctagcaactggctcttaggtcttggcccttgacccgaatcttgtcccccaacccccgacccactttctctctcctcatttaaataaaaaaagaaaacaaaaacataaataaaaataaaaataaaagctattaaacaaatttttatgctttgttgttaatatcgaaaaacaaaaatagttatcaaacactattttatatttataaaataaataaaaaacaaaaattgtgttcttattttgttgttttaagaaatttaaaaataaaaatttactaaaccaccttagagttttttttttatcacaattgaaagactaagttaattcagacgctaacaataaaatattaaaatgggtgtaaaaaatttaaaaattatactaacaaggctcgtgtaaaacacttctccccgaacataaacatgaatgttttttcatatttttattaatttaaaggaaaaaataattaaaggtatatatatgtaatcaatgttaaaaaaaaaatatgttatgttgtgtagtggtaaggattgtttttattggtatccttcattgtttaggtcaagggtttaaaacccaccacaacctttcttgaaggaatctataccacgtgatttcctttttagttattaaaaagaaataaataaataagaataata

SEQ ID NO: 70382 - DNA, 793 bp, Cannabis sativa
tatatatatatggtgcttaagcatattctctaatggggactatatggccttttgcatttatagaaaatatagatagtgattgaaaataattgaaacaaggtttgatgagatttgacaatttttaccatagtgaaaagaataataacatgatataatgaaatgatggtatgtactgaatgaatcattagtcgtttatattctaaatatatttatcctaataaattaacatattatatatttggatcgaattattctaatatgtttgtcgagtgtgttgcatttcaacccataaataatatacagaagaatattcgtatcgtaattcactctttgttcttttaagttttgctttatttataaatataatttggaaaaagaagaagaaaaaaaattgccctcaatattgtgtgcatgttttgtctttttattaattgattcattattgaatttgaaggagtggaaggatgaaaacacaagacaatttgttcatgaaacaaacagtgacatggatgaagatgatgtcaacaatatataaatatatatggggctgttatagtagggatggggtattttacctatcaatagagatattgatttatagcccttgatttaattcaatagttcaaatcaactcttgaaaattacaccaaaattaatatatattttttttatttataatatatttttaatattattaacggtacattcaactaacaaactctaaacttaatatttttatctttttattttatttctatttaaaatttagttttaattatatattttttttatt

SEQ ID NO: 70383 - DNA, 982 bp, Cannabis sativa
aaaattaagtcatatatatattgtgatgatgatgataattaaaaatatatccgacacagaccaagttgcataatagatagcttgtctttttatatctaaaatttttcatttgattttataattagtattgaataaattaataggaggactagaattctctgagaaagttgatagagcaggataaagatatgtagggcatagggcacactgatcaccatcaaagctagtcactaccaaaaaccttaacatttgtcttttcacattgtcttcatttgatcatacactgatactgttttctcatcatgtagattgatatgatatatcataaaacactataattaattattgaatatttctatacactacaccagaagaattttcgtatcatgtgattatatacatgaataatatagctatatagtcaagtctatatatgcacttgttcacaatctacaaagataatattcaaaacttgaatcaaagaaaggtagaagaaaggaaatagaaagaattctacaattgaatttcatgtattttaagaataatatgatatatagaaaaattgttgaatagtagttttttaaaatcactatccataattattaaaaaatatataaggaatgaattattattttattttttaaaaaattaaaataaccttcattgctgttgttgtttttttaataattaataattatttaaattgcagcaataatcaaagccaagaatcacttggatattagtcaagatgcattgcatggagatccattgaatccggaaatgcagcagcaagaattagaagcaagggaatcttatgctaaagtgcttgaagagtatcattcttttcaccaacaaaaagtcgagttgaattgggtaaaagatggtgatgttaactcaacttttttccatatagtagcattagagctatagaagaacttagaatagagttttaagttttaaccattactaatgctaatggaat

SEQ ID NO: 70384 - DNA, 5137 bp, Cannabis sativa
aaagatcaaaatagccaacaatgtcaccagattcaattagagagaaagaccaaccatgtcaatagacaagacagtgcagagtaaaagcattcttaataataacatgtgattcttgatattggtttagtgtgcgtaatgtaatagtggtattattgaaagttccaaacacatcgattttaggttttgattgttttaaatatatacatcacttataaaaacttttttttttcattttttttttttaaaaaagtaaaattagaaaaataatagttcaactagatgactacaaaatgacccaactccaaagaaattgttattattcacttcttagttacaattattttttgatttgtatgcataatgtttccgtggcataacaatgctagttgtttaaatgttttctctattagaagtttttcatttttaaggtagtaaactatataaagatggtaaaattatatatttatattcaaattattttatttcttcaggtacaagagcaatccaataaatcatctcaacaaaaaccaacaaaaaatgagaggtatattttaaaagcttgaatataaaagcttcaaactttcgattttgcttataccttgtaaatgccatgatggcaggatgtgtgtttgaaaaatctaggataggcaatatattttaaatgtttgtcaaagttgataatgttaagtggtgatgagtgagtggctgagattgtctaaagtaaaattgtcaataagggtattgggaagtttatatcttcacaattaaggaatatttaatttaaccattccctactttttctaaacattttatatcctcttctttattggtaacacttgacataagaaaaaagaaaccaaatgaatgcaaattacatactttttgttgtagaagatgatgtgggtgatagtggcttggatacaagagaaataacaacgagatctttattcctgaaatgacatgggtggcatatagattgaaattgattaactaaataaaagtaaatgtgtaactttacattaacattgatactaaaaatgtttctaaatttattgctaattgtattcatacatttaatgttcttatgcagagagacatgataaatgatgaaggtaatacacccgtggaggataacactcccaatgatgataatcagcctaaactaaagaaattacgaggtctatcagtgtgtaaagaggtacttaagtggcgaagtcaagagtcgaaagtttctttaaaatggaatgaacatggccaatcgattggagataattgtaggatacttcaaacttatcttggccaccatgcatgcacgatgatgcctatagatttcatcgattggccaagtgtttcagatacagtattgagtaatctatgggatgatatcgaggtaaaagtacttccatgtaactatatttttttttaacacgatggattgtttaattttttttcattaagatgcattgtttgtaggagatatttatagttgatgtaaattttgatcaagcttttatttttgaatctgttggccataaatggagggatcacaagttagatttgagttcaaataataaatattcttacttagaaaatccaaagtatgcgaagaaaaatctgactgcattgatagagccacgaaaaaaataagaatatcacaaaggaacaatggaaaaaatttgtagcatcctgaaacaatcctgaattaaagtaagtttcattttaatatttcaatgtatacatcttaagtatgattgcaatgataattatttaggcactgcgaaaggcccaacaagagagacgtgctaagcaagactatgtttatcaatcagttcggacttcaatagcgcaaatagaggacaagatacgaaaagagcattgtacatctgagcctattaatcgagctgaactttggaagcgatcttggacgaattctaaaggagaatttttagatggatcaactaaaagaattggtgaaaagattgaaagtaattatattaactaattaacttaaatatatttggtcttttgataatcatccaaactaaagtaatcatgtttatttgtgtaggatgaacttcttcagaaaaaagcaagtggtgaacttgttgtgattagctcaaatgatgtttttgctgaagcattaggtaaacccaagcaccttggtcgtattcgtggtaaaggaatgtctgtgtgtgaaagagaggtgtttaaaaagcctccaaagagcacttacgcacaactactagaggaacgattacaagataaacaagaaaaacaagaaattaaacatgcattgaagagtatggaggtaaaattcagttctttagaggcccaactaaaaatgataacaagccaattctttcaatctcaaccgtctcaagctcaatcgaagaatgcagttgatcctcaatctaagaatgcagatgacactcaaccgtctcaagctcaatcgaagaatgcagttgatcctcaatctgagtatacagatgacactcagcctcggtatgcagatgacatccaacttgggtatggagataagcatcaacttgatttagttgatgatgctcatattcactccattgacgacattcgtactctagattcacaggttatctattagaccatcaattatcgttgacatatatgtgtttgataatattataaaacaaactaagctaacaaatgataattactttattgaacagggtcaaccttgcagattaactatagaaccatcatacgaagtagttgcaaagggatacattattagtatagattctgtagataaaattcattgtgtaccagttttcaaatctctacgagtttgcatatatgaagttattgatgccgatgcaaacttaccaaatgcaatgtcagatgagattgtcaaagtgggagatgctattgacacttttctctcatggttagaacatttagtcttgaaaggatttgaggtaatttatatcttaattttactacatgttagtcaattctatcactttctaatataattgatcatttgtagaccccatcacaaccaaagattaaaataacaagacgaaagaagagccaaagttcaccaatagcacctataacccaaccgcaaggtaaagagacattaccatcatcatcatctagtgtcaaaacatcaagtctgaggcccaatgacatcaacatttcaagtcactttccaaaaagtttgattgcttgtgcaaaaatatatttgaagcaaaaaggttctttgacgtgcacaattacagcgcttgaggatgtctttggaaaattactgtcacccatttatctttatagggatgatattacacagtttatacatcttcaagaaattagtgcatctatcatctcactatatatgaggtaaatatataggattctaattaatttcttcgttacttaaaataactatagtgattttgaattttttttcctatatatatataactagtttctttttgttatgtaggttcaggagaaaagtgttgattatgatcaactttatttttatcctgatgttatgaaagttgttgataatacaatcaaggatgttttgaattcaaaaggtcagccctcatgtcaaaacaatgataatatggaactgattttgtttgatgaatcttatcaaacaccggaaaagccaaagcgtaattagaaagagtgctattgtgttgtctcattttgtaactgattttggctcttctaattcaggatattttgaagaatatgttggttagagacaaattgattgttgatggtgttaatccatttaaaaatgagattggatgttataacactagagagcagtgtctgaaattcatacaatggttagagcataagatcaatatgaagaggtaattttaatgttttagatttttattatgtgttttgtatatatgtatttttgttagctttttaattattttttttgttttcttttatttagcactaagaagaaatattcagttgtcgataataagattgatccccaatggattttaattttatccagattgatgagaaaatgtggttttacactctccatgcttatgggaagctccttattttgtaagattttttttaattgttgttttatatgtaatatgttttgtttttgttattttaaatctgatataaaaccagttttattctctattttgatattaaataacgagttttagtttatttttttttctatgtagcatttcaatgtcgctttctaatatttgagaaagaaaattaaacaagattgattgttgaaccaaaggataacaacaactaattcgtaagataacaatttatatataaatgttgaaatgatatatttgtaagatatcaatttatatataaatgttgaaatgatatatttgtaagattttttctttttaaaaaaattattttatttctttaggtacaaaaagcaatccaataaatcatctcaaagcactacctatgatatatcagaatatgtcacacacttaaatattcaagcaagtcatgctaggcacgaggtatcattgtcgacaagtggcccactaaaagagtaattgttactctcgaaggaggagtgagggtcgaagcttgatagctggctggaagggggatgaaatggcattttgaaggcggaacaaggatgatgcacctcctgattacagtaagtgttactctagactcctcctacttttaatttctagggttttctgttgctcaatcgctttgcaaggtttatggctgattgagtttcacataataaccccatttatatgatattcttggttggtggtgggttagttgatcaagaataaaagtaggtgtggtctattagtaggtgttatattaaagttaaaaaatttagaaaatcttagcaagttgtcgtgctcgtggggtacacttgcacatgggttctgtaggaaatcttagcaaaattgtctctgttgaaagtggggtaaaatgctaagagggttttgccactttttggaggaaagattgtgaataatctaaatgctcaaatgtatatgaaacattttttttgtgttattgtcctccatggtttcaactggtttgtaattctgctggggctattagtagggggattgaaggtgctgttaaagttagaattttgggt

SEQ ID NO: 70385 - DNA, 642 bp, Cannabis sativa
tgccaataattaagttaaggatctcaagcaccaaattgaagagtgctatctaccgcaaagttggagagggacttagaggagtcagagaagtaggtgagagacttgttggaccagagaaaggccctgagtcggttgctagttgcccagaatggggagaatactgatctcaaggaaaagttggaggagtcaaaatagacccgagctgcagagaaggaaacacattacaacctggccattgagactttctacgagttctggaaacaaaatcccaagggtgactatggatacatggaccctgggttgcttgaatcccttatggctcgaggcaagaaaatagaggcatctaaaccccctgaggagaatacctctattcaggatgctgtctcttctggctagcctgctaatgatgttggtcagactgttgatctagtaaaccctcctgtcgggctagcttccaaacttgctgtttcggaccaggtcggtgaaaacttgaatcgacctactccttttgacattccaaagctttgaagctcttatttggttttcttttattttctacacggccataaaggccattaaatttaagacatatagccatctaggcggcttttaatccttgctttattttttgttaagacatat

SEQ ID NO: 70386 - DNA, 2414 bp, Cannabis sativa
atatatatatatatattaaaatactatatataattaataaataattactattttctagaagggatcgattagcagggtagtatcttattaatgatcttgatgttattttgttctttctcctttttcttttaggggagtcaaaatgttgtagctattttatattagctagctgctatataggtaagtagtgtacttagcttaattacgttaaggtagaatattttgttcactttttgtacatatgggaatttggttaatattggaaaattatgtgtttattgttgtttattattacttatttgtgcttttttatttttctattttgttgcgtcaagcaagcatatataattactttatatactttagtaggtggtcctaaaatatacaagtgatacttttaaatataaattccaatttaattaaaagttgatctcctcttgagacgtgaaataaatatattggttactgatgttgtctttatttgacacattatatatatatatatatattatagcttattattatttgcattgcttaattaaatatgtttatttttatttttgttatatatatttataaaattttataaattaaaagaaattacttattaatttattaaaataaatgtattaatattatacattaaacaatatttattaatattgtatgttgaatataatttcaatattaaaataccaataaaaaataataatattataaatatatattaatatttatatgtatttaagttaatataagttcaattaatttaaaataaataatattaatatttttatatatttaaattaatttaaaataaataataatatttataaaattaactttactaacaccgttaaatttaacgaatatttttatatttttaaaatattttattaaactaacaaaaattaactacattttatatgtaaagatatatattatttatataccaatttgacacatatttaacattaaaaaataatcaaccaaacatttctatttaaaatgtcattgcattgactagaattattatggccttaccaattttgaatcaccttagtgatttcatgcggcccactaaagatatgattttgataaatgacaagaattatggaattctatcctaaaactaattagtgacaggtagagagaataattcatatttttataactgtctccttacttttacatttaatttacgtgagataacgttgttcaatacacattgtattttaaattaaaaacaaatgttaaagggcatcagtggtgcgtagcagcctcctacatgtcagtatcgttattggttcaactaagtatcgggtctatatagcttaatgtaataactttgagagagtatcactaatcaatcgtaagacaacacgtctagaaaatgctaagtaccattgatgcctaatagcactattctaagttaaataatgttagattagatactaaattagtattgtacatacatgtaactggtgcatgtacttttaaaaaaaatgtaaaaaagttagaaaatgaagaggagaaagttccttttttatttttttatttgtaaatatccaaagttcgattcttcttaattaattaattagtctaataacttatagctagctactgttaatttgtcgtatatcattacaattttatctaaacaactttaactagtttaatatatattgggtatagaaaaaatatcatatggacgataatagaaataaaaattaaagattaagcatattaataaaacaagagtactactgttctttccacaatgggtaaattttgtgttcagtgcatgtgtgtgtagattcttacaaacaattttattacagcccactggtttttactttgcttgattttaccacacatgagaacatcatatattaattaatcatgagatggtctcatttgggtacccaatttgtcaaaatttgttggtggggggtatgtgtttagacttaacaaaatctaagctttgattatttaatataattaagtacttgttaaattaatgttaataccagttaggtgagatcaaaagtcattatatatgaataagattgagccaattatttatacagtaagaaagtactatatcacatatattaattcaaaggtgcaatcaattaattatatagctataatccaaagccaaacttttgtagattcatcaaagattggccaaaaaagacagcttaatttagaaattgatcttagctatggcaaacagaatgtcttgaatttttattgcagcctccaggcaacaaggagacacaaaagtagcagccactatcatttttttttgactttgcatcttcgctcattgtttatttaacccacttatttattttttttttcttatttctttattggtctagaaaataaataaaaaccgcttatttata

SEQ ID NO: 70387 - DNA, 1290 bp, Cannabis sativa
agagagagagagagagagataattgcttacacaaagccgacatatgtgctatgtgctattacatacgtacgaacaaacaacgcaaagattttagctgccgtactgtgtgcttctcaagattatgcatatacacagtggccaaaccagaggggccattatgaacaaatctaaaaaagagggaccaaataataaatttacagtgatagataatttttttttttatttatgtacacattttataaattaaaaaaaaaaaaaaaaatagtggggcatgaccccttgggtgcacatggttatcggcccctgaatatacaagcatatacgtaaatatatgtgtgagggagggtgaccgtgacctgaacagttgtactaccggtcatatataaattataataattaaccattcatatatagtgcatatatgttatgttatggtgttatggagatagattatatgtcaatttaacgaattttaatttgttaagagagactgatcatatatacaaggtcttatatattatcgtcgatttaatgttgctttttccatgggccatggttaattatacaaatagctaactacatatagataataataatattatatattttttcatatataattatttttttggttgtgcagggtccctatcaattaataggcgacattaaatggtggtggatcataaacaatgacaagcagagactagacagcaataatgaagttttatgcaagacttatattacaatataggtctcttgatcatgctagctagctaggatttacgctaagttttcaactatggcaattatacatttatatttgtaagtgtctatatagttagaattgagatatgatcatattaatattttatatattgtcacttttatttaagtactatatatagcaaattaaaaaccatattgttcgtaatgattttagcccaatttaatcatgattttagctcaccacatatcatatggtttgttataataacgtttacaattaataaattatgtgaattttctctctttatttattactttaattttcgagacttacatatactaccgcactgatgattggatctaactacaacattcttaattatttgctcatttgaatgaatcgtcaacgaatcataaaagtgcgattaatagaatgttaaatcttttaacaatccaaattacaataagtacgctattaatacaatctcatacttatttctcacaaatagttttttgaaatttttacatgaaaaatcctttttacacactttattacataattac

SEQ ID NO: 70388 - DNA, 2046 bp, Cannabis sativa
  modified_base (1753)..(1753): a, c, t, g, unknown or other
atgtaaatttccctaaaatttttaaatttaaaataaccgaataaaattagggtaaatactaggaatgtacatgattcaaactaatccaatttttttttttttttttgctaattcaatttagagtcgatcttttggctaagacagatttggcttgggcttacagcttacccaacccaaggcctcaaaagaaaaaaattattttaaaaatacacattttttaataattaataaaaaattccacgtaatttggataaatgttatgagtataattgaaatttattaaacaaaaaaatatcacttattcatttaataaaaaggtccaaaaaaattattcaaaattttacactaaatactaaaattatgaggtttttttttcttttgtattggtatactgtataatttacttttatattgtatatcatttttaaaattactgtattttttttttttaaaaaaaataacttacttttattttgttaatttgacctttgttatgtcagttaatttttcttagtttatttttttttcttccatttttctttatttcaccctatacacattacctcctatactacgatccatccttaccctcactctcaccctcctcaactctttccaactcatatacctaggacactcatccccttcccctctcatttctttttcttcttattttcttcaatcttgtaagcttttttttttttttttaaaaaaaaaatttgatccatgatctcctcgcaaagggaaaacatgaagagagtcttcttgacaaacatcaagtatgtcaaggcgatcaacgaggcgaatgtaccatcaaaaaggctcatcttacacatcacgagaaataagacatcatttacaactgagctctcataaggtttacaaattgaaaaggcttgcttatgaggagaggaatcctttagccaaaccttattcttttaatcgacaaacaagaagggctaatccatccctgttatttgcgaggaggatcacgattcaacatatggtaatcactcagcgtattttctgagaagtaatgaagttactcgatgaaaacatgatgaatatttagataacaaaataacggttattcattttaaataccaattgaaaacggttccctcaaattgataaatatatgaaatgtggagaatgttcatatttgataactatattttagatcaaaattagataactgctattctaatcctataaatagcatgactcatgttgtagaggggacgaccgattccctaacataatgaaatttcgccaaaatatattttgtacacaaaagatccaaaaataagaatgactcgtggagtatgtagattttaactacaaaactacgtaaaaaatcctttatcttcattttatgattaatatttttagagtatttattacaaattcattaaatgtcaaaagtctcgtttatgttaacgagattctgagttaatagttttgtgcttttattgatagcctttgataagtaaactcttaaacatctccctacccaaaaaagaaaaggttttttttatcatggaaaatacttatcaagatattcttgttgaatagaaagaaacaattcatcaacttagaaaggatcccaaatggactccatttgttgatccaaacattggaagacgtcctcctgaatgagactttgaaagaactaactgttaactcaaacttttaagtctccttgttttgatgattaacaaatatttgattattatttgttaataataatttnttgattttgtaacaaatttaaaagaaaaaatgaatttgcaagacaaattggtatttttaccaaatttcataaagtgacccaaaatggggattaacaagtcaagagcaaaagattcatcaagggattaacaagtcaagagcctattcaaaagaggtctggtcttcaaaagcccaaagttcttcaaaagcccaaagtcaacccgaaagtcaaagtcaaagtcaactcttgggaaaaattaatgtgggattgaaaacatgcaaatcaagctaggaggtgttgggattttatgccct

SEQ ID NO: 70389 - DNA, 1281 bp, Cannabis sativa
tcataaagttatcaaaagatctgagatgacaatacttttaacctattttagctagtgatcaccataaattactgggttgacaaaacttcagaattaaatataatctgagagctcaatctatgcaagggagaaaaaataaaagcacaacttctatggtctatgctctatagcatatcttttctttagagtttatcaaacaaacatgtgccacctaaacaccactttcctttctttaaaaaagttttttgagaacaaaaaaatggacaatggaaagagttagatcaaaagactaaatttatagtgcgctacctttaatgtgtcttaccaccaagaaccaatgtctacattaaattgctgtacaatgcaagatgaaaaaatgaagttcaataaacaccagcttaatgtcagccattaactctaccagtatcaagtattctgcaacctataaagatattctcccattgtaattctagccgagaagtacagagcattgaagctatattttgggcggttgatgttttgggatagggcaattttacaaatttaaactaaagcaaactcactagttacctcacaaacacactaaaccaaaccgaagtgagtgagtagaatttctgggatataagaaaaccaaagggcattaatttcatctcctagtcacctcacaaacacacttaagggattacttctaaaggaaactagcctctataaaggacattcctttcatctcgtagtattatacaaacatcaagcaaactaagcaaataattctataatcaaaacccagcctttaaccttttacaacaagaacttcttccacatacaatcatactattctacacccatcaagaaacttagcaaagattccataaaagtgccagcttcagactggaaactgttaacacaaccaacatagggcaatagaaatagccagaaaatgaattccataattactatcacacaaatcaatggtaaatgtgaaactgtatagaatgttcaaattcccacgacatctcttgggacaattatcaaaccaatcaaaatgtcaaaactgttaaaataacaaaccgaaactcatccacagatatgtagcgtaattattaattctatgctatcctatcatagagaacacacttgttaaaagctcttgataaaatcttcaaatacccctaaactaatatagaaaaatttatagaaatgaagttatgttttagagtactaccgaattgaacaataagaagtacggaataaatgatcttgaaggctctagcttgaaaaaga

SEQ ID NO: 70390 - DNA, 1045 bp, Cannabis sativa
ttattattattattattatacacattattagttggtttttaattagaatactgctaatttatggattgcacgttttatgacgataatttaggaaacatatatagactatagtagtggcagtggggtgccagagggacaacaaatctcatcgtttattggctggtcacacaccacaattatcaacactatctattttttttttttaatattttccagtgaaatctctcaaatatttataattattacatatacgatcttaaccaaaaaaaataacaataaaagtattttttttcttatgatttattaccgtcatattttttttatcattaaatataaacttagaaacatgtgacgatatattattaaattacgtattaaataagcttaaaaactattttgatatatgtttttgagctgtcacttaaccgacttgttatctcaaaatgtatctacctaacgtgatatgtccatgtaagtcaaaactgaggacacgtagaatacagccttgtcaacaacaagaaaaagtctctttacaaggcatgacaaaaccgtcaaacaacaagcaagtcgtcaagaagctgtagaaccatgtctggccggccaaaagggagtacataggccggccagggtttgagcacaagctggctgaccaaaatgtgattattagaccaagaaagggatcgttcgaccaaggaagactgacatctgcaaggaaaaatagtacaaaggttggccatcacttacaaaggctggccaactcttgccaaggctagcaggcacttgatgtgcagcctgcaggctggcaggcacttgatgtgcaacctgcagaacctactaggcacatggccagccaaaccctagcaggaacatggccaaccagctttttcctggcaggcctttagtgtagtggcggtttggaccttgacaacctacaaaaatagagagaaaatattagcaacttttctattttcaagggataattatcatttttattatttattatttaactatgtaaatataactttatttaattattttaaaagga

SEQ ID NO: 70391 - DNA, 2401 bp, Cannabis sativa
tttcaaacccttataagtagtagatatacccaaatggcttatatttgtaacattttcttttcatctacatataaaactataaagattaatttaacctcaaggccgctgagattggacaagcttgtttatgttatgtgcttactaatgattacttgaagatctcatcattttttttaaaaaaaaaactttacaaaataaataagaaaaagaaaaaggaaataaatgtgtgtgtgcaagtgcgactataaaatagcaacttggttgaaaataggcaacagagttaagagagagtatcaaatctcaataactgaatatcaattaaggcttaaaaaaagagtgacaattatggggaatttgagtcgcaatctgaagaacgcagccattgcgtttctcgttccacttccctccattctcttctacatctcctttctcaaccactgtcaacatcttcatgatgatcccaaatcaaacgacgacgtttccctctctccactctggaaatggtgctatgatcaccctcttctactagctaacttcctcttcttcttcaatgtcaatgttctcttctgggtcatcagtcatattctctccagcaattgggttagtcttattttccttcttcaagtgtttaaattcatttcttttactgctgtatatcgttagctccgttgacttatatatattgggaattttcagatgattgacttgtactggacagtgataccggtgatgctggctcattactattctactcaccctttggctcagtttaacttgtggagatcgaggattgcgattttgctgacttgggtatggagtttgagactgacccataattattttaggcgagaaaaatggcaatggggtgccaaggaggactggagattcactgatatgcgtgttcagtatggaaaacactggtggtggatctcctttttcgccgtctacgtttcccaacaggtatacttgttgtacttgatcataattaaaatctaaatactcatcccagtgtttgataaaagtccccaacgggattctaattgtgtttctctatctaattgtttgtaggtgtttctcattggtatatgtcttccgttgtatgcaatccactcactggatgcaccattgaacatttgggattttgttgccattgttgtttgcctaactggcatagtcattgccttctttgctgatacacaactccatgagtttgtgactcgaaatgagaagcttaagaagcttgggaagccagtggtggccaatcttgacaggggtttgtggcaattttctcggcatccaaactacattggagagcaattgtggtggtggggtctagttatctttgcttggggacttggacaaggatggacctttgttggttctctcattaatactatgtgtttagcttatgtgactaagcttgtggaagatcggatgctgaaacaagcttacagagcagaagcttacaggttgtatcagaagacaacatcagtttggataccttggttcaagtcatctgcaatagcagaaaaagataagaacaattagttcaagtctttttgtagatttttttttatctaaatatatcgtgtgtttctttacatgttgttcatgaatcatgaacctgttcttatttatctgaaagaaggttgacttgttttttcctctttacatgcatagcaatgagattcttctatgaaaatgtataaatttgatatgaacttgttgaagatttctatatattgttgtgtttgcttataagaataaaatttcatcgattttgtgtagctttgaacaacgtattcttttgatggaaaataccacaaaattggacataattagtaattggaaaaatatcacaaaatataaatgtacagtccatgcagctcgttataaaaaataccacaaaataaaatgcactaataatgagatgcatagaactgctataaatgatttgttctactggttatttgttacgggctttgagttgaaaattgtaaaactaagcttatggtatgtatgcttttagtggagggtttatattttagatcccatctttaagtttacttttaagtaatctcaaacttttaaagttcgaaattctcttaatctcaatctttctcaactaaattaaactaatagtaaaacttgtacaccaaacatctcatttgtgtataatcaatactgattcagctatgttatttttcacatcataaaatggtggaaagaaacaacaatttaatgaaaaaagaaaaaagagcatgaggaatatctagctattagtggcactacttaaggtgaagaaaatgaattaaaatctcaattagactcttagtaaggggggtgatttcttaacattttttttttttctatctagccagctaaagattatacaaaatta

SEQ ID NO: 70392 - DNA, 929 bp, Cannabis sativa
aaactaatatatgtacataccaatcgtgcagtttctgtacataattttctaagcacatactaaagacaatattatatatgatttaagctcaattaaactaattaacaagttaacctatatttagctatatattgtacatttttctctttaatttttatgtttaatttggcagaaaatattaattcttagttttgggttttgtaggtatactacagaagactaatgaggctcacggcacgcatggaggtattgataagcttttggatttccttcggaagaaataaccatcaacttaattaaaatatatataatataataattgataagaaaaaaattctaataaagttttttcatttctatatagttattcatgcatagtactaattatatattgtactcacactacattgatattttgtattcttttgttatatttgctacatattacatattgtctgtttaaattaattcggttttcgagcaagcaaataaaaattaaatgtcaaaataaagaatgaagttagaattttagttgttaggtattaatgtaaaatttatatgttcaaaactgatttttaaatttagtatcttttgtaaaagtttagttattaggcattgtgtatttttcattatgttattgatgaaaatatttttttttttgtcttttttaatgaaataattattttcttttaatattgatgaaattgatttttaaagtaagtatcatttttagattgttatttttttattatcttgttgatgaaactattttttttattcttttaatgaaattaatagtttgtttcaatgttgatgaaactataaagtttgtattctttttagagtatgattttttatattgttttttttttctggatgatgttgatgaaactggtttttttttcctgttgtttttaatgaaataatta

SEQ ID NO: 70393 - DNA, 1600 bp, Cannabis sativa
  modified_base (29)..(30): a, c, t, g, unknown or other
  modified_base (58)..(75): a, c, t, g, unknown or other
tgtttatttttattgttttagaattcatnntaggatgttaatcaaacatacttgttannnnnnnnnnnnnnnnnnaaaataatttccaacagttaccgtgtctaatttaactacaaggcttcaatggagacacacagattccaatgagaaaaataaaacttctaatgacgataaatggtggaagcaatgtagtatcctctttcaagtagagcacctttgtggttgttgattgcccaatagtataatgaccggttagctttattttgagaattagcaaataattagggcttattatcaaaagtaggtttttaattattatttttacaattatggagatatatttgaattctagttgtattaattatgatatatatgaaatttcatgcctggtaactatagtcacttagatatagttttgtatattagaattagcgaggcaatatagttagaaatttagagagtcatgattatttgtgataatagttttggaccactttacccttagttggtgaggttacttcctaatgaagtaaaggatatttatgtcattttggttttatttattaaatgaaaattaagatgaatttctagtgaaatccatgttttgtcttttatgtcttggttataggctgaatattagttggaatatccattttacaaagttacaaaaataaaacccttgccctttctctctctttggttcgaccacaaggaacaccaagagaaccaggctatttttccaccattttcggatcaaaagtaaaggatttcagcagaatttctagtagctaagggttagaatcagctcaaggtaggttcttatgcttttgtttttttatttttcaagaaaagttaaggtttcaatatgtaatttagaattctagcttctgttgatttttgatttagttagaactgagttgtttgagttcaattagggttgtttgaaccaagtttgagcttttaaagctcaaacttaacactttaatggtgaattgtgttttaggtggtcttcttgctttaattggttgggttttgttctttatgaccttagaaggtgttctggaagtttttgtgcaatttggggtgaatttaacctatttttcaaaatctagtcttttcggttaactagattttttagattttagaccctagtttttcacgttttatcaatatatttagggtatttctatgctatccatcgataggaaaacttttagttttgagtttaagtccccaaaaagtgatttagtgtatcacttatcaattttatgtatgttgtgacttaggggcctgtaaatcgtcgatcagtagtttctactcaggttgaactgtacatgtgaattcggaatcaaggtaagactagtataataattgcatatgtgcttacatgtttggcgcgcatgtctatgaatgcctaatagataacatatcagtaagggtggtattagtgcacatagagttgcactgaataccgacgaatatatgtttgatagagtacgaattgatgttatcacatcagtatgattagagtactgagtataggctgatatgattagtaatggagtgcacagtaaattaaaatcacgataacgtgcctaat

SEQ ID NO: 70394 - DNA, 1082 bp, Cannabis sativa
atatatatatatatggtcttactcaaattcccaaaacctatagacatgattggtaacactatacatgcatgctttcataatttcattagaagtctttttggagttttgtttgtcaacatcatcatctacatatataaatatttaaatatatatatttataaggtacgagtattactcaatttaaatatatatatatataagatcacatataatttaatttaattacatttgaatggtgttttttgataccactaatatttaataataatattttattttaattaatgtatatatattttaaaaggagagaagactaattagattgtgaatgaagatcaccatatataattgtgccaaccttaacaatgatttaatgaattaaatattgaagtggataatatatatcatgtaattttatcatatgttaagagaatattataaaaataatatatatatactaattatattattggtaagggaagatatttttatatcttatctaattacaataacaaataatattataattttttgtaattatcaacttatttttttatataattatttttcataattttcattaaggatattatactcaaaacttcaattttattttggtattcactattactttgctataccatagtgtacacaggtatacacatattagaattttagtggtctctacataattttaaaataattaatttctttccttcttcttcactttttcttttttcatagaattaatttcttcttcttcttctctcaacataataatcaccattaattgccaccaactacaatcaacaaaagacaaatccatcttcctacatgcctcccatcgtctcctccctttttcctaaaatttttggtgtcgttacaaaatggattttcttttccttcttattctgaactctctcttctaagaaacagggctgagtttcatctcagcgacacgatttcaatagtgacactgcaaaaaatagtttcttttagtgataattttttaatcacaatataatttttttgtgactaaatgtaacttttagtcatataacaaaaaattacttttgactaaa

SEQ ID NO: 70395 - DNA, 978 bp, Cannabis sativa
ttcatatttaggatgttaagaacatacttgttagtaaatctaggtcctggtaaaatatattccaacaatcgaatggtgagggttcacaacggttcaaatcccttgatccaaaggatgggataaaaaagcacgatgaagagaaagggcggttgaaacgtgtgagtacctttctgacaccggcattgatggaagggtatgtcaataggcgggaaacaaatcattgtttgctaaaaagataaaggcaaatgatgatgatcattaatactgcccacgcgcttgaggcacgtgtctttgcatttattgagatcgaagacggtgtacaagtctcttttacctacgactaaataagatttggatggtgtgtgttgacccaaatttctcctaatatatgtggtagctgcaatgcgggacccgtggcaggtagaggcctatcacccggagatgaacaaaagacttaattaaatctcctcagaactaataattacgatttaagggcaagctcccagacatgagcaaatagctccatttcttcttcaggaggtgaatatgaataaactctcccgggccagtaaagctggaggtgaacagtcacttcgcatttaatgcggcatgggaaaaacgtctggaaatacccataagaggacgtgtaagacgtcataaacctagctttgggcgattacacgataatcaagggagctagtgacgactctattatgaaaaatcacatcaatcaaggagggatgaaggctaatctcacctaaaacctaagcagtctactacgtagatagtgcatgccttattttgtactttttgggaacttgtgcatgcccatagttggcacttgaagacaagttaccccttttctccttcccacaaatcgctatatatacccctcactaaaattggtagggggatcgaaagaaagacacaaaaacattctctgtaagaatcacccactcactaataacagagactcgt

SEQ ID NO: 70396 - DNA, 1489 bp, Cannabis sativa
  modified_base (1158)..(1162): a, c, t, g, unknown or other
aataatttcctcatgttgtaagagtggagataaaccaacaaagcatatccgaaatagatatagcaatagtgccaagctgtagacattaaattcttcactgtgacattttgtagagcatctggcatacaaaacacaacaagttgattttgaaagtgctaagtttccttgtttaataccttgaatttttctcctggataaccaaaagaaaccttaaacatatcatccctatattcagagataacagcagagaatcgacccttccaatgaccagatttttgatccaagaaggttggcttatggacatagttattagtgaggacacgagcaagtaaaacatggatggacagtggaaccgaggacaagacaacatcatcactgaaaataaacataaagctctcttcttcagtaaggctagagtagtttcaagggaacgcaggaggggatccatgacaacaaaagatgcagcaaaaaaggggcgcaaaggcaaaatgagtggcagttatggaggggttaaacctagatgataaagtaaattgtaaaagaaagaaaaggtaaaatataaaagtttgaaaggggtagttaaaaacccaagttagttaagaaatatgcataactacaataaacccaaaacagggcacaaaacgtatcatatactttttttgcaggagattttgttagtctatgcaatagctttcttcaaattctaaataatttattttccttctaattttttaaaatttaatttattttgttaatgttttcaattttttaaataatataattattaaattcttttctttcaagatctatttatatggatatggaggaggagattttaatggttaaattatatatgtaaccatgatggttacatttatttttagtcatttgattattattgaatggttgtgattaatttagaaattaaataaaaataacttgtaacatattaacccaaaaacttttcctggggacgtggacatgaacatttaacacgtggcatgaaggatgacgtcatagagttagtagacccgagtcatagaagttaacctgggatggacactagccttgtgcccaagttgactttgggatctttgggatggaagttcggacttcaataacttgaatacccactatctttcagtattttgtaccatnnnnncatggagcaacctaatccaagcccgaagattgaaattacacgaacttgtaacttggaagccaacttgggcacctagggtttcactcgacgcccaggttgacatcctcaattagggtttcaatttttaggaccgtcttggtgcacaatggtcaaaaattgtattgggacatcaactaaacataccacatatatatttgaggcatctgagtaagttgattttgagcactcgtggccctatggccctgagcacccagcgcccaagttgataatctatcaatctaggtgccttctaagtatctgaacagagatctaaattttgcatcttct

SEQ ID NO: 70397 - DNA, 1211 bp, Cannabis sativa
gcaaaatttcttagtagccaataccaaacaaataagaccaaatatttctactgccaaattatttagtaggcaattgtgatttttagctaccaataaattttttgatgtatacaacttttcctcattcatatgcacacaccacgagtaccactgtcggcggtagccccagagactaaatcttttttttctttttttttttcctatttctttctcgatctctctacccctttatcttgagatctgagtcttcaccctacgtttgttcgtagatctcaattctttactctatcttttggcaggttgacattggtggctcggcatgagtttagaaattttgaatgggcagtggtggtaggtcttagattgggtgacactgattttttagatagaaagagagaactaagatgatggacccatctagtactcgtgacccttaaacccggtcaaaccttgctatcacacgggcaagtacgagaacataatttttgcataatacctgtgaacccattcacaataggttaattcagccctagtagatacctataaaaatatcatcagatgtaatctattataggatcacccaagttattttattatatcatattttatataagaaaatgtaaagtaactagcgactgattgagtgttgggaaacacacaagtatgtgtctcatttttcaagtaatacccacgtgtgtgagatcgttcccataagaattatagctaattattaattaattgaatctttagttttatttggcaaataagaatttattttgagactaatttaaataaaaaggaaaataaaagtagacaaataacgatattaaaacaagagatgaaaacctaagaaaataacttcaattgctttaattataattttcgttttatagatgaaaatgatctttttattgtgtatttcactactacaaaacaagtaattagaggcgcttttttttagtttagtaaaaaacaaccgccgctatagactgtggctaaataaaattttattaaaaacaccttatagcatcgattattatgaaataactgatgccatagggtattaaatttttaatcacaccacatatgacgtcagttattttgtaataatcgacgctataggggcacgcattggctgacacgtgtcccctatggcgtcagttattacaaaataaacgacaccatagggtttatataaccctatttagccc

SEQ ID NO: 70398 - DNA, 2206 bp, Cannabis sativa
aatgagggaacttatgatcataccacaggtattctgtctttatttcccaaatggaagtgtgggaaaaaacccttcaaatattttaggatgtggacaacacaccctgaatatgacagtaaggttgctgatgtatggaaacaaagaattagtggcactagtatgtatcaggtggtgcacaaattgaaggccttaaagcctgtccttagagagatcaaccagaaaggcttcttggacttgcaagctacatggattcaagaaaagcaactacttgatgaaactcagagtaagctgcatactgatccattaactgaagctctataggttcgagaaattaatgccaaaaatgcttttatcttagctcaacagcactaccactcaattttacagcagaaagctaagattagctggatgcgtgatggagatagaaactcagcactcttccatgcgagcattaagcaagggcacaggcagaaccaagtattttcaattgagaatgaagcaggggtgagggtttttgagccagaacaggttactgaggctttcatgcttattacaagtcattgttgggatcaaaaatggcaaataggaagaaagtatcaaacaaaatcttgagtagaggcccaaaagttactgttgagcaggctgagatgcttagtagaccattttatatggaggatgtcaagaaggtagtgtttgagatagcaggtaacaaagcgccagggccagatggtttctccagttttttctttcaggataattgggagctggtaggagaggatgtgtacagggcagttacatctttcctggattctggtaaaatactcaaagagatcaacacaacaacactcacaatggtgcctaagctgaagtgtccaaacactgttagagattttagaccaataacttgttgcaatgttatctataaaattgcaattaagcttttgtgctctagaatcaagtggattctccctgaattgatctcaaactctcaaggagggtttattcagggcaggttcatagggcataacatcatgatctgccaggacttagtgaggcattatggaaggaagacaaacaaggctaactgcatgatcaaacttgatcttcaaaaagcctatgatacaattgattgggagttcttagaggagatgcttataggacttcaatttccttatcattttgttcagactgtgatgaatggtgtgaggacacccagattctccattatgtttaatggctctatacatcggttctttgaggcaaaaaggggtttgagacagggtgatcccatgtcccctctgctgtttgtgcttggaatggagtacttatcgcgaatactaaaggaggttggaaacaaaagtgattttcactatcatgagagatgctcgacattgaagattaatcatctcgcgtttgcagatgatgtaatgctattctgcaatggggatttcaaaagcataatgtatatgcttcggggattgaaattgttctctctctcgtctggtttgcaacctaacccccaaaagtcagcgatctattgcagcaatatggccaaagtggaggtaaatagagtattattagcctcggggtttactcaaaaaagcatgtcatttacttatttaggagtacccatttgtgctaaaataatttcagggaatgaatgcattgctttggctgagaagatgacagctcgtattagaacctggagttccaagaatctttcctttccagctagagttgtattaatcaattcagtgctgatggctattcatgcatattggtgtcaagtactcattttccctaagaaagtgattaggcaattggaatctatttgtaaagctttcctttggcaagaccaagcttgtgccacaggaccaggtatgatagcttgggaatctctttgccaatctaaagctgcaggaggacttggatttagaaaaatccatgaatggaaccaagctgccatggggaagtacattttggcaattgctcaaaagcaggatagcctatggttggaatgggtcaatagtgtctacctcaaggagcatgaatggtggagttacaaggctccccttcagagtagttggtactggaggagtcttgtgaacctcaaggaccatttccgagacattgcaggcctatagtcttgtactcagcaacaaaattaccaggtaacaaccgattactctcttctctgcccagttca

SEQ ID NO: 70399 - DNA, 2695 bp, Cannabis sativa
ctgtagaactccatgaaaataggttagctttaggagtgtggttggagccttttgaggaaaaaataacagcatatatagggttatgctgtctcatgtaaatttagcacacattttgcacttggagctcattttgtcaaattatgataaaaagaaaaatggcaacaaactgcaccattttttagggaagataattttttttttttttaaaaaaaaatagtaaattggtagacctagttactagtagttgtagtaaattagtaatattaattatacattcaatgatatttgtttttttgggggcagtgaagtgaagctgagaaatgcataaaggttataaatataaatatatatatttatataaaagattttttttttaaagagttgagttggtgcaacttcacatctggccagctaacccttttttacaatgtgtcatgtatctatcactcttcttgttttggcttttaaatcgaatcattttgaggacattcatagtccctagctcctcatttattctactcttctctaccactatttattctacttattttactcatatttttttcccttgttaattacgtaaataaccccaaaatgttagtttcattctccgatgttttagcttaataattaatttgagttagtaattaattgtaagcatattagtcattgacttttttgtttttgttttagttcacatagtatatgatgctaaatcttgttatggccattaatttagagctatatatatggtaagaattaattcaaatattagtgatttattaactatatatttttcactctgattaattggagtaatgtaattgaaaactatatgtataaattagaaaacttagcttttttagtagtaaaaaggattcaaaagaaacgagctggtattaaatcattattcttcttattattgctactttatcacaaggaggaggctaggaaccccattccccttttgaataatttatagtaatgataataacactgaaatcaactatatttgtctttggattattcttgaaattgaaaataaataaataaacaaagaaaaccttgaaatgataaaagaaaacaagacaatgggaaattctaaaataggtaaaggagatcatttcaagaaataattttagtggattatcattggtttttggttttggtaaataatttagccattttgatggaccaagatgaccctgcctcttcattgctatgtcaccatattaaaggacacaaacacgaacccttcctcaaaaaataatcttaaattgcattcctttagagagatttcgagaatattgttcatagtaattataaattatatgtatgaatattaattgaataataaaattatatgaaattatttaaattatatagagtcatcattgtcgatgactgaacgttttcctttaaccttgttaataatttatttatgatatatttttgaagttttttttttggtaatagagatggagagacggagacacatgtaatagccattatatatataatgaaagatatatatatatataaactgataaacaaggccgttagaagaagaagatggcgaaggttaagctgggaggtggttttcgtgggttttgaatgtgggtttcgaaagagtaatggttgaaatgtggttttgaaatgaaaaatagagcaagaaaagaaaaaggaaactgaatgctaaattcaaaaataaaaaaatgaaagaaaaatgagaaaaaaaaagaaggaaaagttaatgttaacgcagtttttcgtcaaactgatctaagaagatcataataataaagaggactgtgataaattaacttaacaaaataaaaccgcaataaataaaataaacaccagagatttatagtagttcagcctcatgttgcgatggtaatgaggctatgtctacttttgtttttattgattagattcgacatactatagttatgttctcaacagtgtgtggaaaaaactacaacaaaagatttctaggtgaaatcttacatgagatctatgaacacaagacccatgggagacccaatattcataaatttgatcaaagtttatacaacctcacctgtgctactccttgtagtttaagtaaagctgtgagaaaattgctgcagctgagagtgttatggttaggccccttcaaagagagtaaaaagacaaattatttacttaatgttgtaatgagctggtagttttttggctgctgctatttcttgcaggtcgtttgcttgttgttggttgctgttgggttcctcagctgtgtttgtactggtcagttttttgaataaatttcctcttgttcaaaaaaaaaaaagattcttgagaacattaaactaataaagtagaaaaaatggatgtatatcaatggtgtttgaggtcttggtgtcgaatgagtatggtggactcaataaaaaagatgaaagaataggtatggtgttcttagtagccgtcaagtaagtcccaaaagaagatccagaagaagtcccctacttcagcctcttactctcattatataggctgcatggttttatagtgatccctcaacatgtcggggtgtctcactaacaaatctcacatatcatctttaatgaataaaaaattacaataaaataaatatctacaaaaatctccttgtttctaggtcaaaatcccacaaacattggaaaaatggttattt

SEQ ID NO: 70400 - DNA, 2157 bp, Cannabis sativa
cctaggaagtattttgggggggggggggccttatccttttgtggaaagcaactatttatgtaaatattctatctttctctagtaactattttgattgtaatataaactttaaggataatgctatgtttcattttacctgctattatggttctccttcttcttctgctcgttctgttacttgggatttattagataaacttttttatacttcccctaatctgccatggctcattatgggtgattttaacagttttttggactttgatgataaaactggtagtaattattataatatttccgatatggatcgttttgctcaatttattcataagtttagtctttctcctcttaattttgaaggtagtaaatatacttggcataataatactgtctatgagcgtcttgattgggcgatcggtactgagtcttggagggttttatttcctaatgctcttttgtatcatctgcctttttatggttcggaccaccgagccattaaggttgtcctgcatcctgatcctaattctagtcggcctcataggtttaaaagcgttttcaatttgaaaatatttggcttgacaaccccagtttttacactactgttcaggattcttggaagaattcttcccacctttctgataaccaggatgctcttggttcttttttagctcggcagaattcctgtgtctctgctttgacatcttggcataagtctgttatgccacttttccagcctcgtatccaggatgttcaaagagaaattgctaggattcaatctttaggcactgatagtagagagtataagtttcaccttaagcatctccaatctcagcttgatgctcttctttacaaagaagagatttattggaagcagagatttcgtgtaacctggcttaaggctggggatagaaacacaaagtgtttccatagatttgcttcccataggaaaaagaataataccattcgatatctccaggatgatgctggtaattcaactagtgatcctgaggccatgtttgatattatctcttcttttttctctagccttttttctactgatggttgtgatgccgaggcaactggtcatattctagattgcttagggcctccccttgaaaatttggattatgagtttttggctcagcccttcattgcccaggaggtgaaaaaggctgtttttagcctctctggtgataaggctcctggacttgatggtcttaatgcctttttctatcaaaagaattgagatacttttggtcatgagctggtttctgtggtgttggaatgtttaaatggtcaaatagacttctctgctattaacagtaccttgcttgtttttattcccaaaaaacaacatgctaatactatgaaggattttcggcctattagtttgtgttccacgctttacaaaatcatttctaaggctattgctaactgattaaaggttgttcttgacaaagttatttccccttttcaaagcgcttttgtttctgggcgtgttatctttgataatattctcattgcccatgagcttgttcatgccattaattctcgaaaagttggtaaaaggggatgggctgctttgaagcttgatatggccaaagcttttgatcgtgtggaatgacattttctagaaagtgtcatgtaccattttaattttcctatcagttttgttaatctcattatgaaatgtatagctactactactctttcttttcttgtcaatagggaggttaaaggttctcttaaaccttctcgtggtcttagacaaggggaccctttatccccttatcttttcattctctgtgctgaggggttgtctgctctccttcgagctagacaagatgctcatcttcttaaaggtatttctgtgtctagacatgctccctcaatttctcacttgttttttgctgatgatagtctccttttttgctccgctgatagagagtcttgtttagctcttcaagaagttttccatatttattctagggcctcgggtcaagccattaatttttccatatcttctattctcttttcttctaatactgttcaggagattcatactatgttttttgacactcttaatttagaggataagccttttgtctctaaatatttaggtcttcctcaatgtctgtctcgttctaaattccattc

SEQ ID NO: 70401 - DNA, 1467 bp, Cannabis sativa
gagagagagagagagaggctttcaagtgcttttgtgtgtttctttgagattattataatggatagatcataatatatatgtatatatattggaaggatcaagtgttttgagcactatatatataactcattatatacaggtttgattttcaatcacatatagatagtttaattatttgagaaaaaaattgttttatattaatatttatatatatataaggttcatgggtgtgttcttattataaattggccgctaattaggtacaacaaatgataatacatattttaatttattttatttgtatatatattttgcctttggaactgatcatggtcggttagtgcaccagcaagaagctaccagtccgttactaataaccagctctattatttagcagttttttactttattttttttttattttattttttgtagaaaggggtttagccatttgtttaaataattaatatataaatatatgctattggagctcccacaatgtgccgttgtacttcgtgttgggaacgatatattatatacatataacacacaaataatatgataaatatttttgtttgaaaatatatgaattgcaaaaagtacatatatataaaatatagatatataattgtataaattagtagtggagtctctataataagcatagatatgtacacatttgataggttataatgaatggggacccagcatagaaataaaacgacactagtattcaagagtagctagtagtattgtgtagtcaactttctcactgtcaaccatatgcatgggatcaattaattttagaaaggggtagtaataggatatatatataatgaataatgatatgggcatataacataatatgcacacacttatatgataaatataatcttaaccaatcatctttccttaatatgaatctcacctataaaaaatcacttgacacataattatgtgtgatttatgtatgtaggtacatattgttactcatatataattttgaaatttagtattttaatattatcaattaatttaattaattaattatagaataataaatataacactgaaataattattttgtaactacaactctgtaattatagaataaaatcaaaaaataacaataaataagatttttgtacgtgaaatcaataatccttgcagattagactagtccacgtgaccacacccagagataagattcattagatagatctcaaaaatacaaagtaattaacatatgcataaatagactctctcttattatataccgcaaacttgatgtattccactttctgactgaatcttgttgaaatttcaagtgctcgaactcccttcgatctcattgaagagtgcttgcttcctcccaaggtaagacttgaaaaacctgtctcccaaaagcttatagaaccttctctcaaaggtgtagcacaattgttcttcttcttttgtagaattgat

SEQ ID NO: 70402 - DNA, 2686 bp, Cannabis sativa
tgtttttttttgtttttatcttttttatgtgtgaatcagaatgtaaattacctttttctgtttgtctaactaaattcaattttatatagagcattgcaaccactaaaacaccggcctctaaataattagtgatatttcataataataataaaactaaatcatgcaaaacttgatactttatttatgtgaagatttggtcaattcaaaaataataaaatgatgaaatgaaataaaacaaatagagtgagacccaccccatgtattaaccttttttaacactctcttctagacaatcatcctcagcaactctctctctctttctttcccccctctctctcattgttcaaaacatcaaaagaaaaatccactaacaccacctccatcgtagctctgatgagcactttccagtccaggccttcaaatcctcaggcatcgacgacctcaatcccctagcagcatagcctctttcgatgtcgttaccccgagatcgcgagtcaaagttttaaggttcaaactttgaacgcaatttttgatcacctttggtgtccattttaagagtctccttcaacactatactcggcacgttgaggagtacaatgcaaactaaactattttgccaaatttgttacttttttcagtgacatttttgtagcttcgctcatttttggtaacttttcggtgatatcgtgtatcattttgagaaatggttggcatgggtgtgatctactcatcgagatggtagttttgatacatatacttctatttcggtgatgttttcattacactgatttttatcgccataatagttatgcattgcttagatgaggttttgaaactctaaattttaaatatagtcatgttatatgttgttggactcagttttgaatgtagaatacaatgatgataaagatttagtcattcgatagttataggtgaaagtgatattaagattagactaaacagttggagctcgggaattgagagcttagggtcgtcattttaaataaagtttaacgacttagaagaggcagagactcaacttgatttttactgtgaggaataacatttgacatattacaattttattgatttataaaatatttaaaaaattaaaaacttaatctgcatatttttctggactgccctggaggcactgagtgttaaatatacttttgtacttatttatgcaagttatgattttttagattttatcaaattacaaccgttatgctgtcaattttttttagaataaagaaaatatgcttgtctttggttttagtgatgagagtcatatttatcatgccttgagcatattgaagtttttattaggtttatttttatgcattttcagagttcattttagtgtgtgttttagtatttttatcactttattattcagatttatgcttaatagatctcaatttttgataattttagtatttttcaagcctttttaagacaaaaataggtaattataagcaagaaaagaaacttctacaagctttgttggatttctcattgccttaaatgggtcaaaattacatttttagctcaaaaatttgtggtcaaaagtcaagaatgggcactttctaaaaaaataaagtaaaaattcaaagagaaactgaccttcaaggtcgcaactttataaatgatggttctcggacagtggaaattgatgggatgacttggacagatttggagagagttttcagcgagcagtattttaatccatctcacatgagggctttgattggaatatttaatggtttaagacaaggggatgtgattgtgattgagttttacatgatgtttgtatagttatcatcttatgcctatcatggtgttgttgacctttgctgattaaatagttcatgcatcgtttgaagcctgcgatacgtggtcaaataacctatttgacctttaacaacctgactgagtgtgggagtagctttacaaactaaagctcatgtaaaaggacatgagaggaagaatacaagcaggagaaaaggaaatgatcgaaagatgactaagaaaaatcaagggaagtggtcccaaggatagtaattcagtggggggtagcactagtagtggttctgctggaaagactcgtagtggaccatacgggtgtttaagttgtggtcaacaaggtcataagaagaatggttgcccttaacgacaataaagatatcaaccatctcacgacagacccataagaagctatgtagagtctactcctttcaatggacagcccaaggccaaccaataaagatatcaaccatctcagtcttcctcttatattttcacatctcaattaggccaatagtctcaatatcaacatcagttcatgccacaagattcagaattcaacatggggtattcgcaaggtttccaagctcctacacctattgagagtcaaagaggttacaaccaaggtggaggttctggtacaagtacaagtcatcctagtcaaggaaagggaaaagaaaaacaaaaaaaatcatcttctcaagcctatgcttttgaggttgatgttatacagggcggtgcaaaccaaggagttgttgatggtatggttcttatcttacactcttgggctcttgtgttgttctatactggtgaattctattatatcactcatgattgttggtatgttgggtttaagttgggaaacttttagtcttgcgtt

SEQ ID NO: 70403 - DNA, 3140 bp, Cannabis sativa
aaacgtgattaactgctaatttccaaattaaactaagtggtcttgacattgacaaattattaatcaataacttcattcgagaagccttctatccctcaaaggtctccaatcgagtactcgtaccaaaaccaaatggcacatggagaacttgtataaatgtctcagattttaataaggcatgtcctaaggattactttccactaccaaggattgaccaattggtagatgcaacagtagggcatgaattgatgacttttatgaattcttattattgatataaccaaattaaaatgtacatccagaccaggaacatacgtgtttcaagacgaatatggtgctctactgttacaaagtcatgccatttggattggaaaatgttagagcaacataccaacgtctcgtaaatggtatgtttcaaaagtagatgggacgaaacatggaggtataggttgacaacatgttagtgaagtcagtaaaaagaaaatatcatacgcaggaactcgtagaaattattgatatacttagaaagtattatatgatgcttaacccaaaaaaatgttcttttggggttttgttggggaaatttttaggcttcattgtgaatgtgagaagagttgaagctaatccaaagaagataaaagccttaatcgaggtgccttcaccaacaaagccaaaggaggttcaggcttcaacaggaagaatggtagcactcaatatattcatctcaaagttaactgataagtgtctcccatttttcaacttcttgcgaggcaataagaaatttgagcggaatgaagagtgcgagaaagcatttaaaggaataaagaagaatctctccacacatctagttttggctaaacccatgactggggaaacactatacctttatcttgttgtcttagaaaatgccataagtttagcattagtgcaagaagagggtaaaaactagcaacctgtttattatgttagtaaaaggttattaagggcagaattgagatacccacctctagaaaaactcacactttgcctaattcatgcatctcgcaatctgcagtcatattttcaagcacatccttttaaggtcctaacgaatcaaccattacgacaagtactatcaaaacttgatgcttcaggaagattaataaaatggtcgattgaattaggacaatttgaagtaacttaccacccgaggacttcaatcaaagggtaggctttagatgactttttgatagaaggagtaaactcaggagaagattccaaaacaagaagtgaggtagaaacatggaaactatttgttgatggggctttaaataagaatggctcgaggtaggagtaatagtgatgtcaccagaaaacctcaaattccactacgtgcttagtttccaatttgaaacttcaaataacgaggcagagtatgaggccttgttagcaggattaagaatagtcgaggcagtaaaagtgaaaagcattacgtgctttagtgacttgcagttaatagtgaatcacgtcttaggagaataccaagtgaaaggcctaaaaatggccaaatacttagagaatgtttggaagaacttggagaagttagattattttaaaatagaacaaattccaaagaaaaactctaatgcagatgccctagaaaaaatggcatctcagtttgatctcgataagttcagcttggtcacggtggaggtactggacgagccaagcatatgtgaagaggaagatgtcgatatgatgaatacaacgacaacatggatgacaccaatcgtcaaatactattaactaaaaaacttcctgcagataaaattgaggcatgcaaactcttatatttgatccctcgctacacgatggtcgaaggaaaatagtacagaagcggttattctatgcttctattgtgatgtatgtaaccaatagaagctaaaaaataatcagagaaattctaaggcttctgtggagatcatgcagatttgcaaagcttatctcaaatgataatctgtcaaagatactacttaactatcaataaggacacacacggatttgtcaagagattcgaaaaatgccaaacgttctcacatataatcgagtacaaccaaccgagttaaaaatgatgacctttccatacccatttgcactatggggaatcgacatgattagggctttacccacaagaagaggtggcaaaaattacattgttgtgacagttgatttcttcacaaaatggatagaagccgaacctctgatatccatcacatgcaagaaagttcttgattttgtcatcaagaacatcatatgtaggttaggcattccaattaagaagtatataataattggactcaatttgatggtgaattatttactgagttctaagaaaggaataaaataattaagagcttcatgtcagtatcaaggagtaacgccctatacaacaaggacgccacatgtgtgttttatataaaataattcttattttatgtactatataattatactaaaagtgtgggtaattaaattttgataattaaaaacagacatataaaactgctttatgataaaagataagtaatattaactatggggtcctcctgttttcaaaatatttacacactggttcaatagtgtttttacaacataaactttgcattctcaaaatacattcaaaatagagcatcctcttcactaggccttaccactacggctgatatgtacattgctactacgatctcgaactcatagttgcacaacctttgtcttccctttacttgcaccataaagcacccgtgagtcacagagactcagcaagaaaagtgaataaaacaataaccggtaatattcatcaattcaatatcatatcaacatgcttacacatttacacaatatcataacacaatatcataaacacgcaatcctggtactttataaagtacccctttaccactcgttaaccactagctgaatatgtcactatcgtttctcgatgaagcaaatgataggtaagaaacctgtaacgaccgctttagtaatttggattagtaaaggaaattagcaccaattactattatttttataattatttacaagtttaattatttgtggaccccaatattacaaatgagcattagagttataatttctccatt

SEQ ID NO: 70404 - DNA, 1189 bp, Cannabis sativa
ttttagatctgatttggtgtttttaagttagggtttatgttattttttttaagtttatttgttaatttattttgatagttatttcttaatttattttttagcatgtaaaatttagtttagtttattaataatcataattagcttttcaaaattaattttaaaaaattaagtttcttgtgttgttgttttttctttttagtaatgttatgtgattgttattttggtagtttgtatatcaatttattgttttagcaatttaaacattgatttaatttatttgtttaattatttatattgtagtatatgaaatttaggttttctgttgttaaaaaaattaggtttactatgtttgttattttttatgttagtagtgtaatgatttattttatggtttagtattgtgatgggtattttagtagattgtttatcaatttatcatgtaggcaatataaaaattagtttacaatattttatgtttactgtgtagttactttttttgtgtcatttattttatggtttatttgtagttttttgttttcctcaatctacgttttatttatacttttttgtataggttttttagtttacaccattaagtacaagtttactattcgcttgttgtatatcatatgttatttcaggaatgtgagttatattttcagcttagtgaaaagaatcaggaaaaagttatgttattttctaataaagataacattgtggttaaaaatattaattttgactaacgtaagatttttcgtagtatttatttgggttattttttagatagtcatcttgttagttttcagtctcaacttgttcataattccttacatagggaggttcatcagaaaaatgaaaaagatatgtaatttaagtttagtgatgagaattttaactttagtttagctgaattggcggttgtgactggtactgtgttggtgatattgatttgagcaagtatacacacacaaatataatacttttattgatagatatttttgagattagacagtctgttagtgctgttgagcagaggtttatgtacaatgattttaagtctgatgaatttactgtgaagatggctattttgtaccttgttactaattgcttgattagtaacatgtactcaaaaaatgatttttttgagattcttaacatcattggggttggtgagtatggtaattactca

SEQ ID NO: 70405 - DNA, 1098 bp, Cannabis sativa
ctatcgtagggattgaagctcaaagatcaatggctagaggtacatcgatctttcattgcatatattatcaatattgttatagtttatttttcgcatttcatatcgtatatatatactgtattacatactctatattatagtctaacacccaccagtattattacacattggttggcgccactgctgttgtccttaacagataggtggcgcaccaccttatcctaataaacaaagatgacgttcctattagtcttgtccgtacaatgaaatttatctaaattatttaaataaaaataaattatttattacaaaatacataattactattttgataattcaaaatatatttctaaacatcattattttgtatcatccataccattgacaatgttacatagtgatgatccaaagaccatggacctataataccaagctctaataaactagattatttactgaatctcatcaaccatagacctattaattgtgtaatggctcataattaattttggtcaaattgctgttttacagttctaattatttctttatcccttagtaacattaattcactaatgaatgtataatttagatccaatctagctttgtgcacaacttttcaattctagaattaacactttaagggaaccaacatacgatcagttaggaaagtctgaattctatattataattcggttcccaacaatccaccttattagcttcccgaaacagaagttgttagaatcatcttctctaaaaaattataacaagtgaatcaaagaaattaataacatgaataggagttgatgattactctagatttagactgatatactaattgatcatcgttgtgatatgaattaggtatttatagtaaacaactaatttaataaagataacttaattacatattggtgcttatcatatgtagtttctattatatataacaccttcactgagatgtcttgctacattagcgatctgaattgagaatgcttgcacctaataatgggcatcagtaaaccgtactagtaaccgttgattaaagattctataactttaatatgttggtaactgttttattcatgatcaatgatctta

SEQ ID NO: 70406 - DNA, 2032 bp, Cannabis sativa
  modified_base (236)..(247): a, c, t, g, unknown or other
ttgctccatataaattgtctcatcaatgtcaccattaaaaatgttattttgttgtccatctgatgtaacacaagatcaaagagagaaataagtgcaattattatcctaaaagagtatttcaataaagctggagagaaagtctctttataatcaatgtcttgtttctgagtataatattttgctacaagacgtgtcttatatctcaccacattactattttcatccctcttggtttnnnnnnnnnnnntacaaccaattggttttacacctggtaatgggacaacttcccaaaccttattgtctttcatagacttattctcttcattcatggcatcattccacttttgagagtcagaacttttcatggcctgatgaaagttgattggatccatcttccatcattccaaatatcatcctcatgttcttgaagaaatacaaaataatcatttgaaataatattttttctttcaattatggacctccttcatggctctagttcttgagggtgttgattttttttttcttctggaaaaattacctcatcatgatttgggagttgttcaatattgtcttgttgaggtttaagattcatttcttgattaatgataggtgtggaaggctgaacattatcgaaaatgatagtaggaactgaatttaaattcactttcctccacaaaagcaatgtctctaaccttctccccccaaattcaacatcctcaaaaaaatattgcatttcccgtctcaaaaatatttctaaatgtgggatcatcaaacttatagcccatagatcactcagattaaccaataaagtaattgctaactattttagagtctaattttttttttcatgtggcatataagaccttgccatagctggacatcctcaaattaagaaattctttagactaggctttccaccttaaatatcataaggtatttttacagctgctttagttggtactctatttaaaatgtaagttattgtctttaatgcttctccctagaaagacttaggttagctataatgagcaatcatcctccttaccatatccttaagagtcctatattattttttaggaaaatcattcatgctaggtgatccagacatggtgtactgcaggatagtactacattcctgtaggaatttagcaaacagtcctggaagttgttcacttgagctgtcatatctaccatagtactcaccaccatgatcagatttgacttttttaaaccttttgttgagttgattctcagctcagctttgtaagctttgaacatacccacaacagaaatttttaatgaatgagatgtacccataatgtgagtaattgtctatgaatgatgacataagatattgttgatcattccaagataccgtagggaatggtccacaaatatctgtatgaaataattttaagacctttgaagctctattaacacctaatctcttaattttggtttgttttcccttgatacaatctacacagacattaaaatctttaaagtcacaaaactctaaaatgtcatcagacacaagatgttcaattctaccttctgagatatgacctaagtgtttatgccataatgatgctgaattttctttatttaatttgcatttagtacctcgtgattccacatacaagatttcattatagaatgcacttgtttctagtgaataaaaattatcataagcattcaaataactagctccaataacatttgaatttaaagaaaaaagtaaattaattgtttccaaatgaacaacaatatctaaatttgtccaacaaaataacagaaactaaattccctctaaaatacggcacaacaaaagtgtctttcaaatccaaataagaaccagttcccattaacaaactaaaatgcccaattcttctttttctaccgattgttcatcgcccacaaagatggttctttcaccatcacttggctttcggtagctcaggcaaccctgcatagaaacacttatgtgagtagtagcaccagaatctatccaccaagtgtttctaggtactga

SEQ ID NO: 70407 - DNA, 2497 bp, Cannabis sativa
ccaaatctagaaggcatggttgcccctttggtgttggtcattgagaatctctctaaaaccttatctatgtaagttgtttgagagagagcaagggatctatcatcaagagagcaagggatctctctaaaaccttctcgtgtattgatacaaggtgatgccctttgggctaaaaaattcaggagcatcctaccaaccacttgtcaataaaatgttcaaggacctaatcggccataacatggaagtctacgtggatgacatattagtcaagtccaaaaaggatgggggacatagagaaccggaacgagtgctttaaagttctttgagaatacaacatgaagatcaagcccttcaagttttcatttggagtcaactcgggcaagttccttgcttcataataaattcctagggaattaaagcaaattctgagaagatccaagcttttttggacatgaaatcgcccacaaatattaatgaggtacaaagtctaactggccaaatagcaacactaagaaattttttattaaaatcaacaaataagtgtgtttctttcttcaacatcctctgctgaaagaagaagtttgaatggacagaggagtgtaaagtttcctttttagaattataaaagcaactagcttaacctcccatcttgtcaatacccctagataatgaagaatttagaatatacctggcagttacaaaattttttgtaagtgcactcctcatctgagaagaagatacagttcaacatctaatatactatgttagcaaaaggcttatcgatgtagaaagttgatactctccaatcaaaaagttaatatattgcttgctactagcttctagaaaactacgaccttactttcaagctcatcctattagagtataaattgaccgacctatatgtcaagtgctacaaaagcctgatgcatctggccggctgcttaaatgggcaattgaactgggataatatgagacaacctatgagacaagggtagcaataaaaggccaagctctcaccaactttatggctaaatgcacgaatgtagctcctaaaaactctgagcaagagcaagagcagaagcaaaagctagagaagaggtgaatgtaagagaagaagcaagagcaagagcaagaaaaattagcatggaagttgcacgtaaatggctcttgtgcaaattaattatctggcaaaggaatcgccctcattacacctgagggcaacaactacacaatgccataaagtttggtttcaaagcctcaaacaatgaagcaaaatatgaagcccttattgtccagctaaaattggcatacgaggttcgagcaaagtacctagacatattcagtgactcgcaacttgtggttaataattcttaggtgaatacgctgcctagggagaaaaaatgatggactacctaagtaagatacaagatttactaacttaattcaaatggtacaccatcaaatagatccctcaataagaaaattccacaacaggtgcccttgcccagcaagctagcaacacaatagaagacaagaccaatctattccctattcaatacttacaaaatccaagtatctttataccagaagaaatagagatgctagatgatagcccaacctggatgacaccaatagtaccatacctttttcaggagtcataccagaaaataagaaagaagcaagaaagataatgaggaaagctacccggtatctaatccttgacagaattatgtactgtcgtagttttatgatgccactttcaaggtgttttgccaaagaggaagctgcacgactcctaatcaaagttcatgaaattttttgtagtaatcatgttgggggcagtctttcaaagaaaatacttagagaagggtattttagcctacaatgattgaggattcaatggactatgtcaaaaaatgtgacaagtactagaggttctctaagatcccaagagctccactgaacaagctcatacaaatacagtctccatggtcatttgctatatgggggatagatctcatcgaatgactccccaaggggaaggaggactgcaatatgtctttgtcgttgtcgactatttcataaaattggcagaggccaaacttgtaatatcctaagattaaaaaattgattagcgaaccctaactagttaaatatgtattagaatggaattatattattacataatttattgtatgtgaattaagttgataaatggcatgttaagccccattggcgagtcaagggcatttttgtaattttaacctgagaacggtaaaactgtaaatttaatttaattgcacgcttatgggctatattattatatagtatacttgctgtgtcctttttgcaagtgttttctgacaagttggtgcggtatagtcacaattcggtattttggggccgaaatatatttttgggattttatattggcattttattatttaatgaatattctgaaaattatttgagtaaatgtgttgtgtgataatgaaaattt

SEQ ID NO: 70408 - DNA, 672 bp, Cannabis sativa
  modified_base (543)..(544): a, c, t, g, unknown or other
cagcattttctgtatagagttttttattgatattttatggtagttaatggttcagttctaataatagcaatataatgctcaccaaactattttggttaagatgcccaccaattgttcttgggttagttgtgctctagtcaagctagttaggtttaggacttgctatatgccatggcatgtattcttccctaacttcaccaactgtgtggcttgatgttcgacgaggaagtctctgatgagcaagttgggatctcgacaatgatgggtagtagcaaggtggacgttgggttttgggtgtggggcggggcgtggtcttttaggggggaagggggttgttttgttttagctaaagtggagggttgttgttgttgctttcttaggtttttgcttgtgttatgcttttatttttcttcatatttttggtgtgcaaatatattgagaatatttaatagtcttaaattattgtagaggttgataattgtatgataggtttttggaataattacataaggcactattttttataaaatatttacatttttnngttcaaagaatgtttttttacattattacggttttccaaaaaataatatgaaaacaacataaaattaacaagaaaacaacataaaagtaacatgaaaataacaacaaagaaacaacaaaaaataacat

SEQ ID NO: 70409 - DNA, 5474 bp, Cannabis sativa
aaaaaaaaaaaaaaaacaataagcatagtaactcacaaaatctacaaataatctatatactttcgtcttaaattaatttacattcataacaatcaaagcatattcaaattttagtttttagaattttaattcgaattcatagataacaattataggtgatcaatcaataatgtaaagtaaatcatattgtattgaattcaaataagagatgaaaaaaaattaaataactacattaattaattcataaaaaaaattcaagtaattcacataacaatcctaaaaaataatctatagttcatgctatttattataaaacaaaaataatcaaagaaaaacataatattcaagagaaaatatgaagaaaaaaaactctaggtgtgtctcctctagtctccaccttcccaatctgatccaaagtcggtttcttcttagtctcaaaagattaaaatctaatttttcctcatttcaggacaaaaatgcccttaaatgacactttgggcgaagaatcgcgcaaaggggcgctacagtgtctaagagcattttcttgatcactctgaaagcctgctatgatgattgatcgtattttgttcataactctttcaatgtatcttagaattggatcattcaagatgttatgaaaagcttaaagaaagatttagaacttttattcataacatgcttccagaaagtggaggcatcatagttgaaaatttacatgaagcttcatacttgattttcgataacaaacagaatatgttgaatatccaaaatttaacatttttcacctattttatcttacacctccaaaatcaatattaaatccactaaattcatcttatttaatatgattttactcatttaacccatatatgtatttaaccaactgaaatttaaattcatcttatttaatatgatttttctcatttcaacccatataatgtatttaaccaactgaaataattaagaaaaaaaataaaagtaattaattttgcacaaaataaatataattgactaaaataaacttttaaaatacaacctaaaaaatacctaattctagcctatgagcttcattgaaaaagaagaaaaataagtttgtatcattttctccaacttggaatattcatgctaatttctttttgaaaggaggtaaagtatcattcaaacgtttaatttaactaaattttttatttgaaatgtttactcatctaaaaagtcacactcagaccattccctttactttctagcttaatattgttgggtgggtgccacatgtcgttcccaaaagtgtcctgggcatctttcactaaattgtcaaattacgaaatcattgaaaaccttaaaccatttgatccgatctggacaagtgaacagtttcaaacacaaacccttctcccttggaattgttcccgtgaaaacattgatcagttgattttattagttgaaacaccagaaaatttgttggcgttgtcaatatatatatatatatatatatatatatttatattgttggcgctgttacaaaatttaacatttcaaaacttgaccaggtatagaagtgctttgcagaatgagtcaaactcatggccttttggctttggacaacttcatgaaacgtaggtcaaaatttgaggataaaccaagataaatatttaaaaagcatggaaaaggaccttggtgatgactcaagtcctttcctagcttttattattagaatttagaagcaatacattagtgtaattcaccacatagtaggacataattgaccatgggcacgctatgttaccaccatatatagactctgtagccatttgctgacatcgaaatgaacatcaattaaaaactatagcaatgatattctctttaatttacacttctctttctagatgcatctttttttataagtacagattcaccatttgtttgttatataatccgtttttccctctggagatctatatagtgattcacctagaccattatagccaccttctttgaccaaaagaaagttgctcccgtcacctattttatcactttctaatattataataagtcaaatcggataaacatttccttcgtaacaacagaagcaagctacattttttttcaaatgatagtatattatgttcaatggacatgaaactttgtcctaaccgaattaagttatgatttgatagctatgtatccgtacaagaatcccagtggcagtgttttggccttcattatctcaatttttgtcatcattaacttggctaattcccagccactttatcccccttcttgttcagatccaataaataagacatcagaccctggtttctcatcaaacctcactacccttttggatactttatcttctaaagcggttgtcaacagcttctacaacgaatcatccgacgggttacatggcctttttctctgtcgaggtgatgtgtctattaacgtttgtcaaaactgcgtcatcaacgcaactcgagaattgaaaagccattgcttaaccaataaaacagcaatcgtatggttcgaacactgcatggtacgatattctagcacaaacttctttggaaaggagcagatacttcccaatttaagactatgcaacactaagggccacacttcccaaaccgatgttgatgctttctctttgatgtatccaataataaccgaggcttcgaattcggataccatgttcaaggccaataattttgctccaaataataatgagtctgaaaaaagatacggtttggtacagtgtactagagacatcgatgccgcacaatgcagtcattgcttggggcagttaatggagaaaattaggaattcttcttgccttggtaaaaatggctggcgcattttggcaccaagttgcaagctaagatatgagctctatccattttatgagctacccccacaagctccaccttcagcgccagagccgaaacctggtgacaaaggtgagcaaaacagaatcatttactagatgcaaacaaaaattgtttaaataattccaatttgcaagttttttaataattaaattctgtattgctttggtctattcattaagttgatcctaatttgaaaataaagagtagaaaaaattgtgctttacgaagtatttgaatcacataatatgagttgaatatttcgaaagtatctgagccagaatctctgttctctcttaaaaagacaccaaatttaaaaacaatatgtctagaaaggaaagagtaggcagtgtttcagtaatttatttcagacatctgtttcttttttttttattcttaaatttgttcaatgattgtgcagacacaggaaaaggaggaaatggaacaacaaacaaaataattatctctgtatcctccattgcagcatttgcagctgttttgggtttatgctattgcttatatattaaaaacaaaaatagaggtaaactccagttcgcctatgccttttttttttcaataaaaataaaaatcaaaactgttaagcccctaatatgatttcttgccagacaaggataattcaacaagaattcttttgccaaattcagacggttttagtgggagagggtttcatggaactgatgacgatcatagtggtgaaatgcattacttcaatttaagtagtattatggctgctacaaacaacttttctgatgcaaacaaacttggagaaggtggttttggtccagtttataaggttagcacacttttttcacgttctttttagtgctttatatgagtacttatttaatattgcttgagaaaaaatgccgggccttgcatgaaacaaagaaaatttataagaaaaaagaaagaaaaaatcatccaaccatataactgattgtaataaaatgacagggaaagttgatggatggaaaggaaattgcagtgaaaagactttccatgagatcgagacaaggcctagaggaattcaaaactgaagtgaggttaataataaaactccagcacaaaaatcttgtgaggctcttgggatgctgcttggagggagatgagaaacttcttatctatgagtatttggccaatactagtcttgatgccttccttttcggtcattttctttctctgtttttattagctcatcaaatataacaaacaaacgatcactatctaaatatgttttttcttttcttttctttgattgattttcaaatgaaagcagatccaagaaaatcaagagaagtactggactggactacacgtgcaaacattgttaatggaattgcgagaggcctattatatcttcatgaggattctcggctcaaaatcattcatagggatttgaaggcaagcaatgtcctgttagatgatgaaatgaatccaaagatatcagactttggcactgctaggatttttggatgcaatcaaattgaagctagcactgaaagaatcgttggaacatagttagtcatttcatcgattctcaagctttgatttaatgattagtaaaagcaattaacaaattttggctttgggatataaattatggctgcagcatacttaattttactgtaacatgtagcatttaaactgcattttactttcttcaacagcggatatatggcaccagaatatgcaatggagggattgttttcaataaaatctgatgtctacagctttggagttttaatgctagaactcctaactggaaaaaagagcagtggcatctttgatcgagaacgttcccagagtctttcatcctatgtaagtttctattccattttatgatcctttcagaaagaactatactcttcttgtagtgaacttatcaactatgaaattgagcaggcttggcaacaatggaatgagggcaaaggagagaagattatagatccaaacattgttgatgcgtgtccaataagtgaagcacttagatggatccatattgcattattatgtgtccaagaagaccccaaagaaaggcccaatatgtcctcagtaattctcatgcttggaagcaaatcggtccaccttccaccaccatcgaaacctccattttcttcaaatagacttttcttatctgatccatattcaactacttcagggtctggactacagacatctgaccaagcttcaacaagtgtttcatgcaagtttgtagagtggtcggaccacagtacttcatagttcataaattcataaccactatttctttttttgaacaagctacttcgtatttttttctttttttcttttttaacaatgaacattcagagtgtaatacattatagagtttatatgaaagctacagttttgtaagataaaaaatttaaataataataataataataaaagctataactctgctgctgacaaaattaattagtacagatttatttggatgcctttcttgaagcaatactttttaattagataatggccttacataagaaagggtttgagccgaacaacgaccacttaattttcagctatgaatatggcacctcactcgtcctgact

SEQ ID NO: 70410 - DNA, 992 bp, Cannabis sativa
aggagaggaatttgaacttagaccttgtctttgagaccgaggaagtgtgaaatactacactagttgtaagaccgcatgatttcttattttaaatgtatagaaaaatttatagtgaaaattccaaatatgttaagttaatttcgtataagaaataaataaatataaacatatagtttactatttttgttaaagtgatcgatacatttatgttatctgaattatgttgttcatgaagaaaagttatgattgatatcctgtattattaaatttgttattgtaagtgctcttatacctcatgaatctgttgtgctcttttatccaagatttggtatattaacgtaggatatcatcgttcctttgaaaaaaaccaggcagtaaataacaacaatttggtataggaagatcataggaatattatagctatgaaagttaacttaattatataagctggtcagctttgacatgcacacacaattttttattattattatttatccatatttatctcagcttaagtcttgtttatccgcgtcctgcctaccaaattttattttgcttctctttaaaatactaattaggtaatgttattaatagtggatttatacttaatcgtcatagtaaaaagttgacctcacaatttgacaattttagtaacaaaacctctttcaagcccactacattcttaagatggctgagatctaaaatgatcataaatttggaaattaagttagaaattttacttttttaaaaaaattaagaaattggccaaatataataaattatctaatgaaaattataaaaatatatttttcacatatttttttttaaaaaaaagattatttaataataaaattaagttatataattttttttagtatttcatattattattatgttgtaataaaaatgaataaatatattagatcattaaatatatatatagcaatatttgatatatcgtattactgaaaactaatataccgaagtaatca

SEQ ID NO: 70411 - DNA, 1597 bp, Cannabis sativa
tattaaattgtattttatgtaaaattattatgaggtattaacttttatggacacctaaatatataatattttagtataaattaaagtttaagataatattttataaaaatatgacacataatccaattctatataatacaatacgatacaaaacttaatacgacgttccaatcgagctcaatacaatacaatacgacataccaaataagctctatatctactaaattacttatacaatgttcattgatataatgaatagcagtactttatcttttttgtattaattcataattaaaattaatcaaattatcattttacttgtctaattatttttttatctgtgagtaccattaatttattgataaaaattaattcaattcaatcaaaatattttaattacagaattaacgcttaaaatcaaccaatatctacgaaatatattacatccgatgtaatatagatttttccaatattttgggtttttgctaaacgaaagaacaattattgtaaatgttgttcagatatatctacgtcaaaaaagatttgtgcatttttaaacaaatcattctacctaatgatgtggcaggtaactattggacccagtgtatgcgactgcaagtattaaattaaaatcaaaagaagaaagaataaacgtggcaggttcatgaacaaaataacaagtaacagagagttatgatccagtgcagcaaggctcagcaacttggatcaacagctaaataactttaccaataacagagcatatcataatcttcacaacccttcaaccaattaatgtcgattaaattatttagagataatataaatttgtgcgcatctgatcaccgactcgtacataatgacatttgtaataccatttttatcggtaaaatcaaagaattttataaatccttcactaccttatccggaaaatcagattaattaatgagttacataccaccacattaattattatttaattatcgatatcagggactatatagcaaaaacttaaacaattgaacataacggctgaactaataaatttctttctcagagtgtaatatcaattttggcattcttgtggacttaattgtaaataccgtaaatctgagtattaaactaaaaccaacataattaggaaccaaatgtgtgacagaaaaataaaatctgaaagaaacacaacacacccacctttgagtaaaagctaaataaactggaaaatggggaaaaacgacatcatgataacccaaaacgacgtcgtgtgttaccacgtggagctttttgctgctttattggcccccaccatcttcttgtttaaaaagcaaagcgagatccaaagttgcttctcactaactgtcgggtcacccttaaacacctaagctctttcatttacattccggcaatgccgccggatattccacccgacccgtgaaaattgacccgaattttgattaaaaagacgaaaatgccactagcatcctcttcttccgccgtggctccgcctcctcacaacctgaagcaccgcgtgttcacttgcctcaacaagctctccgaccgagacacgttggcccttgccacctccgagctcgagtccatc

SEQ ID NO: 70412 - DNA, 1808 bp, Cannabis sativa
gatttcattatattttccgcattttcatatcattgtatatgctatattatatacactatatatatagtctaacaatgttaataacaacaaaaaaaaaggtgaaagaagaaatggagagatcagaagagagtattgatcaaattcttgcaaagcttgaaaaggttaaagatccagttcgtgataactataattattattgttatcaaggattttggatccaagaagttatattgaaacgtatattatcttttccaattgatcaatttgtggcacaagatgatgatattttgttaacttcttgcccaaaatcaggtactacttggttacaatctcttgttttttctattgtgaaacgcaatagtaatagtaatagtaataaccctttgattagttccaatccacatgatcttattcatccacttgaattgtccttaaatgacgaatcgaagcaaagaattatgtttacgcattttccttactctgcgttaccgccctcgatcaagcactctaagtgtaagatcatatacatatgtagaaatccattggatttgtttatttcacattggcattttgttcatcagattctcggagatgttattgaaccaaatcatttagaagagtgtttcgatatgttttgtaaaggaatccatgcgtttggaccgttttgggaacatattttttttagagggggttttggaaagcaagtttagaaatgcctgacagaggatattatttctaaaatacgaagaacttaaaaaagacaacgtgttttttattgaaaagatagctaattttttgggatttccattttcaactgaggaagaaaatcgtggcgttccaaaagaaatagaaaaaatgtgtagctttgagaatatgaaaaatgtggatgtgaataagactagcaaacattctcttgggatgtctaatagttcattctttagaaaaggtgagataggagattgggttaattatttgacacctgaaatggctgagattggaaagaaactcattgaagaaaagtttggagagtctggtttaatgtttgatttctagattaagtgttgtaatctttgtttgtttccattttcttaataagattatgtaatgtttaagttataaacatcaatttgtactaagtttgaacaatcctttttgttttttttattttaagatgtaatgattaagtaaacataataaatattattgtcaatggtatcatgtatgtatgatatcaactagaatattttcatagtaataatatattttgtttttatttatagtaatgttgctctatatataactacaaaggatgcatgcaattttaaattaataaacattatgggtggtattctcgaattggattcatacacgtggcattcagtagatggccaggtgtttggtgaggtccaacccaaaggtaatcactcaccaagtctcctcgtactcaagtaatgtactagtagctccgagaggaggataccctcccggagaatcacattagactaatggagtattcatatatgatacaaggaagagatagcatctaggctcttagatcctctatcatgtctggtcccaacttgtgcaatgcatttctagaaaaagtattgtagcttgtcatttccgtgcaagtggcaagatgaaattcccactaaaagcgaataatattttagggattttccccacttcttttatgacacgcacattttccaggcatacataggcaactcgcgtccttagtagtcccatcagcagcggatagattgtgtctcgactgccaaatccctacattaggcttaaacaacaag

SEQ ID NO: 70413 - DNA, 975 bp, Cannabis sativa
agttgctaaaaataaaaaaatttatagtgactgtaatcaaaataattatgtttgatttagtgtgataatataatggaataaaatattgaccatatttttattacttttatttttataattatgaattatttaaataaaaggtaaaattaatttttagtttctttattatatatatttttatcataatagtatattaattttgtaataaagtgtaattgtaatgaccattataatgattttttattgtaatgagtttaataactattattacaatgtaatagattacaaattttttttaaaaaaaaatgataagcaaagtaaaagacatattaattactattacaattatcattcctataaaccaaaaatattccctgattttcccaattaagaacatttactatcagtattcttaattaataatatactaccgacctggatatatataatacttgatcaaaagatgcctatgtatgatctattgttcttattatatgatccctatatcaatcaagcttattcaaagatagaggtatcattcataccaaaaggccaataattggtaccctagctagctatatgcttatatattaaaccatgtatttacaaaacctttattaaaaaaaagagagagagattaaagtaactattaaaaaccaacatttccttaaattccgaaaaaatacaattacaattttttaccggatctcacccaaatatactataatagaaggccatttatatacatgggcccaatcggcccatatatgtacacatgcaatgaaagtggaagctatccaactcttagaaaatagaaatattgtagactttttcatctatatttctctctgttctactgtttctttcttctaatatatagacaactataaaaattggtaaaatcatatagaatagatatatgaaacttcttgttttgatagttaaaatggagctgggagagtatcccaaaatatt

SEQ ID NO: 70414 - DNA, 2439 bp, Cannabis sativa
tgttaaggctcatgacagttatgacagttaaacctttgactgttcattctgttattgagttagttagctactgtgagtgttagttttctgttatgagggttgttactcattcggttattctgttttggcttagtctcaggtctgttgagcttagctttgtatataaggctggattgtaattctgttcaatgagattaatctttcttctccattctttcatctctttcttctctgttctttctctttcataaatctttgacctacattttttctcttcttgttctatgattctgttctgcaatgaatcctagatttaacatggtatcagagcgttggcctccgctcaatgttaacatggctactctcggatctactggtggtggcaactcgaacaacacatctggtttcaatggtggtcaggcagctcagcctcgaatcccaactcatcaagaacctgtatattttaatcacagcatttcaattcggttgaatgatcacaatttccttttgtggaagcaacaggttttagctgcgatcaaaggcaatcgtttgctgaaattcatcaaagatccaccaccagctgagtttcaaactccagaagatcgtgtgcaaaacagggtgaatcaagccttcatcgattgggagatccaagatcaactcctagtctcatggctgctatcttcgatgacagagagtcttttgactcgaatggtgggatgcgattcagcacagcaaatttggtccacactggagaagcattttacattgcaagtgtcctcgaaaattcttgagtttcgtacgaaattgcagaatttaaagaaaggtaatctcagtcttaatgactatctcctgaaggttaaacaatctgtggatctccttgcttctgtgggagaagtcttgagcgatcgtgatcatgttgctgcgatcttcaaaggacttccaagcgaatacgataccttcgtcatttccacaaacaccagaactgaacaatacacagtcggagaaatcgaggcactgctcctagcttctgagtccagaattgaaaaatctggtaaggaattcgatgtgagtgcaaacctggtcactggtgatcaagatcaacagttagacaccttgatggaggcaaatcttgcctggagaaggttcagacagcagtatgggagaggaaattctcaggtttataacaactcaggtcagttcaatcaacctgtgtttagaagctttaatcgtggagatagttctggtgtgaaaggtaatttctccaattttcctccctatcaagctaacagaactggtacaaacctgaataataaggttcaatgtcaattatgcttgcgttttggacacactgcacacgactgtttttatcgctttgacaagtccttctcaggaactaaaccaggtgcaagcaatcaggtcactgtaccacagaaaccccaagctaatctgaccaccaacaacagttctactgattctagttggtatccagactcgggagctacaaaccattgtactcctcaagctcaaaacctggctgtttgctatgattatgaaggaacagaccaaatgcatgtgggagatggtacaggtttgtcaataaagcatattggtcattcattttttactcctcagcatgcatctcattctcttgttcttaataacttacttcatgtccctgaaattacaaaaaatctcatgagtgtttctaaatttgccaaagataataatgtgtattttgaatttcatgatgatttttgttgtgtcaaggacaaagtgagcaatattaccttgctgatgggaatccacaagaatggcctatatacttttgacaagtctcaacttggtccaatccattcaactcctacctctagaatcaaatttcaagacttgcagcagccaagtcatagtcaaaccagcagcccacccattcatgaaagcactttatctcaaccaaattccaagtgtacttttgtggcaacacttaataactcatctgttactgtatctaattgctataagtgtaacacaaatgtacaaaacaattttaccttgtggcataataggcttggtcacccctctgaaaaagtggtccaaactgtactcaaatcttgtaacatttccaatgttaataaagattctgaattttctatttgctcagcttgttgtcttggtaaaattcataaatttccatttccaaaagcatctcaaactgttatttctgaaccacttcagcttgtggtttcagatctttggggaccatcatttgttccatcctttaatgggtacaaatattatattcattttgttgatgcttactctaggttcacctggctgtatcttcttaagaacaagtcagatgctctcaaaaccttccaacacttcaaagctgaagctgagttacaacttggcaaatctattaaaactctccaaactgattgg

SEQ ID NO: 70415 - DNA, 998 bp, Cannabis sativa
tatttatcaaaagaaaaagtagggttggaaaatcaaaagtaaaagtaagatgttaaaatcaataatgattagcacttattcctcctccaactccatctaccattaatcccatcaaatcacaaaatttatttaattaactaatatagtttaattaagaaaattaattaacctcgattacattgaccaataatatagcaaataaaacgaaagtgcacccagatttggagcatcttacattattccacgttggcctctcgagtccccaaccctattcaccctctcacgtgacaaccgccacctcactttttttttttttttactaatttttaaggatcacaaaatgtatcatcctattatatatcacattttatttgactcgattttatatttggtgttagatatgtcaattaatttattttcaactcacacgatgcttaataataacaatgcacataaatctatactagaaattaaattttgaagaaaaaaatgtggtaattaattgttttttaaaataaaatactctttttttattttattttttatagtaaaatataagattaatactattttagataatgtgttttgaaaaatttattgattgaactttttattttgctaaatgataaaatgaacgttgtattttttaaaatagtacaaataggattccgagcttaaattttgacaatttttgtttttgatagagctaaattaatgataattcatagcacatataaatagcccaccacacaacaagtaaactttcaaaggtcaaatataatccctcacaattgagagtcgacaagagtcgaactcttgatccaaataaggaaaagacgagtatagacttccctagtaatgagaaatactaaaaggcaccaaaaatacttagtttcttcttacatgtcaatatcattattggtacaattatgtatcgggtcccatattaatacccaatagcaatgctccactagtaatacaccacattcttaatttta

SEQ ID NO: 70416 - DNA, 1328 bp, Cannabis sativa
tcggaggacattgcatcctctcctggagtattgaaaacaacaaagactcattaagttttaggaaatgtgctagacttggaacacaaactagaaaagttaactctcagtaacctttcaaatatagatatacatcatcattaatgcattacaactttcctgaaagacttcatgcggcaaaatgttgttttatttaaaatattgttcatgtatctcttcagctttctcatgcatacatacataagatgttggattgacattgatcaatatcaagaagcatcgccatgaagttatactcgagggaaaatacaagggagtcatatgttggatttttcttttttttttttttctttcttgtatattcatgtaaaataataaattaggctaaaaaaatagtaatgctgtttaaaattttgaaaagagtagcaaggtcgaaggtctccaaaaaagaaaatgttattacaccaagagattgtatgctaattgtcattctagaataagccaactttcattctgacaaacatattttagaatagcaacacacttatgtcggtaactattaactaggtgagatatatatacacatatataatatacacttgcatataattatatataatgaaagagatatggccaacaaaaatgcacatgggatagaaaaatgatcacaatttataccaagacattctagacaaaaaagtagataactcaaacgaggcataaaatgacttgtgcacaataaagtactgaaaatataaatgaattacaagataacaaccaatataaacatatatatatataagtaccagattctgatgaaatcatggaaattttgagttgatccctcacaaatcacaacttttcttgatattgaccaacgcttcagtagtagagtacacttagtctgaaattttctgaaagttgagggaagttaatggtaaaaaattggtgttgggaaattttcagcagcaagcaatagtaatctatttttaaatacacatatataagagagagatagatagctggagtggaagacataataaaaggagctatttatgtctaaaaaagaaaatgtaaattcatagttgtatgccaatcaagatagtacaaatgtatacaatggtcgtccaattgaaatttatttcatttataatcataaaaggctacacacatctcaaaatcaaaagaagcaaatcaatgacattttacttattatgaacgaaaatggtataaaaggagtgtttcgcaatattcagtggttgatgtctttacttacaaatttagaaaaaagagtattgtgtgagtcccacattcataactagaggaatcga

SEQ ID NO: 70417 - DNA, 1407 bp, Cannabis sativa
aaccaatacgtcattaaaactcgttagttttatccagctcaatacctccttcacaccaatagcctctgctagagccaagtttactataccctaatgatatataccactagaaaaactttgtgccacctaccctaaaacgaatttgttcgtaccttaaaaaattgcaacatcgacatttattttaattctatttccagctagtataatccaatactcatgaccatccccatcttgtaacaaaactagagacaaaacaaaagttcttgcctgagcactcttccattgatcacaattacttttagtcaatgcaactacttctttaatagaactatttttttttctttccacaccttattgttccaaacaccttagatcgcccaacacaacatacaagctaaaatttaatgttttggataccaaatcttgagtctttcagccagcagcaaaccaccaaaagaattgtcacttatatctatcataggaatctcagagtacctccaacaagccaacgaaaaaatagcatcccactaaacagtgaaaatcgattcaagcatcttgggcacaagatagaaagtaagggaacatgtttaacttgtaaaagaacacaagaaggaaggaaattcacaacagccctctagataaaatctttgattaatttaggagggagttttaatttccataaaacatcccaaaaaatagagtttttatcctcatattttaaactctgtgcatcttggataagaccataagcactcttaacatattattcatctcatccctccctaaaccagaaccaaccatcttcaatcacaactggtaacaaatgaatattgagtatgagtttagcatcatgttcaacaaaagaatcatcaataacttcagaatcccaagctttttctccaacaaccataagactagagataggtttggtcactcaaactaggatgagaagatatgacaaaaggatcatccttattcagaagccaagggttccgaagaatattaatattagagcttgagccaacaaccatttgacaccttttttgcatgaagaattgagcttttaaaatgcttcgccaaataaaacttgagttgctccccaattctgcccctaggaaagaaccacgagagtagtaacagggctttgaacatgcggttaaccaaagaatcacgatggacttgaaagcactaaccttgagcaatgttaaagtagtgtaaactcctaaaccccatttcattaagactttaggagcacacatacgctctcaacttatccaatggataccattacctttctaagcagatgacttctaccaaaaagagcacataagtttttccaatccttattaagggggcaacatgtcgtggtacaaaataatttggaaatactctgcaaaaggggtagag

SEQ ID NO: 70418 - DNA, 1187 bp, Cannabis sativa
gtatagagtgtaatttcctcgattattataatagggaggaaactcggatgctaatcaataggagatgggatgcatgcattagggatacccagaaatacaccttataataacctcatcaatgctaaatcattaccattaatgttatgaggtatcattctagtattagaaatagaaccataaaaacatgattatttgtatacacgtattattaattttatttaagattttaattttttttttagatttgccctatttttattgcttatgcatctgaatttttgttgaacttaagcctattaaaaaacttttaaaaataaaagactaaccataatctaagtggctcattattcgatgaaggtaaagactaactatagatatttaagtggctatttgtttctgtgcctactttttcctatgttatatttcttgtaattttaaatttaattttgacccataatttaattaatgataggaggtacaaacacatagtgaaaagcatcttttggaaaaaagaattgtcacattagtaaaaagaattaatgaaagttcttttacttatgttttgaatttcaaataggacttacatatacattacaagtattattttttatcctgatttttaatttttatttattttaaaccacaaaaaataaattatatacctaggatgagaccttataataacctgatcaatgctaatcattatcattaatgttatgaggtatcattctagcattagaaatagaaccataaaaacatgattatttgtaaacatgtattattaattttatttaagattttaattttttttagatttttcctatttatattgcttaagcaatattgcttatgcttttaaatttttgttgaaactattaaaaaagttttaaaaagaaaagactaaccataatctaagtggctcattattggataaaggtaaagactaattatagatatttaagtgactattctgtgcctactttttcctatgctatatttcttgtaattttagatttaattttgacccatgatttaattaatgatagaaggtgcaaacacgcagtaagtacattctaatatttagatcaatatgaggggataaaaaatacttgatttcgaatcaagtagaataatatcatttaacggtgaaaatgcagagacagtggctacaaatcgtattgaaaatt

SEQ ID NO: 70419 - DNA, 3375 bp, Cannabis sativa
aagatacagtgaggagggatcctgatccaacaattctacaacctccaagagcttcctaattagtgggacaagaagtgaaaatacctttggttgggttcactcgggccacataggaaggtggaacaactagtactcttgccaagtagactagtcgaagcactaaaaatccatctattagaaatccttgagtggtgattggtgatgataccgaactacaaaatttgtgagctgctttaggacaaatccaagagcataccaacactcttcaccatgattaacaagatacccaagtagttgtgaattttgccatcgagcatcaaaaacaccaattccaggagtggttaaaacaacaaatggatatcatgagagcccaataagtagcaatcaataatcattccatgcatgcgaccatgatgatttagcgagcttatcagatatttgaacaacagccaatggaagatattccactcatacaggatttgaatagatggacacatatctatatccccaactaataacaatatgggctagaagaatgtatggctagcaacactcaggagacccaaggtaatggaccatccaattcgatgccacagaatcaaactgtaggccacatggtagacgaggaagttttgccaacccattatcttgggggaatggtcagtataacatccgtccccagatagatatactaaaccaatcaattgttgataacagccaaacaaggatgcctcaaggtgaattagtcttcaatatattgggacacatacatgatttaagagattatttgaatcgcaaaagaggataggacaaaaaatttatccctcctaatgctcagtcgatcaatgtagacaactatgtgattggtaatgttgtaggggatcaataggtgacaaaggtcagtctacaagcaggtcaagttgaatcaatggtgcaagcacaaatagatcaccttaagagccttatacaaatcctaaccagtccaaaaatcactgacctagaattggactggactaggggatcacccttttcaccaaaaatcaatgcccttgatctgctggacaagctcaaatgcctacatggaaaatgtatactggcaaggaagatcctcagtcccacatcaattactttgaaatgcaaatggacttacaagcggtaaagggtgatgtacaatgtagaatctttccagctaccttggcagaggtcacccaggagcagtacttcaagttagtaccaagaaaattcagttcatggaactcgtttatgctagagtttcacacatagttctcctcttctaggcaactctcagctcacttagaatacgtggtagaagtacaaaaaataccaaaagattcttcaagagattacttcagtacgtttatgactgaagccacaaaagtaaaagagttaaccgaagagggaagatgggctaatatcctaggaggaattgaaacctttagataattatggaaagacatcaaaagacttactgtagggtcaaggagagagtttctggactgagtagatggatttataaaggttgaagaagcagttcgacaagtagatacagtttgatagaaaagaccaataaaagtcacaccactactgccaatacatctgtccagactcaaaactctcatcacaataatagcagttcaggtcaaagtggtaaaagatcaaataatggcaaccaacaagtcaatggaaacaaaggtatgtttagcaataattttgaacaacatcatcctcgagagaaagctccaaagtttactgcctttactatccttactgaagagatatagaaaaactatcttcacgatatcttagaccgtggtgccgtacaaaaaaccccctctgatgaaaaaagatatgagcaagagggataccaccaaatattgttgctttcatgtggacttcgatcatgatacaaacaagtgcaataatctaaaataagaacttgacttcctcatcaggaaaacaatccacacttacaaaagtacattaaggccaaccaagatgaaagggctgcccagccaaataataatcataaccagttgatgcccccactcgtggatggacatctacaagtgattattggaggccctcacattactggagactcaaaaaaagattgagagaggtacgctcagaccctacaatataaatagaaagatgaagttttagttgtagaggaaagaaagcctaaacatccatgtgacaagaaccaatcattttattcggtgaaaaagactctgaccatgttatttatctacacaatgatcctctagttgttgatgaaaaaattgcgaataagactatgactcggaccattattgacaatggagcctcttcaaatattcttttcaagacgacatatgagaagatgggccttcaacccattgatttggttccttgtacacagctagtgtacgacttctttagccagagaattgctccactttgacatactcatctactacttatagtagggaaagctctaacaaccacgactgtaagggtccaattctcgataattgatgttccttatcttttaatgtcatgttcggtcattaagccctatatgacttaaaggtagtcactttcgtgtatcacttatgcatgaaatttgcaacaatgaatggggtaggttgttttagaggaaatcaaaggactgtacgggaatgctacaaccttgctttaactaaggccaaaaaagaagaaacattcgacaaagttcaaagaaaggtaaaagtattgccaaatagggatccacccagttgggaacgaagacatggttccccaccttggggaaccaagtacaaatattaatttggtcaaagaattggaagaagatgaaatcgatcctactatgctaactaggaaactcaaaattggcaaagttttgttgctcaaaataaaattagctttgataaaatttttatgagtaaatcttaacatttttcctggtcacatgaagacatggtcatgattgatccaactgttatttctcacaccctcaagatcgatcccaacttttgtcccatcaagcaaaaaagtagactaatagataaagagaatgcacaagtactaaaagaagtggcagaagcctccaaacaaatagattcataattggggccttctaccccacctgagtagccaaccttgtacaagtgcccaagccacagaaaaaaaaggcaggtgtgcattgatttcacagacctcaataaggtgtgtctgaaggactgttttccacttccaaggatcgactagcttgtggatgctaaaccaggttattagatcctaagcttcatggatgcctacttagggtataatcaaataagaatgcatcggcctgaccaagaacacactagcttc

SEQ ID NO: 70420 - DNA, 1719 bp, Cannabis sativa
attaactataatattatacaatatcttataggtaaaaaatatcctccaaataagtactatatgtaatgatctatatacattttttttattttatttagatggtcatgagagaaggcctgataaaaaccaagttatatacattccacgcgatgaacaaatcaatcacttgaagacggaaccacggccatcatcggaggcggttgctaaaataattacgacattgtctgaagatgttactgtaaatgatgataactactacggtagcttcagagaagtacttgcgttgtttcagggtacaaaattacctgtccctggtgtaattgaagcaggtacctacatacatacgtaatataattacatgcatgtatgtatttatataaatatttattaattatttttaatttcaagttttcaataatgattttgagtatatgcatatttataggtgatgaaaatgcatggagagatgatgaagaatttggaagagaaatgattgctggtgtccaccctctccacattcgtcttctcaaagtaattacattttattattttattaaaaactaagcaaatatatatgtattataccatttattttatttaaattacatatagtaattaattatttacattacataataattactaaattttgatgatgaattcagaaattcccaccaaagagcaagctagacaaaagaaagtacggtgatcaagatagcaaaattagtgaggacgatattataaacatgttggaggatttcactagtgtagataaggtatatacattaatcatgtctattatattattcatcttgcatttaattaaatgaggattgttatttggtactttaaggtgtttaatttttgtctgattaaatatatataaatatatgtataggcgatcgagcaaaaaagattatttatattggatcaccacgatacatttatgccatacttgaagagaataaataaaacttcgacaaaggcttatgcaactcgaacaatcttgtttttgacaaaagaagagaaattgatgcctgtcgccattgaattaagtttgccaaaagatggtcctgatgaaaacggtgcagatagcacagtatttaccccaccatgtgacaatgatcctcataaatatgccacttggcaactcgctaaaggttatgtagctgtaaacgattcaggctaccatcagctctacagtcattggtaatataacacatatttcaatttaataactattatgaaacaaaaaaacataacatgccaatcatgatctcacacaatcaattgatttacaggttgaatacacatgcagtgattgagccatttgtgatagcaacaaacagacagctaagtgtaatccatccaatctacaaactattgcatccccattttcggggtaccatgagcataaatgcacgagctagaactattcttgtgaatgccgatggaaagatagagcgcatattttttcaaggaaagtatgcaatggaatcatcgtcagccgtctataagaataattgggcatttaataagcaaggactcccagcagatcttattaaaaggcaagtactagatagctagtccattatctataattaattagcttaaattacaagatatattttactaacattatgtaatattattctatgaatctacataggggattagtagatgaagagactaaacaaccttgtgagctagtaaagaact

SEQ ID NO: 70421 - DNA, 2038 bp, Cannabis sativa
tgttttttaactgcttaccaaacaactttttgtcacagcttttttgaaaagcagcttttagcttttctaaaagttgcgccaaacgggccctaagagaatatgaggaatgattaaccgactaactgctcgcatttctcaatattaaacgagacaccaagatgcattgagataatacttaaatctaaaacatgaataaaaggcctaactattcatataagcaatcaaaaatatacaaactaattcacgaaatgaattataaaaagtatgtttaagtttgcttaaaacaaattataactatttatgcgaagcaagagcactaaactgctcgtaaattgaaagcatagcagacaatgactgctcgcgcatatattaataactactcaaacaatctcaaaagaaaatacaagcaatggaaagacttaaagtacttaaatttgatcaaaatataattgtttaagttgtgaataaaaaaaacacaagtaaacaaatgtgttaagttcaaatgcaaaagtacgaggcattaaataaaagataaaataaaagcaaagttggccatccaactttgcaaatttgtctttacaaaaagccacaaagggaaaaccattgtctcgatcgtatggcaattttcctaaaagtaaaaaaaaaaatagtagatgattaaaaactaagcctacatagtaggaacttggatagttcttctttctcttattctcttactgcctcgacttctttttctacctttttagcttgctcgtagtaatcgaggacttcctccatgccctttcccagaaaacttaaatccatttctggattcgccatccaagcttgatagatggagcatttggcaatggcattgcattgctccttggtgtcggcttctttcccctcgagtgttgcattggctgcattgagttcctcatggagtttctggcatagctcggacttgtccttcgcctccttctaagcagcttcaagttcagctttgttggccctcttcacctcctcgacttctttatttaagcgagagatcttcgtctgagcctcgttccattccctggacacgacctcgcattgaccaatcagcttctggatctcgttctccagttgcttcatcatgtcaagaccccggcgttgggcgagaaaggagatgaaagtttgcttaaaacaaataaacaaaaatgcaaaagtattttttagggttgttaaagagagaagtaaagcgagaagaataaagaaatttaccgagaggccaaaggcaacgctcctctcgagcatctcgttcaggctgccattatttctcaagtcccagtcattgggaaggaaggaccggaggtgacgccaacaagccacaacgtactgtacacaatgctttgagccagcattcccagcctcgatgggcagagtctcaggcgctttgctcgaagaggctgcgacctgatttgctttgggaatgggctctttagtatgtgtgagggccggagggtgagtctgaacctggttctcaggggcctcgaggtcaattgtctgtgaggcttgcttcttgttggcagttgtcttcctgggccttttgaggggctccacgttgatatccgaggaagtttccaaagctgtcaaccttttctttcccttcttgcttgaagaatgaagaaggtcctcgagatccatttctgcaagacagaaaacaaatgtgttaaatttgtttaaaaacaagtaaaaggggaaattgggaaattatttcccatctaagggatttacaataatcataagaagatgaagaaggaggactataatattcactagaatctggacatcctgtgatcctgaatatatcgtaggaattaattagttctaaatcccagctctaatctatatgacctgacctacccagcatggtcccatactgctcggctatcccatagtaggagttagtacaactaatttgaacgtggaattctgggtaccaactatcatactatgtgcaatgcgatctataaggaaagggttccacgtgtagaaattatactggctatctcgaaaa

SEQ ID NO: 70422 - DNA, 1417 bp, Cannabis sativa
  modified_base (27)..(67): a, c, t, g, unknown or other
  modified_base (1373)..(1389): a, c, t, g, unknown or other
aacattaaatgttatttctaatctatnnnnnnnnnnnnnnnnnnnnnnnnnnnnnnnnnnnnnnnnnagggcataaaacccaacagcctttgcacccgtatttcaagagagttgcggactatttccacctttgtctgaccaagttcactcccaagggcatcaagtacttatctgccatgtctgccatctacgccactcaaggatggggtgtatcgtccacacacgacatcaactggcttttttatttgaagtttacctttaagcagagcaggtcggggtacttctacacttctctcagccggacgacaagtggctgatgggcaccgtggacacggaggttagcaggattgggggttttgttcatgagtactaccttgtggagggcatggagacttcctatactcgatttcaatagatccctatgtacggccgtccacccttcacattgggacttagggaaagggcccaaaaaattctcgagctgccggatgctgcttgatatatcactcagttgatctcagaggccaactttgtgaagtacaagctttattcggtagactttgtacccaagtgtgtgaaggggaagaagaagaagtctaggtctggccaagctaagggagctgagcaagagaaggagctaattcaacttaagcgtgaggctaagttgaagggtgatgctggagccaagtagtatgctgaagaatattctgagaaggagaaggaagctcaagaatattcagaacaggagaggccgctcaagaagaagaaagcccttccgaccgagcagaggcctatagaacattctatccgaattagggagcctggcttgcctgctcagctacctacccctgtagatggaaaaggaaaagccatcctagaggagtaggaagtttctttgaatgatgacgctccatctgtgcttgtttgggcaaacgctcgtgccagcatgcagagtacttcaacttgcacttatttttcttgattcttatgcctgcatatattttaagtatctgcttctgactgtattgttttttctgtgcagaaacgtctcagaagatgattgaggttctgaaaaagagagtagggggagctcgagcttgttccctcggccaagaagtctaaaggtggcgagactccatcaaaagagaaggcaccagtcgaagaggtcattaatccctctaaggaacagcctactgtggatccttctaccttgaaggtcaccaagtccaaaggttcccggggagggagttttgaaggagctttcacgagtaagtcctttcacacacatttcttttatttctctattggataattcatatcttaatgtattttttgttagaaatttattttaacaggatcttagatctactcannnnnnnnnnnnnnnnnaccctaaatatgaactttctaacacgat

SEQ ID NO: 70423 - DNA, 2715 bp, Cannabis sativa
tgacgttggataaagagcacctcaggggatccgtagccgccgtacactctgtcctgaaacacgcctcgtgtcccaattacgtcttctttcacttcattgccgccgagttcgaccaggtgagtccccgagtcttggctcaactcgtccgatccactttcccctctctccggttcaaggtctacatcttcagagaagacaccgtcatcaacctcatatcttcctcgattcgcgaagccttagagaaccccttaaactacgcaagaaattacctcggcgacatactcgatccctgcgttgaccgggtcatttacctagactccgacgtggtcgtcgtcgacgacatccacaagctctggaacataacattgactgggtcacgggttatcggagctccagaatactgccatgccaacttcaccaagtacttcaccgacggattctggtctgacccgcttctttctcgagtatttgggtcccgtaaaccctgctatttcaacacaggagtcatggtcatggatctagtgaggtggagagaagggaattttcggaagagaatcgaaaactggatggaagttcagaggaagaagaggatttacgatctgggttctttaccgccgtttttattggtcttcggcggtaatgttgaggccattgaccaccggtggaaccagcacggtctgggcggtgacaatgtcaggggaagctgtaggtccctgcatccgggtccggtcagtttgcttcactggagcggaaagggaaagccatgggtgagactcgacgagggcaagccgtgtcctcttgatagtctctgggagccgtacgatctttacaagccattgtaccatcatgatcagaagatgggcaaagacgctgagcttctgggctcaacattattgccctcgtcttcttcatcaagattgaacggcggtgggcgttcgagtttcttgttatgattattcttctcatgattctttcatacagttgatttttcacagattcttttggctgtacagattggttttagagatgggaatttttttatatataaattttttcattgatttgatcatattttgttctggtgttttcccccttactttacatattagagatatcaaatactcctattttggggttccagttcttggaacaattcggtggtttgatttctttgtatgcaattttggaaatgacactctcattgtctttattattattatttttcatttttgttgtaaaattttcatttcaattcttgatttattaccgaattcgcttctcacttataagtataccccccttctatactttctaattctattgctatttagtttaatctgttctaaaataatggtaaagctaatgagtagatagacaaagtgcttatatttggtgtcgtattgctattgtttctattttggtgtttttcgtaaaagagagtctctttagcaaaaggtattattaattaaaattgattatatttttattttttctttaaagagaaaactgattacattttgacaaggattggaagcaaagataagtattatgtttattgaagaaaataaatgaaaaatcaataaagttgaatggaggagaattagaagccaaatgttttgatgttagagttccagctcacccaggctcacgggcttttttgatgttgtgattcgggcaaggtgacgaatcctattgtcaacaacttgtgggacccagttcattttattttttccaattagaaatgtcaaatatgcttttattttatagaatattttgtgtcgtggccgaagttaatgttatatattataataaatctttctattttataatgtctaattaatatttcatgtcgtgaccgaagccgaatatttacacgtttcatggcgtgaacggtagaaagttctgtggtagactgccaagtaggtaggtaaaggttcattattattcctaggctgcctgcctagtcacatgaaagaattcagactctcttattgaaacccaacaaagtcatattgatcatcttcaatttggtcattgagaaccattatgaggttcagataacagattagttcacatgcctaactattcattcaagagaccagacatgtctcagggttcagagaaggtgcatggtacttattgaccagccatatggaacaggaatagcatcaattaatgcaactttcattgaatttgaactataaactcaactctacccattttttagagcatttccaataaattatattttagcatacttaattattaattattgttttaatagtgttctaaaaagtatgataaataacaaccagcaactagggtcgggcttcagagaggggacgatggggaatcgcacgtaccagggagatggaaatctcagagttacaggtggttatggactggtcgaaaatcaagagggaaaaagtgggattgatgttaatgagcctatatcaaaaaataattttaaatttcaaaaagagggattagttgtttatgatactaagaggaggcgtgtggaagagggtatatgtcagctggaggaaagtttgttgggccaagaaagtgagagggagatattgggccgaaatgatatgtgtaaatggaggggaagatactagcccattacattgggctgaaggagtgataaatgtggatatggacccacaaggtgaccacgtggaggaggttaggaatagggaaatttacatggta

SEQ ID NO: 70424 - DNA, 960 bp, Cannabis sativa
atttatgccgcaatttacccttaggaaaattatattatattacattttttttctaaggaaggtagacaacagaatttgtttaaccttaaaaaatatgttaatgctttatgcacttctactgcaattttttcttctgatgatttaattatcgatgtctcttgttttttttctttttttcctaaagtgactttatcacatgttaagtgtacagttaattcagctgctcacaatttagctaagtttgctttagggctagaagaaacttgcttttgggtctgggatcacccctcaacctatttactctcttgttgtatgtggttatcagtttaatttataataatagtgtttactctcaaaatatatatatataaaaagaaagtataattacataaaatattaatttttgtaaaaaaattacatttttacattcaattttttatatatatttttcactgtattttataaaaacacaaaaaaaattacatgaaagtaacaaaaaaacacatcaaaatagcataaaaaatcatatacaaataataaaaaatcaataacaaaataataataatacaacataaaaatatatcaaaaaactgtatttttcataaaagtaatttcaaaaaccgtataattatttaaaattttgtccaatcgtatttttataattgttttgttgtttttgtgtatttatgaaattattcctaaaaaaatttataactgaaagtttaggaatgtattttaaaaaaatttgtaagggaattgtggtcttaatgtacactacttttttttttctctctttttcttataaaaaatctaattttaatctttcgcacaaggctttctaattttatcttattattaaatttttcttataaaatttaataataagataattataattatgaaagtcagcaaatgaacatgctaactaaattttagtaataaaatattaaaaatagcata

SEQ ID NO: 70425 - DNA, 1040 bp, Cannabis sativa
tagttcaagagaatttttatacaaaaaaaaaattaatagaatgtgattctgcaaattttataatttaagagaaaaatttaatacaatattacaaatttaacgaacgcatttcactacctatactatgaaatttgtatttcacgtgcgtagcacgtggttcaataactagttatctttctaattgtataattaaatgtcccaattctatttttccaaaaataaaagaatatgtacacctttctaaaattttatcagtttacttctctttatccatttgtaaataccttccgccggacaaaacatagctctaatgctcaaccaattcagtatgaagcttacacactgagcactaaaatgaatgacaacagaaaaagagatgattgtgagactcatctgtactcatgccacagatacaacaacacatatccaagtctaacccaaacttgattagtctatatacacaaccggttgcagatgtcagcaaaagcaaactgatcctgctgagaagaaaaaaataccttatgagtgtttgccatggagaatgaatccttttcaaaaagatgccttacaatttttgttttgattacatattttgcctttaccacttgcctctagtaccagctactatcaggagtagctgagtactcccaccagtcttcaccttttaagtaaataattattgatttttatgttccataatagagttagaaaagcggaaacagattttattacaaaattaatttaaactacatgaaaattaaacaaaattcttgtagcttatcaggggatcctcgattcttctcgttaacaaatatcaattatccaatccattgctatgaacaataatgaagacttcacaccatagtcttttagaccaacatcaacactcaaaataagagtgggcttataaaaaagaatttctatcacagtatctacttaactcatgagaaactatgattatgagataagaaagagaatctcactaaactagagagagagagagagagagagatgtagtgtgattcaggtgagtccttgat

SEQ ID NO: 70426 - DNA, 4264 bp, Cannabis sativa
  modified_base (4197)..(4221): a, c, t, g, unknown or other
acctaaaaaatatacaaaaaaaaagaagaaaaaatagatctggttgttggtgtaggttggatctccatgaatggcgactcgtctattgatccatggcagagcaaaacagagattagaggaagaagagcacaacttgggtctcgtctagtgatccacggacgtgagaggaagctgaccaaaacccatctcgcacaatttagtaccattgatcctcgcacgattccaatcgcacctgaccaaaactcatctccttgttgcatcaacggagacgagaggaagctgtgcagcaacattatctgccaagggaaagaaagaagaggcgagaagaagagagagagaggagaagaagtagaatattattagggttttttatgaaagagaaagaggggttcagaccccaatttatttatcttttaattaataaatatttatatttttggtcagtttttatggagaaaaagaagctaaaattataggaaatcgtgccacattttagtattttatatttttttaataattagggcttattattaattattttttaaaaaaaataaaagggtgtatggtgacacgctacgcgtgtgagcaaatttatttgccaacaggttgggaaacagatttgctcacacacgtagcacgtctctataggctatggtttttttatttttataaaattataaatttttggttttagcatttagtgacactccatatttttagtgacccacatttcgggtgataaacaccgaatatttagattctaattgtgtgtgtcactaaaacctactcctaattttttagtgacccacacttttatgcgtgtcactatatagtgtcactaaaagtctaatttgtagtagtgcacccttaatcaaatgatcaggtcgaaggagtcaataagacacttaaagacaccattaaaaaaagacttgaagaagctaaactggccagaggaactactagaagtattgtggtcatatcgaacaatcgagaaaataacaactggacaaacgccattctctatggcctatggttatgaagctatgttgcccgtagaattagaacctccgtcccacaaaatattggcctacaataaagaagctaatcatgctctcctattataatcacttgacaaaattgaagaaaagcgagcctcagcaaaccttaacttagtagcacatcaacaaaaggtggctcgatacttcaacaagcaagaaagtaaggaaattctttgtgggagatatggtcctcagaagagtattcctgaacacagaagatagcatagcttgtgtgctcagaccgaattgggaagcaccgtatcaggcggtcaaacttctataatcaggggcatacaaactttggatgtatgacaaaaatatgaagctcgttctagtaacaaggtattggaacggggaacatttgagaaagtattacaattaaatgtaccaggtcggatgaccactttaggtacacaaagcaagaacatttactcttaagtagatggccttctggacggatcccgtccaaagatttggatagaatagttaagtactcaagtcagatgaccacctttaaaagtacaatttctttttataagtgcaattattttatgtttaaattagttaaagatcagattagatcatataatagctttatgaatctaagttactacggtaacaagactttctgaccaagaaatcaataaagatgtttattgaaattctaattgtgtcaattgtattagcgagttataaatttaccataaaatgtgtacaaaggtctgctctacccaaacagctgaacagacgaaaaccatacttgtgaaatgcaaatgaccaagagtaataagtcttcttggtcacttaggggaaactatacccttacaaagcatcggtaatagtaaataaaaagctaaagaaaaacataatagtttgcacaaataagtatcaaaataaggggaagtattcattacaaaagataataaagcacggtaaaccaaggattaaaggctgctcggtcatctagttgtttcaaaaccaaatgaaatatatcccaagtttaaaaaccacttggccgatcatttttgtctctaataaaggcctaagggaagaactgataaaaaaagagaaaaatgtttcaaatagcagaggttccaggctccttgtacggatcagctgggtctgaaggggccaaaggctcaatatttttaaggtaggggtctcagtgccttggtcagttggagctttggaattggctacctcaaggctttctttggttgtttgaccctcatagtaattaagatatgcctctttggaatctttgaggtaaataaaattgcctgatgggttggcattccgaaattcatagaaaacatccaaggcaactgtttctaggttttccacctccttcaagagctcctcttccctcgtcttcctagacatgacgtcctcttccaactttgaaagaagagtgtggagactctccctctcatctttgagcgtattgacatccttggataaggcatcattgtctgcctcgagcttggcgattgatcgcatttcataaatcacctgatttagctcgtcgaccaagttgttggcggtaaggagcttattgttcacctctctgagctcattcctcacgtcctggactttcttgttggcggcatcctcctccctttgcaatttgttggtggtggcaaggttctttgccaccatggatttggcgcgagagtaggcgtaagccatcttcatattgacctacatagaaaaaagttaagacctgcatgggtaaaaagataagataaaaacaaagaagaaaatatttccccgagcttcctccttcaggactccatccattaccacccccaacgatagcccattgtcttccccaaacaactgatcgctcacctcgcgaactgaccgatcaaggtagtactggagcatgccctttcccttcttggcctctgagcttagcaccacgacgattgaagaggccttcgttggatcggatccatctgagctccccctttaaaactcttggacttagatactttctgggcttgagggtccacaacagacacagcctcagagacgttgatcccttctctggccggcaccttcgccttggatggagccttatcgacgcgagattgtttgggcgggggagtttggcccgaactgtcaccagtcctcttcttaagagcttgcaacactttctaagacatgactacatataagcaaaacaagaatgttagaggcaaaaatcatataagcatgtcatggaacaaatacatacaagttaaaaaatcctgcacatgggcaggagcattctcgcgaacaagcaaagaaggtgcctcgccatcaaaagagtttgtctggtcgtgcttcgtcaggatggtcgttccttttccctccactgaggcgaatggtcggacaggcctatcaggttccctaatcctgatagcacactcaactggtgcctgttcactcggagggaccttcttcccttttttgctcagtttttccaaaactggccccctgtcccgtttaggttttgccttcttcgtctgcttcatgggcctatgcacaaaatcttctaggaagagtttgtacttgacataattggccttagtggcaagaagagtaatgttttgagcatcatctggcagttggagaattatttgtgccctcttcctgagccctaatgtgaagggagggcagaagtacgacggtatttgctggaactgagtgtggacggtttccatccactacaagaagtagtactcttccacaaagatccctatcttgctcaactcggagtcacggttcccgtcaatcacttctcctggatttgagaaagtagaagtacctcgacctactctgcttgggagttgattttagattaaagagctagttggtgtcgtgcggggatggctcatcacatccttgtgaggtgtagaggatgaaaatggcagacaggtacttctcaaagtaaactaggtcggacagaggtggtagtaatctgtaattctcctaaagtacgaaagcaagggaaacatagtaccctgcttagggtgagcatccgaccaagcgcagtacccctcccttagattggtcatcagtgttggaaatattttaccaagatctatatttacaaccatgtctgtttcattcacatcctaatatgaattctaannnnnnnnnnnnnnnnnnnnnnnnntttaggaaaccttacatttggtgcagcgaaatataatgactcc

SEQ ID NO: 70427 - DNA, 2026 bp, Cannabis sativa
ttctaacataagggcccaaaatttttttttccctatggcccactttgtttcagggccggccctgccctcaatcaaaagttttcatgagaggtcaagcattgagcttaaaaactcaagcttggctctcactctaccacaactgcaaagctaccaaaagaatgctaaaaaatgcttttattcaatcccagaatctaatccaaagccttactcaacccatagcagctacagaaacaaaacacacttctaaaacctaaactttcaaagaaggaaaagagaaccaaacccttaccttaggcctcctttcaagtttggcttaatctagctgctaccaaaggcatgaaacccatatcagaacagaaaaaaacaaaaaggttgataatggtggtggcttgttcaagagaaaagaatgagagggggaaaatttgttccaactaaacttgttgtgatatttttttcctccgatcgtgtctccaagatcgccaaattggaaaatatttttatttcaccaataactcacattatacccatatattccaaataaagctctgtaattaataaattatgcttatttatccacttatggaaaaattcatatttatgttaaaatagattagtaggattataatctcactcatcactaactgattaacccataatataataataaacacttaatattcacaattaggttttttgggatattacacattaaaaccaccatatcgtggcttctagacaacagtttcgagaaggcagtagtcatcttttattaattgagcttgattttcattaagaatgctaaacacaagaggactttgcctaaaagctcgatctctcaaatcatcactctcaatggcagctttaagaagctcaattgccatcactttcccaccacgcaccttgtctaagttcttagacttgggcatagttagcttagatcaattgaactaagccacatgaggttcatactcatcatgaaaccttctacttctcttcatcctagccatgacagctccacaatacaagttgcttatggcccaagaaaagtctaatttagtttgagcaatttcggaggaaattttcaaggcactaggaaagtattttgaaatttggagttgttagaaaaaataattcaaaggtttttggagctgattccaaggaaaaaaaatgtttttctaccttagaatgaagaacacttgaaggcttgatgaagatgagatttcaagaggctctctaaaggcttttgtgtgttaatttgaaatggagaagtataaaattttaattgacaactctcttatttatatgtgatttcaatctcctaatcctaaagctaatgggagtcttttacatttaaagcttttaaggaagaggtaaaggacaagtaaaagacataattatatcttcccttctcgttccaatatagaattcaaaatttctatacaattaggagtaggaatcgaaatttaaaaggtaacatcaattcctaatgctattaagattaaggaaaatcaaagaattaaaagaaaaagataaatgataaggaaaagattaagtcttttctcttcttctcttctttttttttctctaattttttatttttagtgtcatttacaactaggattaggatttaaatccaattaatcctaattgcatgacaaaaacaagaaaaatgtaaaagataagttaaaaaaaaaaaaaagatatatttttttctctttttctttgttaattaattttcaaaattcccaagaactaagcaaaagagttcaaagtcctaattcaatgggtaatgcatggataaaaaataaaaatacctaaaaatttcgaaattaatgtccatctagtagtttcaagtgaaacgggcttggttcacgtcaacaagttagctccacacaagtgtaaaattgactaggaggtaaatgttaacccagaaactttccatggtgatatggacatcaatatttgaaacgtggaaagaaggatgacatcatggagttgagtagacccgagtcatagcagtcgacct

SEQ ID NO: 70428 - DNA, 2318 bp, Cannabis sativa
acaaagactatataagaccaatgactgcatatagatgcaattacagaacgacaaagcacttgaagagtatttttttttttttctattttggtaaacaatgaaaaaagagaagcaactagcaagtaaggaacttagtgatcactcatgagaaatggcaacaatttgttttccaacgttgcggccaagaaagaggccaacaagagctgcaggggcattctccaagccttgaacaacatcttccacatacacaattttaccttgtttaattgaaggtagaataaattcaagaaactttgggtagagatgatagtagttagtcactacaaatccttgtaatcgagcttgtttagtaataaggttcattaaattatgaacaccttcagggtactcaagattgtactgtgagatcattccacacacagcaattcgagcattgagtctcatattcaataacactgcatcaagcatctttcccccaacattctcaaagtaaatatctattccttccggaaagtacctgtcatgacaatattcaagttttattctcttttcattacaagtttacaatgattaaaaactatcatcaacctttttaaagctgcatccaaatcagcctcttctttatagttgaaagcctcatcatatccaaacttgttcttcaacaaatcaacctttcaaacagtaacaagtaaagagagcacttagacagaattttatatatatgtattagaatttgggataatgtgaatgaggttggagtaatttatcttatatatcacaatttattttcacacattagtaatgtgggactaacactggaaactggcacacattggccgaaaggttctaaatgaaggttaaaggggagactaccatgttagaatttggagataaagtaaaccaattagcaatgaggagagtagcccattcatcttatatatgagaatttatttccacacattagcaatatgagactaactttaataatacgtagtactatatatagtcaacaatatatgcaattatactcactttttccttggttccagcactgcccacaacatagcaaccaagcagctttgcaaactgcccaacaagctggcccactgcaccagatgctgctgacacaaatacatattctcctttcttaggagaacagagctcatagaaaccagcataagcagtcataccaggcatacctatacatatattcaatgaaattattccccaaaaccaaattgattaatctcacagatagagaaatcttaccaagaataccagcatagtaagagaggggaacatcagtgtcatgaattttgaaaacagactctgttgcatttataacactatattgctcccatccagttattccccaaaccaaatcaccttctttgaactttaaatcccctgattccaacacttcagccaccccaaacccactgataggctacaaacaaaaaaaatgggttgatatattaatactcaaatgaattaagaaatgtgacaaaagaaccacaatgggtgactcactcaccgaattgggcttgaaagattcagcataataagtggggtcgagcagcttcttcatacggtttcgcatataaggatcacaggaaagatagagattcttgactaagactccaatggaaccttgaggaagcttgaggttgagagtagaagtggttgttacatacatgtctgattcttttgggtaaccacagacatagtctctcagtaacacttgcttgttcttcacttccgccatgagaactctcttcttctctttttccttttttttttttctgaataaagattctgtatatagtatatatatatatattatatataagtatattgttgatggggaaatgaatcatgaatgacgtaaatttcgaagtgaaattttatggaatgtgagtgggaacacgtggcggaaggagatttgattgtgatttgtgaatgcaaagaaagaaagaaaggaatgaaattagatagagcatgctttcttttcgggcggaaattgatttgtcaattgtatgcattgcatgcattcataccattttggaattattatttatttatttatttatttatttatattaaaaaatgaattactctctataataattattattatttgaaaatcattatttcttaaaatttcttaaatgttctctatctaatatcaaaaattatttgagttgagaatgtcataaccatacccaaaaaaaaacttgagaatgtcaaaaagagattatgactgtatattacttgttcttacctgcaaagattatagtttaattctatattgaccttat

SEQ ID NO: 70429 - DNA, 2957 bp, Cannabis sativa
  modified_base (258)..(258): a, c, t, g, unknown or other
  modified_base (2552)..(2564): a, c, t, g, unknown or other
cttagcacaaatataaaaaataaagggtaaattgtggcataaatatttaatgtttcagattttatacacttaaatacctaatgtttatttttgaaggcaaaaatattacaattcttactactattttcgttaacttataaatatagacatatggagagttcagatgcattacatttatttttattttattttaaaacttaatattcttaacatcaaaaactaaatgctactgcctaaaaaataaacattaggtatttnagtgtataaaatctaaaacattaaatatttatgccgcaatttacttaaaaataaataataaagcctgtcataaaatataaaaaaattatttttaatattgtaaattattgaaaatttttaaaaaatatataaatactcttaaaaaatcctaatatacaccaatatataaaaaatagattaaaaaacttttttaaatgtcaataatcagttgtatattggggttattgatttccaatagcaagtaaagataacatagatattcgtgtacgtactaataagtagagagtagtagtatagaatagaatgaaaagcgtacctgttatgaacttatgagcttcaaagtctttgaaagagtgtatgagctgggttgagaggagtcattgatatatgtttatataagaaggagagtctgaacagaatcattctgtgggcgcgtcaacccgataatcatgacgagacgagaatacctattgcgtacgtgttacacattaattgaaagtcccaatgaaattttctacaaatttaaaaattgtattaatttgttaatttctgctagaagacatggtgatagtttcaaactcattgagtggggagaaggaaacaggaaatttaatcaacttttctagggaaacttcatcaatgtttcatcaactccactgttctcttgagctttttatagagaaatactggtgtctagtacttttcctatttgtcagtatcactattggtctaattaagtattgagtcccatataatttaatataataaattttaagaaatctcgctaaccaatcgcaacatgacatgaaaatagtacctaataataatattttttttataagataaatggtaaagaccatcattgtatggttagtatttttaggggatataatattattattggtgtgtaatttaatattaaattttaataaaaattataaaaaattattaattaattataggataactactagattagtacactacagcagctcttttattgtgaattttttataatttcattacacataatattgtgaattttttagttattagttaaatacaaatttcatagtacgggtagtgaaatgcatttattaaattagtaatactaaatgtttcctttgaattataaaatttacagatttatattttattgttatttttgtttttgtacaaaaattctcttaaactataacaactatagcaaatgtctttttattagatttcgttcatttttaaaactatttattaacatattactgatgttccgttaatatatatggtgtgatttaaaagtcttataaaaaatacaaacataaattgtgctctaaagataaaatttaagaatattttaagagttattttttgtgtgtagcattaataaattaaatttcaaataatatcagttagataaataaattatcgtaatataaaaatattaatagaagatcacaaaagttacactaaattgtaatttttatcgaaattttttttgcaataaaacaaaaattcaagtaataaaacaaaaatttagaagaccaaattttacaactgtaatagtcatgagggacaaattcttatttatcctacaaaattgtactatatttatatacttttgccaatagtttgttatttatcacttaaaaactaattaaaattcagtcagagaaaaaatagattgtctttattgtcaacatataatagaaacattagccataattttcattattaaaatatgaaatagattagaccaaaatacttgataaaaaaaaacaaatgaaataaaataatcataattgaaaatttattactttttgtttaacaatcagttttattttaattgtattttcaagtaagatgaagttattaatactatttttttaaataattttgttagttatcattttttaatttatcaatcatatcaaatatattagattcttataattttttatttactataaaaaatcagtttatgtgaaactgttactaacgatttagttattttgtaaataataagtgtgtatttaactatttgaatattatttttagaaataaaaattattgagaaaattattagatatctactatatttataaaatatatgaaatttaaaattcatgttattgtaattatagacccacaatttttttttttttttttgaaattgctacaaaattattatcaaatacacattttcttaatcacttaattgttatacttgtattacaaaattatagcatatataatgatgtgaactttgaaaagaacaaataataataataataatnnnnnnnnnnnnnataataataataataatgtgatttggataatatagaacaaccaaatgctttatctaataatgtgtcattgcatatggtgaaaataaaaaaaaattttggtaatttaattggttaaggaccaaaatattactacttttattaaggtaatagataaatgtactactataacaataatattatattaatatttttttttttgagaaaaattaattatattaaaacagaaagttataatacaatagacattagtggaggtggaagttcctccaactataaacaattagtatccaccaaaagagcatacttttagcaagagtctgagcaacaatatttgcacacctcttgacatgagtaatctgtactccagggcaatgttgggttttataccctaaa

SEQ ID NO: 70430 - DNA, 3641 bp, Cannabis sativa
aaaaaattatattgtgactaaacagttgtcactaaaggtagcagttttttctagtgactttttaaatttttaaaatttcattattaggtaacgtatctgaaaatagatatattgtattttaccatattcttaaccaaaactcacataactaaatttgagtgcatctatatataggctggattcgtaaatttaatataaaagttttttattccaaaattttatgaaaaatatgatgtgtgaatcgatttaccataactaaaacggaaagcaatcaattgttatcgagcttaccaatcccaaggttccttctccaatctcgacagtcgcaaaataaggaagaacatgtccttgaatctgtttaccaagttaaattctagggttctcaacccaagatggttttcttggagcctacttgccctttgtcgaatcacgccggcattattggctcgcaggcttgttcgcaactttccacatcttgttggcatcacttccaatcttaccagcaagatgactgagatttcatcaaaaatggggattttaagagcttatgtcaaaagagtttaaatctctctttcggtaagtattaatcttcatttttattttttcaaaatttctcttttccccttgtctattttcttcccgaattattcttgtttgtaggcatctctcttttctcagctagctcaccaaagaggccttcagagaatcaagcaactggagtccgagctttgtacaaccgttgagcaacgtgaggttgttgcgaggcaatgaaatgactctcgagccaaaatcactcatttattgaaggaagttgaggatcaaaagaagagccataagactgagctcgatggtgctaaaaaaaggcaaaggatctccgcaaagcttatcagaagaccattgaagaacttagcgaggccaaccaaaagcttaatgaggcaaagcaaacaagaagcttgataaagccaagaagaaacttgacgagctgaagagaatgctatagccagagttaattcaatggctaaacgttctatctatggttagccaatcccaacatggatttaagctttttgggagaaggagttgcggagatgctggcctattttgagcaaaccaagaaggaagaggttgtagaggccgaggaagaataagaagaggaagaagaaccatccaagtctccaaccatggatgactttgatgtggtatctataatggagtttctagcagagaagggggccattccaattccagcaacaaggaatctacttatcatgggtgagaatcctttaagggttcccgctaaagtgagatagcccccagaagtcaagcttctatcggccttgcaattgaagaggggtctgaaaaagaagaggccaacgtttgtcatcgctcccgccgtgtacgatacaaaagtggaagagtatactccacctgaaattgagcaggtgttagatgaattcaaagatgtgatgccagatgaactcccgaagagacttcctcccaggaggagagttgatcatcaaatagagttggtgtcgggtgcaaagcccccagctaaagcagcataccgattgtctcccccagattttaaggagttgaagaggtagccaacggtgatgctagaggcaggattcatcaagccatcaaaggcaccatttattgtgcccgtgttgttctagaagaagaaggacgagaccttgagactaagcataaactatcgcaccctcaacaaagtgactgtatgcaacatataccccattcctttgatcgctgatttgtttgaccagctaagtggggcaaaatacttcacgaagttggacttgagatcaggctactatcaggtttggatcgcagaaggggatgaaccaaagacaacttgtgttactaggtatggggcatttgagttttacgtcatgccatttaggttaacaaatgcgccagcaacattcggtacactcgtgaatgaattcttccatgaagacttagataagttcacggtggtgtacctagatgatatcgtgatctacaacgccactttagaagagcatcgagactgtattagccctgccagatgtatgcaagccctttgaagtacagatggatgcgtcagattatgctttgggaggggtactcatgcaggagggccaccctgtggcatttgagagccgcaagctttctaaggcagcaaagtggtatacgacgtaggagaaagagctcctaacagttattcattgtttgcggaggtggatgcattacttgttagggtcaaagtctgtggtgaagatggacaatgttgttgttagtcatttcctcacacaaccaaaactaaccctcaagcaagcatgatggcaggaattcttggtaaaatttgacttctacttcgagcacaaggcaggacgtctgaatcaggtagctgatgcccttagtcgtaaagcagagttggcagctctaaagttgttagcgggtatgtcagctagccaagtgggtacgccaatcaaggaacacatcaatgagaacctggagaaggacctagtcacaaagaacatcatgactcttgcaagaaaagaaaagacaactcagctttgggtagaggatgacctcttgtggaccaaaggtggccgtttgtttgttctgaaggcaggcaatctaaggagggcgctgctgagtgagtgtcatgacacgttgtgggcgggtcatcaagggtggcataggatgcatgtccttttaaagcatgggtattattggacacaaatgcgggaggatgtggtggactacacaaggacctgtctcgtctgccaacaagacaaagtggagaggcacaagacgccagggttgttagagtctttgttggtcccaagcaggccatggaagagtatctcgcttgattttattacaagtctgccgaagactggagacttgaatgcgatcttggtgatcgtggacagattttctaattatacaaccttcatcccagtgtcgaagcactgtccgacagaagtgacagctcaacttttctttaagcatacagtaaagtactggggaataccccagaatatagtaagtgactgagatcgaagattcacggggaccttatggttcaaactatttaagcttcttgtgtcacaaatgaacatctccttgagctaccatccacagatagatgggcagatagaaagattcaatgggatgttggaggagtatttgcggcacttaatgccaaccaaaaaaattggccgcaactactagatttagctcaattttgtttcaactctcagaagagttcttcatcgaacaagagctcttttgaagttgtgaatggacagcaaccattgttaccccacatagtggatgagtaccacggacagaatccgcatgccttcaattttataaaagactggaagaagaatatagagattgcccaagcatacttagagaaagcctcacgaagaatgaaaaagtgggcagatcaaaaatgtcgaccgctggagttcaaagcaggtgacttagtattgatcaaactgcggggtcagaacaattgagattccgaggggacaaggacatccttcatgtcagcaacctcaagtcgtatcatgaagatccagaagatccagcgcgcaaccagtctaccagggacgacatcagca

SEQ ID NO: 70431 - DNA, 2194 bp, Cannabis sativa
tacatgtcaaagttcagagggcaaaaatcctaattagcctttaattaattaatccactccactcactcaagcaagataaagcttatctttttggtcttaaaaaagggttaataattgatcatttcccaatattgcttttccacacatatatcttttgctctaaatctaaacccacctctcattttgatgcactcataagtcataaccaccaagtacacattattctttgattaacaaaacctataacaaatataaatagataatagtttaactaaataatatttctactatttcaattacaaaaaggaaaacaagatgaaaccctatgtagatatgttatttgtatgtctcccactacaaaatttgtgcacatattcactaacattgctaaaatgcatattggagtgtcaaaaacttagaacataacaacatattattatggggaattacaaaaaaagacttttttatgttctctcaatccttttatcccctatgcaaacaacttctgttcatggaagatacatagtagaatatatacaatatggttgcgagcatgggtagatcaacataaaggcaagaggaggcaatcactcccaaaaaaaaatcgaaaaaaatatatatgtattttgattaattataacatatatatatgtgtaatttttttttttgaatgaacatatatatgtaattaataatgataaaaacaaacataataatagctttgacatgttggttaagctatctcaacacatttataaaagtgtttaaatcttagtaacaacatctttagttttaatatttagtttactttttgcaccctcccttttcacaaaataaaaaaagtatgccccccacaattttagtgttggatccctcactggttgcgaaaaaaagaattcactccatagataataagtgtggtaagaaaggcaacacgatgatcaagctaaatatggaaaaagcttatgattaaatagatttcgatttacttcggtagttttgtaagtcttggcaattggcatccaaccttctttcttagatttgattaaaaaaaaaaatttacacaatgcacttaaaattagatatttttttttacattgttacggattctgtttttttctttttttgcaggtttttcatttattttttcttttttagaaaacattgttttcatgttgatttttcgtagcagcaacgtgaaaacaacggaaaaataacacttcatattttctatataaaaaaaaataaaatccatcaaatatatataaaaaaattgtacattcataaaaatgtaatttttttttctttttgtgtatttatgaaataatcccattaaaaatataaggtatttatgaatttttttcccatctatgtattattgtgccttatgaatttttcaatctattaaaaatagtcttctaactattcactattgatcatagtgttgtaaattgattattttattaagttttgttacacgtgatgaataaaataatgatgtgtcatgtcaacgctacttatataattaatttgaaaaaaataatatagaagttttaatttaatattacaaattttttcaattaatttttaggttaatgttcttttaaaaatacaaatataagcacaccatcatttaatctgccacgcatgaccaaatctaataaaaaaaaactatattacaatgaatagtttagaaactattttcaactgactgaaacaaaatactaaaaattttgtatagcccatctcatatacccatgatataatcctgtttgggggaaacaaaccttaagaaaggcaaacatataatgaaaagcatgaaaggagttaaactacacttttacaatttgaccacaaatatatactaataagtagaaaatttattactttttaacacatcaatgtacataaccaaaaacccaaatttaagaagaaaaagaattggaccattgttaaaaaaatggtaattttaaaaaatatcaaacaaatatgggcctctctggactgggcagagcccagagctgggcatggtaaacaatctatgaaaggaaataaatcaacaaaaaaattaacaaagcccaagcacatgcaatatcctgaatttatctaataataaaggaataattacataaggcactattttttgtaaaatatctacaattttacgtttaaagaatatttttttttacatttt

SEQ ID NO: 70432 - DNA, 1003 bp, Cannabis sativa
aatattaaattagttttttctttttttgaagaaagaatattaaattagttaatcctttgttttaataaaaaaataaagaatagaaacatgttcgtctcataatccaatcatgataaaattaaaacaaaattagctagaaattatgtccttaccagaaattatcacatccaaaaccattttccttccaaaattatatgcagtatctcctacaaaaatatctcaatattggttacagcatgaaataaacacaatacacttataatttataattttgagcccattaataatggttagtaacacttatgatttcaatttagtcgatcaatactgaatttagtggaccaacactaaaactactttaaaaatctacacactcctatataaatacaaaaaatgagataaagaagcgaacctgaatgattgaatatataagaatcagattaaataagttagaagagaaatgaatatatatatatatatatatggtgtatatatgctattgtaatattgatatagacatatatatatatatatacatgaatgagagtgatagtatcggaagggctgtataataattcatcaataaacactgggaaggagcgggttatacattcttattgtatgggaaggttttttttgctggaaaattgatattttttttaaaaaaaaaattattaatgttaattattaataattaatacaaacgtaggaatgaaagtggtatatggaaaggttgtacttttttttcaagttaatataattcattaatatgaatagtaggaatgagggagttatcatactgaaagagttttctttttgtttgagataattattattattaattattgataaaaaatataaaaaattggaatgagaataatatatcgatagaggaaaagtttttttttttgagataataaagagttggaatgagaatgatataacggtagtggaaatgtttttttattattaattttattaatatataattaataaaataata

SEQ ID NO: 70433 - DNA, 1365 bp, Cannabis sativa
aaaataaaaagaatcatcattcataataattgttgcagatattcattctagatgggacaatcatcaattgagatacatctcagttccatagcatcaacgcaagctattttaaaaggcttggcaacagaaaaatcttcatctattatagctagcagctactatttcttctcgctttgacttccacattacttcgatgcatgctaaagaacacacttgataaagagtctgacgttaaacgtgcattgtttcgactttaatttctcggtgacaaagtaaagaacactacacttactgtataaaagttcactgacctaacctaatatgggtcctaagggatcaggtccacaaaacatgatagcaaaactaagaaatgaaccggttaagcggttaagcgtgcgatataatgaaaataatatatcatttttattaggagaaagatcaggaaaatgtaggagcaagtaaaataaataaacagggagattagatagaaagattaaaaataataatgatgaatttaccataacgagatccttcttgagcccaacacccatatgaaacatctttgctagctggtagaatgccttcggttgaccagcattggcagcatacaggaagtattgacaagcagctttcacatccctctttaccccaatccctttaaaatacattactcccaagttatagtgcccaccagcttcgtcattctcagcagccttctcgaaatactctttcgcctgttgtgaaataggtcttacaaatcaatatataatgattcttggatttagtgcacagagtagaaaacatatatttacatctctccaccaagtaatgaaaactagaggtaaagtaaacaataatacttgtccatgagcattgagaaaaacttcttgttcacataaagatcattaatttgggaaagtgaaggggttacaaggtcctctcatttgtacagcagctaaaatgactgcttaaaaaatccaagtcctacactgaaatcttctgtcttctctgtctacatttcaatcaaatgagtaaacacaagattccacttaagctttcctaatagaaagtccttgcctcatactaccttacaaactacagatttacaatattattctcaccaaaataaaattctatgatagaaaaaggcagtcaggttaagcaatttagaccaaaatctataaaaactttaaacaacagagacagtctcaccttagtgtaatttttcttttctactccatatcccttgacatacagataacccattccgttgtaagcagaataaagctgctgctttgatgcaagtgcgagccattccacagctttggtgtagttcctttccaccccagctcccctagcatatat

SEQ ID NO: 70434 - DNA, 2206 bp, Cannabis sativa
gaaccatgcaacataaaagtaatttttgatcttatattaattggtaaatctgattatattgaaatggattttctttagggcacaaaaccgaacatccttttcatgtgatctaatgccctttatatagtatagggcttacaagatattttaattcaaataggaagagtcattatattatatataggaataatataatgagggaatatccctatcttcatgggctattggacctatctcgcaatggtaagtcagcttaagaatcttctaaaaggcttgttgtggaccccgcgacttgttcagcctattgtgagttgaatgcatgttttggctggtcggccctatctttgggggctatctaggatgtctttacagccttgtctttgggggttatccgtacagctttgctattcagcttggccgacccaccttccttggtcggccaggcctccttggttggaaaatacctccttagttagacaaacctccttggtcggctagctatggtctgagcagggtctaaagacttgtcttgtttcactctatcttataatcgtgacatcttgagagttcataaaccgtacagcactatccttcccgattcatggtgagttgtcttacacttatcttctgtaggttataagatgtctgacctactggtcatcctgtcaaggtcttgtcaatacttgtgcacctctgtcttgttcttgacttggaagctgcacatagtgtacatgtccagttgttgacagaatgtattccacgtgtcttctgttttgactatgttgatatgccacgtcaggtgggcaaaattggataacacatttgatgctagtttacctttctaatattttggaaaagacattccacttatccaagtgtaagcaaatctaatcgttgattatcacattagtataaatttagtgcactaataaatcgtgggactaaataaatttgaagcatataatcacaattactttccactatgatgacatcactgtaattgtgaataactatatatttgggatttaatagtacttatatattaaatttataatcacgtaataaacatgtgaacaaagcatataacaagatcaaaatatgatttctgatctttattaaaagtaaataagattacaatgaaattttattttattttggccataaaatcccgacaagaaccccattttttaacaataggagagagtccccacacatcaaagtgtactaaatcaaatggtgcaactaaacgagatgtagttttattgaatagtaaagcaaaaaattttgcaagtttacatccactacaatcaaaaatatcatgaggttgcaaatttcctaagatttctttagaagctaaaattttaaatgagactctaaaacatgaccaaggcgagagtgccacaaataataactagaagatgaaagagacaaacaaaaagaagacaaatcaacactaggagttggaaatactggtaatctcaactcatccaaaatatacaaccccctgcaccccctcccccacctaggactggtcccaatcagcttttgagactgtggatcctgcacatgacaagaagtagaaggaaaagatattgaataactataatctcacaattgaccaattgatataagattcaatgaaagattaggaatatgataaacattaggaagcgaaaaatttaaactaacaatagaaccaataccagctaataacatggggttaccatcagcagccatgataggcacaaacgatgtaagactcaaggaaataaaggatgcagaatgcgaaaatatatagtgtgaagcactagagtccaaaacctatttagaaggtgacataccaaacgtgttattggatggttgacctaagaagagatagacatggcattaggttgagtagaaatgaatcaaaaaactattctggtagagcaacaaaattgtaagagcaaaatgaaggaatgttcacagcagtactaaattgtggaggttaaatttggttgttaaactgtggttggttacccttagattgatatctctattgttccagagcacgatttgcaagcttaggacattgagctttccaatgatcttttggtttgcaaaagctacactcaataccaatcttttgttaactcaaacttttagatctccttgttttgatgattaacaaatatttcattattatttgttactaatgatttgttga

SEQ ID NO: 70435 - DNA, 1276 bp, Cannabis sativa
acctcaatcggagctctaaaactctagatatgatcattttactaaaacagattttaatcctgccaatttatccaaacctacgaatttttttaacattaattccattattatgttatttaatgcactcatacaataaattaaacccactataatttcaactatgtttagaaatctatcaatactattctaagcaattatctctattcagtagtagtagaaataaataaaatacttattctcacacaaattgtataacaaataaattttttaaaatatatgtacatttttaccgggtattacacagcaggttgtattttgtatagtcgctaggtgacaacttttgtatagaatattttgaatcagttgtaatattttaaacttgggatcctgattttataaaagttatttactttcactattgatagtattttagaaaaattttaattactcacaattttccataaactcgttgattagaaccgaactgcacagttaatataaaagcacgataacacgcctaaactagtaaggtgttacaattcagtatcagagtcgccatgttatcttctaaagatcatcacgacatgtacaatcatcatcagagatgagctcgactcacaattcactaagctttattgctttagtagtttttttttatttgtatgtgataagaaaagactactaggaagcatgttagtagcctgatagctgaatagacgcatgttttgatttctaaaataagggctaataagtaaattattcttgatcgcgatctgacaagcctagctctttttttttttgcaggctgttctattagaatggacaccaggcaaatcatgaggagccaaggttactcggtcggatcctgtggaggtcaaggagtttagttttgcccaaatatatgtggccgaggtagaggcccaagaggtagggcacgcgattgaggagatgttaactcgatacaagctgcctaggattaggaaacaagtttgtagcgatgcaagccagaatcaatgaacaagatgaaaagattagatgtctgaggatgtggggtgcttctgaaatgccttcttctatgaaacggatggaaccactgtacagaaggttttgcaagcaggcaccttcaatctttttgggaggtctagatgtgatgaaagtcaaatagtggctgattgttattacacagatttcaaacttaatgagtgtcattggcaacgacagagtggcttgtgccacattccaattccaggaagatgccttagtttagtgggacatg

SEQ ID NO: 70436 - DNA, 1430 bp, Cannabis sativa
ttattattattattatttaataagccttttaattaatttactgaccaaaaacagaaaaaattacttgcaagacaagttactcattcgccacctagttagctagatcctcctctcttcctctctctcacataatacatgcaaatatttatttgaaaacgacattgtttcatacttatgattccttattattgttgttgagtaattatgtgaagaaattgtttcaaaaataatagtatgtcccaacttttaacgtaccactaaattaaattatttgcaaatgttttctttttctttttaagatatcattaatgtcatatgactaattattcaactttgttacagataagaatcaattagcctcaaaactgttagaagttggataaaattcggacttgttcagttgtataatttgttagactttttgctctatttctattttatatataagttgatattgtactcctttttcagagaaatacaaattattctttcatctctttcttatttcgttctctatctttcttaagttttaacatggaatcagagcttcctcgttctccatagatggttcttcaaactcaggttctaactttaagacaactatgattacatttgcctataccctttcgatcaagcttaatgaacataatttcttgtcatggagacaccaagtcttagcttcgatagccgactttagaaatttctcaatccagatcgtgctccaccaaagtttaacacagctgaagatgatgttgaaaacagagtgagtgtagagtatgaagactgagagcagcaagacaaaattcttgtctcgtggttgctttcttcaatctcttataataccacaaatcgactaattggatgtgacaccacatgtcagatctagagctatctaactgagtattacactgcaaacaatcgagctaaaataggtcagtgtaaaactcagttgagaaatagtaaaatgactggaaatcttgatgattatttgccaaaaataaaagttctagttaaggttcttgctacgattggtcacaaactcaatgtgtactcactgcacaagaacacattaaggttatttttaatggtcttccatctgagtttgatgtatttttcactgctttgaatacaagaaaggatgtgtacactgtctctaaaattgaggcacttcttttggctcaagaagtgagagtgcacaaaggagaacaagaacttgatatgtctaaacctaaggttaatttttcccaaactagaggttttccttatattcgtaggacttcttttgttggaactacttctagaggaaattttgcttgaggatttgatttctttgggtctagtaaccattcattaacacacatcttgtctcttatagtcctagatatataggttatcctacagtctgtggtgggggtggtcctagatttaat

SEQ ID NO: 70437 - DNA, 902 bp, Cannabis sativa
gtcactaataaaagaataggatagttataaaatttttagaagggtggtataattaaacactctatctaatgtttaagcataaaatgtcaaatttcccttctcaaattatgatgtatggaaaaatagaaggagatgatgtatttggtgcctacctaaattagatggagacgatcaatcattttttattgtttagtaaacttggtatattaaaagagaataagagaagaaatatttattagcatatttaccatattaagctataaaaaattttaaaattagttattatcttcctagttggaaataatttatttattattttggtggactcgtggatttcaaatctccagcatccaaccaaacttactatatatacgtattttgtcactgccttgtatcatgatttgtgtttgtatattttttattagagttttaaaaatactcttttttatgatttatttataattttaaggcttaaaatttttatttataaaaatataattacaaaaatacactttgttcaataaaaagtaagagaataactaaaaaacgaaaaattaatttcaagacaactataaattaactataaataaactataaaataataaaataacagtttttttgtttatagtgaagaaatatttttgtaaataaacaagtttaaaccgtaaaaataaaaaataaaattttttcgatatggacgtatttttgtaatttttttaaaatttcttttgatgtgttagataattttttctatttttcatcgttttcctggtaaactatactcagtttttgtacccatattgcatattacataggaaacttagcaatattataaccaaacatgcatattctttatatatatatatatatatatttatatgctgatgtcgcccaattagtta

SEQ ID NO: 70438 - DNA, 1638 bp, Cannabis sativa
  modified_base (31)..(40): a, c, t, g, unknown or other
aatttctcataaactaataattctgttatannnnnnnnnnttatatagaatagatatacatattccagacagccaccaacactagttacaatgcttcacccattttttatttatggttttaaatataggtgcttaaaagcttgtatgccttggaccagcaatgtttttcatatggtaacttgaaggcagttcaatactgccattacttgaaagagataattcagctgcacataatgatctgttttaaccttcaccctcttcaacatctgaatcttaatgtcaacttagaacagaactgtaagtgttagacttagcctttgtattttgttggtttggcatatgctgaattagtctaaaccatatgtttttatgtgatcttagtcaagtaatttggttaagatagaaatttaatcgatcttaaaagagagtccttcctttagcatatataattctactatgagaaacacaaagaagaagccatgaaacgatcatttataatctctattatcttaaccttttttattcacagcattataaacaggaatgtttaagagcttataacaaacaaacatattttgtttcccattttttgtttcgttatgttcttcaacagaggacagtattacatgccactaattctacagcaactttagtaaccccattggaaactatccccaagtgcccttattatagagactaactcttgtgtggataaaccagaagcagccatccttggagtgataatactattattgttagcactcaacgaagaatccctcgttttaggcccgaaaacagctctacaaactggacactgaccattgctcttagcccatggcacaatgcagtcttcatgaaacatgtgcttgcaaggagtgagcataacctcctgtccacgttcaaagtcatccaagcaaatggcacacctttttccatcttcatctgtatctatatccttcggattcacaggagtgtctcggtagtataagttgactttgtttgtcaatctcctcgagacaggattgtagaactccttcttgagattctccaaggctttgctttgttggtgaaactggcttgagtttctggactgttgttctgttcgttgatgtggcaaatgcgtccatgattcaatctgccttggtggggactctcgggggatctgcctgtaccagggagcaacaggttctctctgtggttcactgtcaaggattaagagacgaactggtgaacgatgtagtgaaggtacactgcagagtaggaaaacaaacaagaatgattatgatatagtgaaatgaacagggaaaataaatcattcaaatttcaaacaaagttacaaaacaaatcatttccctcagagggagagagagagattacctggttgagccaaagcttgatgaccttctcccaaatgaccgatgagcttccactgggcctcttgaatcctgctatgtcaaaaaaagaacaactaatatcaccatcttaacgtcttgtataaagaaaaagtaaatttgcaaaagaaaaaaatatatataaacaactgatgttgcagaatacttatttatttattcatttattttatttcctttcccttcttctaaaggaatatgaaagaatacttacagggtttcttcggaa

SEQ ID NO: 70439 - DNA, 1265 bp, Cannabis sativa
ttatttagtgattaatattattaaccgagcgcagttgcaaatcaccttaaggactgcacaggcacggtagagctcttcttttcttacatttccctttccatcagcatcacctacaaaaagagcaccgaaaagatgctatagaaaaaccagaagacattttcctaacaaaactataacacactcatacacaacaagtaagtcttcaatatatccaccattggtgattctagagaaacaatgttgcaataaatggtaaacaagtgctttggatatagccataaacatcatagtaacaagaaatgaaaggtttttttttttatataaacatataaactgagatcgtttcagagctaacaagattcctctttccggaacagaggaaggagggggatacaaaaattggaagttccactttcaaagagacttacgcaaagcaaacaatgtttccatagaccatattttcctccaacgcaggttcacattcactttatggaacttgcagcttaaaaaattcaggttggagaagtgtacgcctcaagcaccgtatagatttgttagacactaaagtaaaagggggtaaatccatctttgttctcagaaaactgatgcgatggcaatctccggttggaaagaaacaaaacaacaaattttttgaaataagggaatctacaatcgagtctttacgggagaggataatatgctgggtaactataactgtttacaatgctaaacgagtttaaatgtggaaactggaatagtttgttgtaaaatcccattctttttgtttctatttttgtggtttttctaccatatttttttcattgtattttctccaaattactacaaattatgcttctaaggaaaaaaaataataaccagataaactgaagacaaaagaaacatttgatgagggattcaacattttctataagttgtgtagaaaaaccattctttgctttggaatccaattcgaactaatacttgcaaattgtaagaattccatcaaagaaaaagcaatataggttaccaatcgagaggcacaatatgcgaagattgtactttctggaagtcaggtagcttattgttggagaaaagaacctgaaagatattgcaaatggtttcaaaacacacatagcataataaaaaatacctcaaataatttgagattcgattagcacaacaacactaactatttcacttatttctcttccttttcctttgtgggtgtatgtggctacattctaattagtgtaaagaaaacaata

SEQ ID NO: 70440 - DNA, 4272 bp, Cannabis sativa
aaccaatccattttaactctgctgcagtgtttgccagagcacgaaattcactctcagtacttgaccgagctacaacactttgtttcttggctgaccatgagattaagttgtctcccaaaaacacaacatagcctcctgtggactttctatcatcaacacaactggcccaatcagcatcagagtaactctgtaaagtgagatctttggttggtttcagcaataacccatctgtaattgtgcctttaaggtatctgagtaatcgtttacaggcctcccaatgtgaaacagtaggctctttgagaaattggctaagtttgttaactacaaatgctacatcaggtcgtgttaaagagagatactgtaaagcccctacagtacttctatacagagttggatcttcaaacacctctgcatcatggagagagagctttgttgtgttggaaattggattggaacacacctttgcaccttccatatgaactttaactaagagatctgtgatgtattttgtttgagacaaaaacatgcccctgtgatctctgaaaatttcaacaccaagaaaatagtgtacatcacctaagtccttgagagaaaattcgttattcagatcagtgatcaaccgtttgataagattctggttagggcctgtgacaaggatgtcatcaacgtagacaaggagaataatgagagtatcacccgagccatgaacaaacaatgaagcatcagatctcgaactagtgaaaccccactgcagcaaacttgttttgagcttgtcattccaggctcgaggagcctgtttcagtccataaagagctttgtgaaggaggcatacatggtcaggtttggactgatcaacaaatccaggaggctgtttcataaacacagtttcagtgagcaagccattgaggaaggcattgctaacatcaagctgagttactttccaattagaactaacagccagagagagtacagtacgaactgtaacaggcttaaccacaggagaaaaagtctcctcataatcaatacaggagcttgaagatatcctttagctactaaccttgatttgaacctgtcaagtgatccatccgcattcaacttgatcttatgaacccatttgttgtcgataatatgcatgtcagattgtttgggaaccaaggtccaggtgccagctttcttgagtgcatgaacctcagtttgcatagagttgagccactgagggtctttgagagccatttgtagagactttggttcagagggtagtagggactcgggaagagggtgctttgtggctagataagctttgggcttggaaatgccattttttgatcgagttaccatgggatgagtgtttaggacagggatagaagctgcaggtgttgagacaatggtggaggtctgggatagggtcatatttggtggatgtgtggtagtattctctatgggagagggtacagaggcaccagtgtctaagggaaggattctgggtgtttctggtggcattacagggtggaaactaagggtgttggtgtttgtagtatggtctgagagaggcaaagggtgattttctgggattggttgtaagctttgaggcctttgtggtacatgttgtggctctacagcagctgtggggaccattggctcagtgtttcgaggaaaaggaccaacagggaccacattagtacaagttttagtagaaaaagtagcagtaggatgcataaaagtggtttcagtaggtacctgttcagtatgggagtgatgagtcatgccaggatagtgtgtctcattgaatatgacatgtctagcaatgaaaactcgaccattttgattctcacagatatagcctctatgtgcaggtgagtatcccaaaaacaagcattcagcagatcgatattccaacttgtgagaattataaggccttaagtgtggccagcaggcacatccaaaggacttcaagatagaatagtcaggctttgtgtgaaataaacattcataggggctgatattatcaattacaggtgttggcagcctgttgatagtgtaagtagcacactgaaaagcatgccaccagtagcttaaacccaaattggcttgagctaaaagtgttaagcccgtttcagtgatgtgacgatgcttcctttctgctctaccattctgttggtgagtatgaggacatggatgagagaacaagatgccctgatcagctagaaacctagcaaacggtttatactcaccaccaccatctgccatgacacttttaatgggtaacccgaactgtttttcaaccatactcttgaattgaataaacaattcgaaggcttgagatttgactttcattggatagatccatgtaaagcgactatagtcatccaagaaatgaatatagtaacgaaagccatctttggagggttcaaaggaaggcccccaaagatcagtatgtatgagggcaagtggttgagtggctcttttagtggaattagtgaagggaagtctatgacttttcccttgctgacaagcattgcagaattggaaattctttaaggtgcctgtgtgtggaatagtgggtagaagtttctgtaatgtggacatagctggatgtcccaacttacagtgccagagatttatatcagaggaatgggaaacatgaaaaatggactgctcattgggagaaagaaaagcttcatttattgtatttgtgttacaagatttgtgtgtactagcacacttaggattacaattgcattctgtattacagatacaagcattggatgaagactcagaagtaacaagattacattgcagggaggatcgtgtgggacttgaggaatcaccaagaaggtacagaccatctctagctttccctttgagcagtacagaccctgttgtcttgtccttaacaaagcaccaatttttgtgaaattcaaggaaaacgtcattatcttcgacaagcttagaaacactaacaagattcttagtcatggaaggcacggttagaacagaattcatatgtaaaggacatgatttatgagaagaaggaactgaaacagaaccagtgtgagaaataagtaatttcttaccatctcctatggctacagtgtcatgaccagagaatggttttgaatcatcaagatttgcagggtcgaaagtcacatgggttgtggctcctgaatcaacataccaacagttgtcctcgccaaagtcttgtatcattgtggtagcataggcctgaggatcacattcacaatcaatctcagtcaagaaagcacgattattacctggttttggtgttgtccagtttctatcaaaacgatagtgacacacagccgcagtgtgaccaactctcatgcaaacttggcaaacaactttctgagtgggaaacttggaaaaacctctgccacggccaggtgcagtggattgattgttgtgggcaaaagatcgaacacctgaggatcgtccttgaccaagagtcatattggcctgtagtttgacattgagctcattcatagctagatgatgctcaatcctgctttcatgggagagaagaagagcctgaacttcttcgatcgacaaggtgtcgcttcttgatgtgattccagaaactactgaatcgaactcagggccaaggccatttaggagctgtagaattaaatcttgatcatcaacaggtgctcctgcaatagccagagaatcagctatagattgtactttgtcaaagaactcagaaatagagagattgcccttatgcacatgagaaaattggcccttaagttgaagacgcctggctttagtttgagaggcaaacttctgttcaagcgcacgccaaacagagtaggaggtatcataatttgcaacagatgcaagaacagtttctgacattgatgatcgtaaccaagagaggagtaactgatcctttcgacgccattggagatatgcaggattcgagttaccattgagcagtgtagaaggaggtggaacgcctgtgaacaagatctcatcgagatcatgtccaatgacagtgggaattacttgagatttccaggagaggaaattcacacgatcgagtttgacagtgagggaggaagacagagaattggagaatggattccaagatccagttgcagcgggttgtacggcaggtgcctgaggagcttgtgttgcagtgttcatggcaggtgcctgtggatcggaggtagacgatgacatggtctttcgtcaagacttctgataccatgtagagagtgaaagcaggaaagaaaagagagaaagagaatgcaa

SEQ ID NO: 70441 - DNA, 1300 bp, Cannabis sativa
cattggagaccgtggctagcctacattcatcatttcggtttttcaaaagcctgcccaaaatactcttactcattaattaattttgtcatttattatatttaatggtcattttagtattagtatttagtatttttagggtttagtaatttgtattttaccgtatgtattgtattgtatggtattatattaaattaaattttatataatatttttatataaaattatatacgatattaattttgatgggcacttaaatatataattttttaatgtaaattaaaatttaacataatattatataaaaatatgatatataatccaattcaatatcatataatacaatacgacctaatacaacgttccaaataaaatcttaacgtggtattttataattggttggttagtcatatttttttaaaatttatttttttaaattatttaaaatttaatatttaattacattaatataatattaattaaaaaaatactagataccaataacactttttaataatttttttaacaaataattctttttttatatatatgtataacccttttatttatttttaattaaaaaaaatacacataacatgataaatattaatttatataaaataatttacggctaaatacagtatatttcaattgtaattatgaataattaatatttatattcttaaatattttacactattcaattgttgtgtttgtatgatatatataagacgtttaacttttgcaatatatatttcaattataattatgaataattagtatttttatttttaaattttttacactattaaattatatttatatagtataccgcatttaaataatatcttttgaaatataatttttttaataatgtagttattctattatatttatttatttttaaaaattattttataatatttaaattatcaaaataatttgggctaatgcaaatatatgccacgtgtacacatacacagtggcactccccgttacaaacataagtaaagttaatgagattttgctactaaacaaatataaaagagttaaatatataatgatttttttttttttttaaatggaaatgtataataattaaatatatatatattttactttatattgggtaagaaagaaagaaaatagagaggaagtataatataggagagatggaaaattaaatagaaataataggaaagtttatttctgtttaggttatttgttagttataagcactataaaaaagttaaaaaattgtgattaattataaattattattattctgttatgataaaaattt

SEQ ID NO: 70442 - DNA, 1774 bp, Cannabis sativa
agcccatgcgtgagccgccgcatggagcatggaaaatgatcatgtcagagtagtggtcgtggtaatcccaacgttaattaccttcttgccaaacccatttttgtgagtagatagaagagacattctagcaaatttggtgggatcgtatcaaagttatgacacgtggaaacatgcctggaccattaagcgaccccggggagcaatttgcttccaggtgaattctcgtcctaagataattttattatagttccgcatgatttaaattgtttgataatttcaattggtaattattaaaaatagaatttcaataggtggtgtcaatgttcttttaaatactcttagtctacggggtcaggctcagagaatgaaatcaattagtaaagtctcaaacaattacaaactacaattgacttaaacaagtttagactctctctaaagttttgccgcaatcctttataatttactttgccaatctaatttcctttcgaagtaaggctttgacaagtcttctctcgaagactcttctcttgttcaatgaagtttttcaacctattctaagaacagtataagaacaataaacaaagactaaaacctagatgaacactttaggttttcacaaaagaaactctctcctcacaaaaatgaaaatatgaaaaatgaaactaaaagagatgagaaacgtttgactgctctttaggttctatatatagtacataaaaaccatagggacatccacaaacacgtttacacagctgtacaaaactttcctaaaatatatattgatttgcagtgacaaaattgtactttgcagtggcagttcaatgtcaaattggaaaactttttaaataagtctaagatcacaatttggactttaattcctcactactataaaataaccttttagaggcgattttttgcgagacagggtagccaaaacgtccaaatattcttacttattgaaaattgacatttagagacgattattttataaaaaccgtagctataaaattcaccaaaatcatataaaggcggttatttaaacagagatattttggtataaaaaaataccctataaccgacagcataagtacattttttttgtaacacgtgtatcatatgtcatcggttattttctaataatagttgctaactttttatctaaatttgctctagagttacatgaaactaactttttgttggagagtttactttcaagtttcacctatggtttagaaagatagggagagaggaagaagacatcaaaggcgcctgtggttgcagtgctcttcttgttgcttcttttagctttgattccatctggatcatcctcaactttccctgctttcctctagtcttcacatcggtaatgactattatcccttcctcccaatttgtatgagtatatgaacaattgaactattattacattcgcagggttcatccatcatcatcatcatcatctgtaaattatcactctttctccaaaggatttggctaagtccccctactctcccaagctggatggtcacacttactggttagttagttagtttattcattcttctttacttacatttcgaattgttgattctaaattttgagttttttcttctttcattctttagtgctcagataatcaagttaagcaacctttggatctggctcttatctttgttggttcagaggtaaatttcatagctttactctttttttttaagcatgtactaaattgagctttgaaatatgaaagctttttcttacttactacaactaa

SEQ ID NO: 70443 - DNA, 1281 bp, Cannabis sativa
  modified_base (808)..(811): a, c, t, g, unknown or other
tttaatatttattaataattatatttttacataattaaaaataaaataacataaagtattattattttatatctctaataataaaataaaataaataaaataataaataacaaattcaaataaaaaatataagtagaagaaaatatttaattttgttctaaattatattttatatatatataaaaataaaatatatatgtgatctgtttaaaatatatttatacaatatgcattagatttttaaattattattttataataaaatattaattgtatgcatatatttacattcatatatataaatatgtgtattaaattggatcggctacttttacatatcaaacgtacaggtatatattttagatttttaaatccaatacaattcgtaaacatattagtttaaatttgatcgtgcgaattaaattaaattagattgacatattaatggagtaattttggttttcactaaagcttcattgtcattttagtaaacgtacatttatttatttatttatttttacataaatgtttgtataggttaggtacacactaactttttctttttttgaaaataagatgaatgaagacattaataaaaattaaaaaataggttaggataatgactatataggagacaatgagtgtcatatgtaagaaaaacaactatagaaataatagttactacaaaaaaaaaaaaaaattgattatatgggtcctctactagatttggaggaaatcatctcctaaaaatgactttttaaaatttacatataaaaaatcaactttataaaatttacaaaaaaaaaannnnattataataataataataaaaaatacaaaataataaaataaattttgtggcatatttgtttggtattcaaattacattttatattttaatttgaattttttagggatattttcataattacatgttgagggtaagaactcgccaactaaattttagttagaaaatcagatgcaaagagctaaagataaaaagcataaaagaaattaagaacacttcgccattcaaggagaaaaatattgttatattaaataattaagctctcttataattaataattttccaacgctcttttcaatagaagagaaaggtatttatagggagctgtaatgactccaaaatataagtggtcctgaaatttaggggacaaaattcattttgtaccataaaaatcagcgagtcagaggggtagtggaaaagtgctagtcgggtgtcaatttatgtaacgccctaatgctaaggcacgctacagt

SEQ ID NO: 70444 - DNA, 984 bp, Cannabis sativa
tggtagttttttactaattatttagttacttttactacttacatatttaattcaattttgggatcatttgctgattgaagacgaggttgagaatcatgagaatcatattggtaatcctcattaattggacttttatgaagtagaaaacatcagccttatatcataaattatattttattggcaacacttgcagaagataagtttcatgacaaggttaagtcattccaagtttgtatcatcctatacaaagatgtaaatttggaatattactggtgtataaataagactgcaatgcaatgcttcttttttttactggttcatatgatactcattctattccattaatatttttttgctgctattttaattggtttataatcatgtattgttcactactttatataaaaaaaaagtttatactgatggtgtttttattattacttatagcagatataaaaatttatgaagcctcttcaagtgcggtatttctactcttggcaatttctttttcttatcatcatttcattcattcaatctattcaatccatttttcattttcattcatcaatgtcttttaaagattctgtttgttagggcgaaagggtgttagaaattcattctcattcgtgtggttttctcttatgtgctttcaatgtaggaatctgatgtaggatagagaaaggcaagtaaaagaaagttgaggttatttactgaaaaacaatggtttgtcaaaagaaaaaaaaagtagagaatactgaatatttgatgtacaatggtttgctttcaatggtttgtcttttaccctatttccctattcatctgatgtataattatcactgtcttgtacttttctaattgcttatttactgaaatgtgatttgtatttgtcatccaagttctgaggttttgcttccaaacattgtaaacagggatattgagcatcttctgatctaagaagtatatatttgcaatgacatggaggac

SEQ ID NO: 70445 - DNA, 4214 bp, Cannabis sativa
  modified_base (3879)..(3880): a, c, t, g, unknown or other
agcctatagggccttatttgagacctagccagcacatggtgccatctggggaagctggtcggttctaggcttaagcttggaaccctggccagttcttgcatgggttaaggaccctagccgacacacattaattccttgggatcttggctgacacatggctttggtcccaaggtgatggccaattttctatacttttttgactctagcaaggactttactacggccttataagcttgatcaacccttgtcaaatacttgatcccctcgagaattttgtatggtaattctcaaggcgaatctattgtagtcaagtaatcaacttaagactaaatgttcatccaagttcttgcaaatggaattaactcgtactttactaattcccaactttgtacaatagaagtgtatggctagtatacccttaggatttgctgacctgtattttgtctaagtatttttactttatccagttgctcacctacccttgtcttttgtatgcagatgaacccgcatgtgacttttggggaggtgataatcagatagatgaagatttgcttagccttctctttaaagaccattgtctagctagttcttcaagtagttactcgagtgatctcgaggttacaagtggttccctagatcttgaagtccaacatcactgctattcggagcaaataagcagtgaattttatggctgatttgtctaggagctgacccaagggtggaggcaattcatccctagttcatggacttacattgtctaagacggtgtgcccgatacattgcccactggtcagaaaactccatcagtgagagatcgtgtaattcatggtaattatgaagtctgtccaatcattataactaggggtatccgtcaaggagatctgttttcaccttacctattgattttgtgtgctgaaggattctcaactttgcttcgtaaatatgaacaacgaggttggctttatggttgtaaagtggcgaatggcgctccaagaatctcccacatgctctttgtagacgatagttagttatattgcaaagctatagaaacttaggcctttcagattcaagaagttctacaaaattttgaaatagattcaggacaaaaggttaatctttttaaaatcttgtatcttttatagttcaaataccttaatcactatgaaagataggactgtttttttgttgggcatggttactactactgaatgtagtgtgtacttgggtttgcctagctctatgggtcgtaataaatttgatgtcttgggttttctaaaggaaaaggtgacgaaaagacttcttagttggggaactaagtttctatcacgagcaggtaaggagattttgatcaaaactgtggctcaagcgttcccaagctacgccatgagtgtgtttttgctttcacatgaaattacaagaaatatacaaagcttgatgtcaaatttttggtggcaatcttctaatagttctaccaaagatatccattggatgtcttagaagtgactatgtaaaaacacaagtcgaagggtggtatgggctttcgtaatttgagagattttaatttagctcttttgggcaaacaaggttggcgacttctctccaaacttgaatctctagtgtctcgtgtttttaaagacaggtattacctagaaggctcattttttacagttgatattggatccaatccaagcttggtccggcgtagtattcgtgaagctcgacaattggtggctaaaggggtttgttggtctgttatggatggcacaggcatcgtagttttgggtgaaccttggttactcgttcctgtgaaccccatgatgacttcattgcatcatggtcctattggtgcaaaggtttgcaatttttttccattgatggtttaggttgggatgaagaacttttggcaatttttttgaccaacgtgatcgagattgatcctctaaacaccagttcagttggagtgtgggcgtgaccctcttacatggacaggtgaaattatttgtttatacactatcaaaagtgcttacaaaccagcacaatgtttttatggtgataatattcatgatgagacagcaattgataggttttggaagaatttttggggtttaaaacttccaccaaaaatgaaaattctgtaatggagtgctggaagaggatgtctccctaccatcgtccaacttcagtctaaacgtgtggaggttacttctcactgtccagtttgtaacctagagggtgaatccatactccatgctcttgttacttgtcccgctactaagctctgttgggacaaagttggaatcagtacaatattgcagtcaaattcctcatttttggactggtgcgtggaaattttttggtgcttaattcggacatgaaaaaattattggtagctctttgttgggctatttaaaaatcctagaaatgataagctttggcaaaacaaagtggtaagtgtggagaatatagtgttgtcaactagaagttaccttaattaatggttaattactcataatttagatttggaattcttaggtcctggtttcttaccaggtgacggagctgagcaatggcagccaccacaaagagatagcattaaggttaatgttgatgttgctatgtttatcgagactaaccaatatggggtaggttatgtggctcaagatgcataaggcatgttgttagaaggtggtaccaaattttttaatggccggcaacaccagaatttgttgaagcattaggggtcaaaaaagcactgagctggatcaaaaagaatcggttgcagcaaacaatccttgaaactggctatttatctattgtacaagccttacgtagttcagtcgttacgtttacaagttgagtaaaatggttaatgtttgtaaaactttattaaaagagttaagatatgtttctgtctattttataaacgatcagctaataaggtgcctcataactttattagagttttcttattgtatccgaattgtaattttagattggagtatgttccaactaatttgctacttgttttggcagctgagtttgatggttaataaaattatgatattcaaaaaaaaaaaaaaaatcattgcatgtccaatttatgttataagaaataatagtggcgaaactttctaattgattcattttgtaaaacttcttatacataaagtatttgttagcaaaattatttacagtgaaaattttgttaaattttactaattattaagtcaagtgttaggtttcataaaaaaaaataacagatgatagcattatattagtccaaaaaaaattttaatcaattattattataagagttaattaaaatatatctaaatattaattaaaatatcattaaaatctaaaatttaaacaaaaatcacatttatatgtataaaaaatgtatataatttatcaccttaaaataaataaataaaaaattaatgcaaatataatttctaatttttgatattttttcttgatttaataataaaattttgatttttagcttagtttaaaactttttaattattttatattttcaaaaatatttaattaattttttaataattattgaatcaaaattatttttgattaatatgatgatgcaatgtgttatttttaactcaaattagttaatacttcacttttttatatgttttgttgcaaaatattgtacataaaaagttaagggctcttttcaacaatacattaatagaaaaaattctaatcagctttacggtaatatatcttttaagtttgtttgctatgccatataaggattgtattgtctatatttggataaagaaatatattgtattaattattacaaccaaaaaatttaatgcaatgtaaattgtattatttaatacataacatatnntctgtattagattgtattataatatttacaaaggattcagagtcaaccccaatctttgacctggatttgagactcgagacccaaacctaaacccaaacccaaatcaaactcggacctagactctggacctcgaacctggaccctgaccccagactagctttcgaacccagaccccaaacatggactcagacccggacctcatacccaaacaggagcggactcagaccccgtgttgggatttatgccctaaaagtaagtaattaatgaataatatatcataaaatatataaaatataattataagataaatgaatacgttaattataaaagtaga

SEQ ID NO: 70446 - DNA, 1728 bp, Cannabis sativa
agagagagagagagagagcagagatggtccatgctccacatggccgacgatgagctccaacgcacctgcaaaaaaatgagaaaaagagagttagagtttgggccgagaagaaaggaagaagatgaaggcgatgatgggcgaaaagagggaattaggttagagagagaggggagagaggggcgattgagaaagaaattaaagttaaaatttggttttatattttaggattagatttttttaaaatggactaaagcccatgtctgattcttttttcaatggctttttgcgtcggtagtgcaccgacgccaataatatatataataattttttccgtcagttgtgcactaacaccaataatagtgtatatattttttttttatatttcatcttttacttcagtttttattttagcgtcgaatagataaacgatgctaattaataatgatttgcagcggtagataaccgaagtaaaaaagtatgagttgacttttatatcggtcaataagtttgaccaaatacgttgaccgatgcaaaaatccctttttgtaggaccttactaataacttcgggtaattttgcttcaaatgggattatttgagagatgggttggtttgattcttacttgtgtcacttcagtgtcttatactattgtactcagtggtagagagatggggcctatctttccaacttgtggcatccgataaggagatctattggcattcgataaggagaattatatttatttatgttctgagggtctttcctcattgattcgagtttatgaatctcagaagtggattagagaaatcaaattttgtaggcaagctcctattatctctcatatatcttttactgatgatagttatatcttttgcaaagctttacttaaagatgctacgagagttttagagtttcttcataagtttaaggaggcatcaggtcaacaagttaatttggtaaaatctaatgtttttaattttgtcaatgtggtgaggccaagtcgattggatctttacaatgttttacaagtggcagaagcttttgaacacaatacttatcttggttttcctaataccttaggtcgatctaataagtctgtgattttaggcttcttgaaggatgaaattcagaaaaaggttcaagattgggactggaagcttctttcttatgctgggaaagaggttctaattaaaattattactcatcattacttgcgtatgccatgagtgttttcttgctcccaataattgatgtgtttaaagatttgaaaattctcatggtggcggtattcatttgatgagttgggaaagaatgagtagacataaaactataggtggaatgagcttttgtaatcttcgtgactttaatttcacaatattgggaaagcaaggctcgaaaagatttagtttggaaccaaaagtatgctacggtagactgtgctcttatctcatctaggagttgtcttgtgcaatggaagtcgacccaaaatagaggttcagatgcttcttttttcagtttttaaagctggtgatggagctgaattttgggttgagctgcaagaaaatacaatcaagataattattgatgttgtccttttttgtgatcgaactgcatttggttatgacatagttgctcgtgactctcaagggaaattaacaattgctaagttgggcagttttgctggtataggcgctccaaatttggttgaggtaattagtataaaggaag

SEQ ID NO: 70447 - DNA, 1241 bp, Cannabis sativa
gctgctacatttaatgttaatcgctatatatctttcactctctgaggtcgagttatgttttgaaaagtgaaaaactaattagggtttacttcaaccccacgtttggttactagattttcaaggaactttttagagctcacacagaatgcgcatttggtagggttcaacttcatggaatgaacaattaaaatatggaaacattcctcaagatgttgcacatgatcatcatagtccttagattttactaacatatcatctatgtatgcttccattgtaaagcctagctattgagagcccatcttgttaatgaatcattggtacgttgctccaacattctttagtttgaatggcatgactttgtagtaataagtttctctctttgttatgaatgaagtattgtctcggtccgtggggtgcatcataatatggtttatcccaaaaaagcatccatgaagctcattaatttatgtcccgcattggcatcaatcaacatgttgatatgagaaaaagggaaactatcctttggacaagccttgttaaggtccgtgaaatcaatgcggcttagaattttctgtttttctttgggaccacgacgaggttaaaaggctaagttgggtagtgaacttcttctattgattcgtttttcaacatcttttctacttcttcattcataaccttcttacgatccaggccaatcttccttcttttttgtttgaccataacgtaactcgggttgatgctaagccaatgtgtgattaagtcaagaccgatctctatcatttagaatggtcccatgaaaagatttgatagaaggattttagcaattttatgatttttttctgcactttcttttgtaaggtcgacctccaatgaatatggtctttcatgattagttggatgaattgagacctctcacaactctttgaccattggagtgtgttgctttgaagggtctaaagatctgattaattgttataattttttcttacaatgtagagccaaggtatgacacttttgagaacttatttgatctccttgtatctcatgtatcttccttttgtagggaaatttgattacctaatggtatgatgatgccactaccttcattgcaaggatccatgggcactccaagattgtattgtatgcctatgagcagtctacgaataggaatttaccaacttgttcactctgttggcataaataggcaattccacataacttttggccacggtgctttcccc

SEQ ID NO: 70448 - DNA, 1712 bp, Cannabis sativa
tatcaacatatttattaccaatccgagctagctactataaattacgactttattttgtatcccttataattcaaactattttgtatcccttataattcaaactaaatataataaactaacttaaatatataatgtaaacaaaccaacaatttctaataataaaaatttagagcattcattttcatatatgtatttcaaactatgaatcttaatttattttataatttgtaggtttaggaaccctaatgtaatctattatgataaaattaattcaattaactaacaagttatatttattcagtaataattaatcaagcactagtaagacaatttgaatctctctaagaaaaactcatagaattagtagttactctcaatcccacacttttcctatatcattcaattctaagtctgattttagattacctctctcaagtgtaaaacctaaaattttaatactaattaatggtgatcaagcattaataattatataacacaaaaattacataaacaaatagcaagaacaaacatgagaataatctaaaaatttgattcataatctaaaatagttccgttcacattctagaaaagtatgtttacttcataataataaatataataacaacaataatcatgttcataattaaacaactaaacagaagaatagagaagaagaagaagcaaataactctaatgatgattggtgatgattacttgaaatctcttccctcttgctcttcaatatgttttctaatctttaaaagtatttttgtctctcactcgtcgtcagtgtttaagctaaagaacgagagaaaaagaatattctgtacattgcatttcaagaaagagattacagaggattatatacagagttacagaaagaaagtagttacaacaaacattgactcaaaccactttctaatagaaaactactaactcaaaagaaagacacatgtttaataagactaagtcagctcagcagactcagtatccttgacaggccccctcaaacttagtgtggtggaacacacaacactaagtttgtctcgtaagaaaggaaattgcgagttggagatgggcttggttagagggtcagctagttgatggttggcagggacatgttgaacacatatctctttttgaagcactttgtccatgacaaaatagagatcaatctctatatgtttggtgcgtgcgtgaagcacagggttggcaggcagcatgatggtgctaaggttgtcacaccatatcagaggaggagaggccataggcagttgtagttcagtgagcattgagccaacttatttcagtcaccacagaagcaaggcttcgaaattcagcttctgtggatgatcgagagatagtgttctgtttcttggactgccaactaatcagattttcaccccagaaaatgcagtagccagtagtcgagcgtcgatcatcgggatcagcggcccagtcagcatcacagtatgcttcaagacgcaagtgtggagatcttttgatatgaagaccgtagtctgttgtgccagcaagataacagataattcttttgacagcaacaacgtgtgactgaaaaggattctgcataaattggcagaccttgttgacactaaaagcaatgtcgggtctatagttatcgttgcatattgaagagcaccaaccaatgacctatatgcagaaggatcttcaacagggtcgctgccataatt

SEQ ID NO: 70449 - DNA, 1053 bp, Cannabis sativa
tagggcacaaaacccaacagctggttcccaggtagaacatatatctcttttcctctattggaatctctgatgaacgcaatctcctcctacaactattgtctggtctatatattgattgaactgccttatcaactctgtggtttcacgtgactgggtgtttattgcctcttattgaaatctcatacatcctgctttcctatcaatccattcttggaaaagccttatttcctatgcaaattcttcattcatagttgcttgggtgtcagcttgattatgatgaagggtattggtttgattttgaatttgagatactgcttccctcaacttttgcagttcaatatcatcatcaaccgtcacttagggtttccagagccttggctagtctccccaacaccgtcattactgtcatttccagtatattttgagtgcctagagtaatgcccgtcccaagagaagtgttgtccagattaatcacaggaggatttcttagatttttaggagtttgaacattcaggttaccatgggatatgtagaatcagtaggtcgagttcttcgagttgttatcgccattcgaattaaataaaattattccaattgtgttcttgagttttgctcccaataaaagcaccaaaatattaacctcgcttttggtcaacgaaaccgagtcttaaaagcaacgagaaatgaatgagattcaaatagaatataatcaatagttagtaaaactaagaacacgatatgttatagaggttcaaccgtattattctggtaaagcttactcctatttttgttgcatttaacttgtgagtagtgaagcaaaacggatttaatctctcttgaaaggtttacaaagaaaatgagtagcgtaatgactctctcaaacaaaatgattcaaatccctttgcaatggaattgttccactgtttataagagaggtttacagcaggtattggtttcacaaaaactgtcaatccatgacaatatggaatacatgacattcctcaattatgagaaacatgtatggaaatctctttaaattgggattttattaca

SEQ ID NO: 70450 - DNA, 2126 bp, Cannabis sativa
ctcattcggaagatctatccgatgccatctaaagatatgctatgacgaaggtgtatcttatctggacgggtcatctgtccaacatccaaaaggcttaacttcgccaatggatccaatccattaacttggttgagcctacgattgggcctcgagcaattgagctgaaaccatattagaattatatgtgtcctccatctgaaatacgggtagtaggttccatataatttaagataataatttttagaaaatatcgctaactaaccatgaagtgtcacgtataagtgttaagcaccactgatgtccaataacaatgttcatatttttactaggttgataattcgtggtcacgaatcgtgttcatgttactcatttattaatcatgttaaaaattaaaatttaatttatttacgagaagttgttctaacacgatacttgtaacccgtttaaataaagaataatgttttatttgaattaactaattaatatatttatgataagtttgatatgtttacaaatttttctaacatgtttatgtccaatttaataagtttatggcattttaaccaacttgaggcatgttaacctaaaaataatccaaaattgtttaagaaaatctaaactcgttttcttatacaggtttcaagtatcatgttatcgtgttatcatgtatgacctattttgtcggctctaatttatagtagcaacttaccatttattgttgtttgatgatgtttacgtgctttgtttttcaagtattgttagtgatttatagcaccataaagagttgatgttttgtgtatggttaatagtttttcattcgaaggtggaaattcaaagatatagcccacaagaaaagagaaatagtatgtcatgtgaaaaaattccattattttttaaatgtttattattaatttatttttatttatgtaatttgtaggtattttgttggtgcaataaagaaagtgtaacgccctaattcttagggacactacgtgtgtgatttttggaacatagtttagtattagtagaataattatttaataaaatctgtgataataataaaaatttcactaaaataagatcatagtaatgacatcgctaaaaatttatttcggggatccctgttacaaaaattttacaaaaaatgctatatacaacagtaaatcaaaatacacattaggtacaattaaaaaacaactcctgagaactcgaccatacaagtcggataagtcgatatgtacatttgtgggagaagactatcgtctcatggctaccctaattttctcttgtccttacctacaccacaaagcactcatcagtcacaaagacttagcaagaaaagcaaacaatgaaagtatataacaatcagatatctaaaacaaaataataataagacaagttatatctgttacctcataaagtaaccatttttattgttgcttaataagacaatcctgatgccttaacccgacactcatatatctcattttcctaataaggtaacatcggtgccctaaccgacatccatatatctcattgcctaataaggcaatgccaatgccctaacctgacatccatatatctcattccctaataaggcaacgtcgatgcgctaacttagcatccatgaaccgttgtcattgtctaataagacaatatcgaaaagtagtaggaaacctaacaacgatttcaattgacgtcatgactttaattcgcttaacgataatcactgttcctttatctcgaatataatcgagtcataataataatacgtgtatcttaacatgctatgtagtatggatgtatttttcttacctcaagtttcgattcaagtgtatcgggcgacttgaatggagaaaatcaacgatctcgggcactgtgtcacaacaacaaaaagaatgattaatcacttaacctaactcgttcaaggtccttaattcatcaccgtaagtcccccttcactaaggtaccaataccctaaacattaagaaacacatgaaaaatgggagttctaaacatcaccaaaaatggtaagccgttttcgagatttcttggatgggaaaatgagattttttgctgttttttacaagaaacatgaaaccttgagtttcaacttctcaaaaccc

SEQ ID NO: 70451 - DNA, 1460 bp, Cannabis sativa
  modified_base (1125)..(1126): a, c, t, g, unknown or other
ggtaaaagttacttttactagcgcagtagcgaactgtgctgataaaagtgacatttcttgtaatgaataaataagaatacttaatgtactaataagaaaatctaattaataacaaaattgaagatttcaataatgaaaacaaagttgaagaaaatctaattaataacatatgagtatcaatttaaattatatatggcaacacttattttgtaaggtttacttggatttttttttgtactatcaatgaaaacactcttttaaaagtgttagtattggttattattatttggtctaaaaatattaaatttttaaatatgtgaattctttagcaacacttcttttttaagtgtgtccaattacaaaagtagataaataagttacactttttaattaagtgttgtttaataaatgttgctaaatatgttttttagtaggtggatacaaggaataaatatttaatggttattataataaagtagtgaagtattggtattatatattgagttttgagtggttattgatttagtatacgaaaataatttggtttaataattatactcttataaataatatattatttattttataaatatatttgtaccactcggacacgtatcaaccaaaggttcaacctttaaaagtagggctgcttgtcgctcaaagcttgttcgtttatgagtaggagtttgtaatatttgtctggcaagaaacgggttggtatgcgccactactatgctcggatgtaggagacaagatctaatctttgttaaaaaaaaaacataaatgtcactttggttacttggcatgtataaaaggtcgacatctgcgacatctcaagatggtagacgtccgtgttaaacctttcaagtacccatccgggtaaggtcttagtgagcttcccttctccaacccctccgggtccgagaaaggtagttcgccttccacgtccgggagtgtaaagaccgcatatgattaataccttagattattaaataattagggtttatgtaagagattttgttattatttataaaaaaatacatattatgagaatttattcgagttcatatatgtttattatgctattttgtgtaaattacttaatttctgtgtttgtgttcggannctgtggaaagcgacgttgggccttagagagtcgcacttatatgtttagaatatttatcggggtgttattgttgggtattagaggtattgtaaattggtcaggactcgtataatgtttaaactacccttgggtgactttgaatatttgaaatatgttgagggcaaaaaggtctttgggtaaaactttatttgtcttatttggagttgtgtctattgctgaatatgaggttatagattttagaaagaaaagaaaagaaattcatttgttttgcttaagttagaagatatctagaaaaatcttaagagaaagcattcaactctctctctctctcttt

SEQ ID NO: 70452 - DNA, 1002 bp, Cannabis sativa
caaaataaaagagtcattataaatagatagatagtgtattgacctagaagaagaacatacagaaaaggaaagtgtgtattctgggcttaacataagcccaacaaaaaaaaaaaaaaaaagctgcttcacactcaactttgttccttactataaatatgaaaaaacctcacataaataactaaataataattgcttaaattaaatctcatttctttaccttttctacaagaattaaaaatataaataaataaaaaatctgcatattagtcctataataagtttcccaacacaaacaaagacaggactcattttctcatcgccccatataaatttcctccaactcacactcaggtaaatctttttaatttatttcttttattttattatttaaggggatcatttttacttatatttattttaattaggtagatcgattatgattcttctgggttttcaagtaccctttttttcaatcaaattatggaaattgatttctgggattaccatttttgctaacgtttgtcggtttgaagcttcatgtttgaatagtttatcgttattgtgctgttaattagctaaaaatttcatgcaaaaacatagaacttgcatcacctagaaccacaagtttttttttctttgtatttcccccttttgttatttgattaagatttccctatcctagaattgggtttaatgttaacttatcgtattgtacatgttgctgcggattatacaatttttttttttttttagtgataggtttttgtgtaatttgaatgctttacatgttttctttgcaattgtcaaatgcctggaaaacagtattttgaaatttcctgttagcagctctccttaacagattcttttccttgtttttgattccaaatatatggtatttcctttgcctatgcagccaatgtagcttacttgaaaatcatgtgttacaatgggttttcatgttgtgttgcttgttttgagttagctgagattttttagattcct

SEQ ID NO: 70453 - DNA, 1861 bp, Cannabis sativa
  modified_base (1835)..(1835): a, c, t, g, unknown or other
aattcattttgcctgattcaaatcttaatactagaatcctaagaacatgcaaatgccacaagattgaagttatcacgacctaactattcaaacgacaccaatattcccttggtaggatgatttcgacctaacttagtcctagaattacaactctatgggcatcattttaccatttgcatgtatcagatatcctagacctagcttgaactaagtatttctaccctagataagaaattacaaggttcaacgagattcaggatacttacttgatatacggttgggagatgatgggttattgtgaaaatctccccaagaattgcgcacccaaccgattacttggtcaaagtcagattgaacgtcgaagtcttcgtcaggctaggggtggaagtactgaattaagaggtcaaagaattcgtgctttcactgataaaaattgaatgctagattgaagctttttctcaggaaataagggctttggttcaaaatttgaaaataagggtttgaaaagtttaaaatggtaaagaagaagaagtgattcacgttgggtctatttataggcaagaaaaattcatgaaattcaaaataagcagtctaaatcctcccctcaaaaagcatgatttaatctaatggctaaggagatgaaagatggcatttaaaccctgctcaaggcttttatttttcatcatcacctaccttaggcccaacgtgaattaaaggatggtcatgtcaatcgtcctaccatcagaataatttctcctagaaaatgcaccccgtggagatgcgtgttaataccgattataataaaagcatggcatgaatgcaatgctagtggcacccagtttcttgacctttccatcaatgatagctcaactggaagaacacctccatgttctcactagtcacccacgtgtcataaatatgcctcagggacctagagaaggattgcaagctttcgtaactcaacaagttctaaaacattcgggataaatgttattcatgtttctagatgagagacacatggcatgaaaagataagtatggcttcaagtagtcattagccaagtcgcctttacaaggtcaggtcacgtaaaagctttgtaaatctaggaacagcccaagatcagaggatgtacatcctgtcttactatgactttcgagacacggaagtcatactgtccctctgggagccagagaggactaaacatatggtatgtccaacctatacctggaagacaactcgaagggcctatcacgaccactcaccatgcagaagaagccaggcgtctaccaagaagagagacctagattgctccagtgacaattatacttttttgatacatgattagatcttgtcccctgcttcaaaccatggtagtgcatatgccccacctctgaacacgccatttttcttgagggtttttctaggcatcttcttttcaagatgaaaccttttggtgacacgtgtcctatatctttggaggtcccctattgtccagttacttctacgcacaagcacaaaaccttcctgggggcccaacagtcaacttattacatgtactttcactccaatagtgggcttattgcaaaagccctaggcgatgccctttagcctataactacccttttattttcatatgaaagggggatcaagaacaagattgcagaactcctgctaaatttcctctaagctttcttcttcttcaagaaaaactaagagcgcagagttagggtttcttggaaacactattgtaaacacattatacaagcctcttaaggccaataatactgactcatgggctaaggtttattaacacatgtgttggaatttattttacnaggatcttagatctacttacaagtat

SEQ ID NO: 70454 - DNA, 1874 bp, Cannabis sativa
aatttaaaagacacacaatgagatttcattatttaaaaataaaaatattggactctaagtttaataacaacataagaatataatagtttaaaatctaaaagtttaaaaacaaaaatgtcatttatttctaaaacataaataactgtgcccagcctttaacatgtttcgtccacgcctcgagcccgcacaactcattgttttgctttgccttttcttgcacaccgagtgcccatgagctaacgcccagtaagaagagctatgtaggacataaccccccataccaaaaaatcatgaaattaccaactatacataaataaatatataacataactatcattgtgagatatgtatcacaccaacataatacgtgttatacacatacacactaatattaacaagtcatgttgatcggacatgaaatgtaattttctctgcctgcgctatactcacactcggcattcccacggtggcatctagtctagcctgagctatactcacactcaaccgttcccacgagatatcgttaccctgcttgcgctgtactcacactcagcagttccgtggtggcatcctattatcatgggttatacacacccaagataattcctgaaagtgatatcctcacacaagcaggtataaactagtagcactcccactctattgtctaagcatgtctactattaacatatctagcactatctttacactaatcaatctagcgtaacaaatcatgtcgtaaaatgaagtaaatacataattaaacaacaagaaaaacaagcataatctacaccctgtgcacaaatgtccactcttcttatcttagactctccctcccaatgaatcaccaccctttgagtgaagccgtattcctatgacaaaattataaaggcacataattaaggcacaaaagaaataatcctattgccacatgtaccttaaaaaaatacctttgtcatactcctttataatattgtctaaaaccattaattgtcatcttaaataattaaatacaattttaaattaactataccattaatacaaaaatccacgataatatacatatgtcaacactcaccacaaccaaatatatatgtatataaattagtaagatacaaatacataaggctagagtttattttttttattgaatgctactgttctttcttgaaccaaacatcaacaactcacatatgcacaaagtacacacctagtggatcctccttagtatgggtttatttatttttgtctttataatatatatatatactattcatatatactagaacataacatcgttaattctaataatcaacttcaaccatcctacaccaaaataagccatcctctaatctaagcacagtccccaaatagtatatttataacttaaagttatactttaatgtatatcatcacccaactacatctctagcatatatgtcccatataactttaaatatgtacaatttaaatagtattatttttatcacaacctaataatatatatatccctacaactatcaaaactcacataagccattatatatataacttagaaaatcgtaactgtgaaaactcaaaatgtatgtatatgtatatacaacccaaatgtgtatttatatgtaatccaaaactcaaatgtccattcatatatatatatatatatatatatatacacacacaaattgaaaaacgtgaacacatcctagaatcaacaaaaagaaataataaaataaaataacatcttccattcatacatatatatacacacaaaacaaatagaaagatgagcatattctagaatcaaacaaaaagtaatcataaaataaaataaaatcttaccaatacaaaaagttaagtctctatcacaacaccat

SEQ ID NO: 70455 - DNA, 1638 bp, Cannabis sativa
aaaaaaagtagtatttattgtgagctaaaatttggtctgtgttatattttgtgccaaatttggctcaatttttagcttgagcccaatttgacacacattttatattactattagagttaaattttagtaaaatatttttaaaaataacaatacactatatttataactctggagtaaaattgctctaactgcataaagaataattttcctttaattaaatgaaatatatctaaaaacaatgtcgaagacttttttcatttattttcaataaataaaatataatttttgaaagaaacaaacatctattttttttttatcacatttaattttgacttataaatagttaacctttttgagaaggaacaatactttttttttgataagattgagaaggagcaatactcttaaatagacatttgaacgcggtacaatatttcacatcgaacaaagttctggtcaacccataatgtagactgcatatgtagtattaaataatacagcattttcttgtgtcacaatcaagacagattaattaatttatgtgttccacaattttgatacaagcatgtatctgctgcatttaagatgagtcatactgaaacatacaattctaaatattagctaaattaacttcaagtgcaagggcttttttgtcatagaattgttcgaggtgaatatatttttttatgttctcttccctccacaattttgatcataggaaaatgacatattactgtcattgttttgtctattgcccccaacgtgggcgttggtccacacggtttcagcagttcaaaaaactcaaatctttttacaaagtacttgacttttatggctgttggactttcatagtaggagaactctcactttttctctcatttataaagtagggtttggtttgtgtttcgattaatccaataaattctcatcaatcccaatattggagattttagacaagaacctttttattatatctctatataagaatcaatctcattttaaaatctcctccttttcacctatattatttttaagatacgtgttttcccatcatttatacactacagatttatttttctctttatattcaacttttacatttttttgttttgtcttttactacacgacatctatttgttacccttaaaaaaaacaataataaacatctatttgttgggtctatctctccaccacatgtggatcaggtaccgaacataaagttttttactatacacccggtaatttgagataaaatgagtggagttctatgttaaatttaattgacaatgagaggagtagtatattcatcttatatatgataatttatctccatacataagcaatgtgagactaactctaatacaccatcttcacgtttgggcctaaaaaatataggtataacgaaggacctttaagagatcacagagccgaacgtgacatttaaaagaattctacaaggccaaatattaggaaatttgttagtgtacacgtcggaaaatttttgaattttaaaacaggtcaaagacccctgttaaaaatatcgtaaatctgtatatagccctaattaattcatgagaattaaacaataagattaaggaatagcggaagcgtaccggagtccatagaatcgattttgta

SEQ ID NO: 70456 - DNA, 895 bp, Cannabis sativa
  modified_base (852)..(868): a, c, t, g, unknown or other
aaggtaccctactttactagattacccttccttgtattcatttttactattaagcttctttttttaaaagaaaagtgtaatatatagaataataaaattagattttgtgatcgttacaaaataagtatgacggtaagtcttcaacatttcaatagttgtacctattgtgaataaacacacatttagtcatgttatgggcaataaaattacaagatcgattgatattagaaaaattacaactaacaaaagtaaaagaagtgtatcggcagttacgcgagtagttttcaatctctcatttgaactcagcccaataagagagttgatcaccaccttagagtcactttcaacaattacaaaactgcaccctttctcagtcgtcacatccagagcaaagcaacaagcaacaagcaacaacttcaccactaagagcatttgaaaagtcaagccttgacgtagtcacccaacagaccgcacccagatgatttatagcgaccacagcaatacacatgtgctccaaacctactctgacatcacagttcagtttgatccaaataattggagggggcaccaaatatctctacgcattgcaggttaggcaactgagaaagaaactcgatacttagtatagcaaaaatagatagagtcaatgtaaaacttaatgctacccagattattattatgaatcttatccgttccgtgcccgccaaatggtgtccaccataatggacgcatactaaaaaacttcatcacgtcaatgcccttgtcttttaaattccaaagaaactttacccaatctcacatacgaattgtaatgaccgctctagtaatgtggattagaaaaggcaattagcnnnnnnnnnnnnnnnnntattattatttgtgaattaatttattt

SEQ ID NO: 70457 - DNA, 1441 bp, Cannabis sativa
aaagactcgtgaactaaggctcataaatgccccaaccacataaaaatctcatgcattaaacttcctacagctttcttatatattattaaatcggttgtcgaaaacctcagtcaacaggtacattttctattcgtttcatcattcacgaaaaacttttaatctaattttttgtgtgtagtaattatttagaatcacttgtaaatttttaaaatttttgaatagtttataattccaaaaataatattcaaatttgttgttgcacgactttattattttgtttttataaacgcataataaataattatttgaattttattcctcagtactaaaattattcagaatttttttaaaatttagtagttctaatatattatattataatatatcataaaaatgactacaaaacttcttttgatattgaaatagataaagtgtgtaccaaaataactttttgtttacttatttacacttagtgagtgattgatactacactcaattctactcctataaatattatttacctctcttgtctcttagaaactttctttctatttttctttctcaatgtaatttggcttaacatgtttaaatgtaaagcatggtcttttaatataccatctaattagaagtagggtacctatacttctaatatattttcatttcaaaaatacctttacattttagaaaagcctctctctctaactctctcactctaattaagtctctccatctacaccctgaagccccaacatccacaagatcaaccaccatgcaacctctataatccccacccatttcgagagttctcaacccatcactcattttctgtgttttattctgggtttcacgatgttactaaacatcgctacacatcgctaaaccattgaatcacactgaattattcacgataatgagtgatgtcctttgaattttttagtctcatattgtaaatacattgctaatcataactaaatatgcaaaacatctaatcatcgctaaactttatccataaccctaaatttggtctatcattgcaaatacatcgctaaatattacaaaaaaaaatatatataaaaaacgagcaatgggtgggaatttggggagtttcagggtggttgtgtgttgtacccgaaagttagtattttaatatttaaactcacaagtgcacgaatattttcagaatgtaatgttcatgtaagtatgaggtcgtacttgtggcagttaactaacataaaaaattattcaaacaaagaaaggatattctaacctagttccaaatatttgatgggactttgttttataaaaataaaagacaagtaatattaaaatgaaaaatgaatgaatataaaaattggttttcaagtaagattcataaaataaaattattaagatattagaatccacaaaatacaagttcaatggtatttacaagtatattaat

SEQ ID NO: 70458 - DNA, 2451 bp, Cannabis sativa
taaatataattaaaataaaggctgaaataaattaatatacaactaaaaaaatcataactaaaatatttaaatcataagaaataaaaattaccaaaaaatgagttggtggaattaaataaggcctaaaaaattgcatatcaaatattattctttcaattaaaataatattcttaagtatgcctaataataataattaattataagaaatagattaagacatttcaaaaaaattaatactaacagaatatacaaaaataatatgagcaatgtccttataagctcaaaaactaatacgatgaatatataaaaatataatgctagaaaaatattaaataaaataaagaaaccctcaaagaaattatttgattttaccacactattaataaattatatataaaatatcacaataataagttttacttaatcaataataaaactgcattaaattgtaataaaactaaaaacacccacttttaatgggcaaataacaataaaacatacttataatgtggagaattatattataattaagaaaattaatttattaaatgagtataaatattataataaatatttaccataaatatccaacaattactcaaatcacatctccttttactgcacatagagagtgcgccgatccacggttccactcgccgccaccatctccggctaggactgagttcatgagaactctacccaaaatgatgatggccatgacgaacaagacaattttctatgaatttggcaccatatctaaattttttaagttttctttatgtactggaaaacttcagtaaaacagtctaataattttttaataaaaaaggatccacataaaaatatatatgaaatatgtactataatagaaaagaaaagacgataaagataatatataccatatactataacaccaagaaaaaagaatagagtttatcaaaaccaatgataaaacaataacagataattttctaaatataaatattcaagcaacattaaaaccaagttttgaatatacaataaaataccatcatcatcatcaacaaaatatttgtacctgaatttcgcagcgaatcttagagaaatagtagaatcgttttccaggcaaatgacgaaactcaccccacagtcagagtctccaccgtctcatcgttggactcgacgtagagtggcgaccatccttcactagtggcgtcgagtctccgttggccataatacaactccaactcacttgttataaactctcaccatatcagagaccagatcttcatccttctgtctctcactcttcttccttcttttgaatatgaaaggattaccgaaatgcatgtttttcctcccccgaagcctgttggacctggagaagcttcagaataacagttctcctttggtgattcagattgtatgatggtgatataatagtctatatacttgaatacacttaataatataaatgcatgaaggagggagcaacaaaagacattatcacagaaaaaatattaaaataataattaactttaaattgtgttacaaagtctaccaaataattaaataaagagttaatatttggatataattgagaagttgtaataataaatttaatcaacaatgaatcaagaaaaaaaaaaaacacacataaatattatattttacctcttaagcacatatattcaattaatgatgatgttaagatcctaaaagaaaattatatacccaaaacactgcaacaaattgagagaagaaaagaaagaggtgagattaatgactgaaaatgtaatagaataatagctagggttaattaattagtatatttatacttaatattttctaagaaaaaattaaatagaataataaatatttgataaccatatgtccaataaattattttattaatttaaaagcataaaggttaaatatctaataaaattagaatttaaaaaatgtacattaaaataaatttttgaaaaatgttgttttttttactaaaagtatatctgaaaaatagtattttttttttttaatttgcttttaatttttttggtaaaaatattagaatatataaatgggagaaaagatagttttaaaataattttatagtattatgtaaccacttcatatcaaagctttaatttgctataaaattggtaacattacaacacaaactattgttaatttttttttcctaaaaaaataacattaattaatttatttaaatattcactaaattaatgtattaacctcgtcgaattgtttttatttaataaatatacaattctatttctaaaaattaataatatatacttttttttttaatgaaattacaaatacttttactttataaaatattaagtttattataacttataattatgatgaatcatcatactattacaatgtatgatttaaattttaaatatttatattcgtaaatttatttattataagttatat

SEQ ID NO: 70459 - DNA, 2130 bp, Cannabis sativa
ttctattccaatgcttgtgatttgagaagtagaaagaaagatgaagtaacaacaacaatgcatgtgtgccacgtcacggaaaagtaaccattttgaataatggaccacattatcacgtgaatattagggtcattatagtacttttacaatacacttcgtcaaaataagtagatgcaatatttaactatttggatatttataaaaaatatttagtgtaaatttttatattcgtgtacattatattatttaaaatatcttacaaaattttaagaaatttaaaataatatacaatatagaaatcaatgtttaaactgtttacttcacacgcgtataaaataaaaaaatcacacgtgcaatagactctttaaatactgtttttgacgtgttaaatttttttaaatttttcaaaatttttaaataactataacaactataaaaaaaaataaactaagtaattttttaaatactggaataaataaaagtgtatcaatatattaattttaaaagaatgtattgtaaaatttatgtaaatgaaaagaaaaataatacaaatagaattttatttatttatttatttttcttgaagaccttgaagaaataactaataaaataaaattatagagatggatagagaaaggggcgtacgtgggtatgtttgggtaaaaatatcccatatgcttggtcctctaccaccttctttagcaccaccttcatacttttattattattattaaaattaaaaaaaaaaaaaacccaaaaaaatatcagataaattaaaatgttatcttatttggaaattataaaataataataatgatgatgataatgataataaaaaaaaaaaaaaaacctggtaagcagctgaagcagttccgaagagaaaagccttcggaaaagaattccggttgagaggagaaccggaggaaatggttgatgtgttggaattctctacagttcttccaattacaacattaattccaaaaataaacacaacatttataaataataataataatatttattattatttcccattctttctttctaatctcacccttttcttttcttattaactatccttacttttatttatatgtgtatatatatagtggaaggaaataatagtataaaaaatgtggattgaggatgacctcttttagaacaaacaatacttaaattcccaaatgtgtcctcttctttctttatttatttattttgttgatcaacaactcctctttattttcacttatatatttgtaaaatttctttttcatttctttcttctaaaatgaaatcaaacaatatattatatcatatcaaattatatgcatagtaaagagaactctcaatattatttttactttattttgtataatacattagtgagtcataaaaaaaatatttttgactcttacttaaaaaaaattataccatacattactttttctattttttatcttttccatatcatttaaataatatatttttttatataatacacatttacaaagataatttttcatgatcttttaaatattttaaaagaatctctattattataatttcatttttaggctttttttttattattattggaaagaatcatttttaggtgttttacaaggttttcttgttttcaatctgttcaaataatgtaattggttctctttggcaactaattaataataaatttctagtgcaaaaagaatattttaatgatttaatttcactctttcttttattagcttttgctgtaaattagtgtaatatatttattaattatgttattagtttttttaaaaaaaaaataaataaattatattgttagttaaaacttagaattgctcttgtttgaaattagataaatacttttgtcaaaaaaaaaaaaaaaattagataaatacttgtgattgtactaaaatataattacacaacctattatttcacttcatacttttcaaaaacttgtattagttgttttgttaaagattattaaagttgtacatttggcggtccggtcctgccggcttttataaaagcctattttttttataggctaattaagatttttttcctcggactttgacatgtattaaatcatgttctctgaatttttttaaccgttaaaaa

SEQ ID NO: 70460 - DNA, 1920 bp, Cannabis sativa
aggaggttcgaacttcctctacaatactagagagcctaatcccccttgaacttcttccaaggaattctagttcactaatcaatggaaaaaggtgttacaacttggacaattataagcaattacaattcaacaccctccttgaatcaagtcataaaattgactgtgatcaagtcttgaaaaccagtagagccctataggaaattcccttgaagatcatcatcttccctttgatttctctatctctttccctagtatcatgtttaagactctctttcacacccttgattacaagtattacactcctttaattacttaattaatacaatacttaagcagctatatatatagtagtttagaactaactaaccaaactaattttggaaagcctaactaacaaaactgtcaagagacatagtaattgtccaacttgtcatgattaagattttgccatgtcatcaatctaatggaagttaagttaggactgatcacaacagttgtagtgccttgagatggcacaatctccacatactgggagagctcacaaagaaaggagtaggctacacaaagctaataaataaaggaagctgggagaacccaacaaactagagccacaacaacaacataccaaactaaatgtcccataaaaaaaacattggcaaaccaaaggtcagtgacctacacaactccatgttcctaggcagaaaactcgtagatcaacggaatatcaaagcaataaccaaagacccgagatctcaaagcacaactaacattgagataggagaggatccctaaacaaaggaaacccagagcaagagaaaggtgaactcaaaaaaattgtaggtttagagaacaaacctttaccggagtcggcatggaaactagggaaggagacaacccaataactgctgcactcgcttaggaggactgagtaacccaaaggaaccctcgagaacttgacccaacaaaaacaagaaacgcaatcacgaaacccaaattagaaaaaacccttaggtagcggtgacgagaagaaagcaaaaggccaacaaactctggagcagattctaactttctagacgctagactaccgtgaaatgactccaagaaccctaaaagtaggctccagagaattgaggggcgattcaaaatcgccctatgtatgagagcatgcaaccttttattattatattattatgtatttaaatattttgtagttgtatggaaattatccattgcagtaatataattataaatgtcaaattctacttgctcatcataaatgcattgttcttaatatggtttatcctatttttcaagcaacaatattaatcagcaaccaaacatcttgtccggactccggagcccacagaagaagttaattttgtgtaattattaagcaattatgccatttggttttattaaattattaaagaattaataactttagttgctcacatcaaatgatttacaaaacaaaaatgatggtagagtagaaggacacgaaacccatcttcaatccaagcaaatattctttatttatttttcaattcaaatgtattgaccttccctaactaaaacattattttattgcaaaatctcaaatgtatataggagacaattatattagatgtgttattttcatataatgacttaacaatttgaatggataaatggataataaaaaagaattaaattataacaaacagtttagctatatatataaagctagctaaatcatataatatagttgcactaatgaaatagaaaaaaaaaaaacaatattttaatggaatgatcttttactattttagtaaaacgataacttactattatattttgaatagaataaaatactattttattatgagatataaaaaaacttaataatttttaatcaacttttttttatatattttaaatttt

SEQ ID NO: 70461 - DNA, 1647 bp, Cannabis sativa
ttataaaacacatttttgttttttaaaaataaaattttaaaaacaaaaattttacttttaattttttgattaaaaaatttaaatacaaaaaatttatttttcaagtaggtaagtttataatgagatttggaattatttggtaatctaaggttaaatatcaatatttaaatattattttattaaggtacgatatcacaatatatttttaattttattggaaagacgcgtaaagggcgcgtaggctttatatatacttttagagtgaaaatgaagaaataaagtaaagtttatccgataaacagtcacgttcattgagttactattattattattattattattaatttaggaggttgaagacgaaccatgcataatcaaaacacgtatgaaatccacccacatgtggagggttcctttgccactttcaataatcattggaggccaaatattattatttagtgcgttaactatcactttctaccacattctttattctttctaatttactttatacatagcaaaacaatttgaagtttggtcaggccaagtgtgtagtaaaaggaattttattttcgagtaactgttctagtactctgagaaagtccatcgaaaccaggttgagaattaggggcattaaagacacggagaaacacttggccgcaacccatttctctttggtcgaagtaagaggaaggacttcaactttctcaaaactaagctttgtgaaagactttgaaggatggaaatttagatctttctcaaaggttggtagaatggtgtacatcaattcagtggccttggccatgccgacttactctatgtctacctttaaactcccacttatctcttgtcgtgaacttgatgcgtggttagaaggttttgcagccaaatcgtggaattctttgtgccaaccaaaaatgatgggggggcttaggtttcaggcgttttgaagacattaaccatgctcttttagctaagctcgcttggcaactagcgagcaaagttgacaggtcgtggtgtaatgttttcaaaggcaaatatttttcgagagactctttttggagtatacaagagaaaggctctgacagtttcatctagagaggcattttgagtgcctgaaaaacgatttgcgatgggggcttacactgttatagcatctggggaggatgtggatgtttggtggcagccttggataccttagttgggttatgatgacttttgagaatcgatggaaagcattagatccaaagctcctagtctaagatgcgtggctagtagatcaagaagttggaattcgggttatctttgcttccaaatagcaaggaatgcggtctgtgacactcttatttggaaagattctatggttggaaattttagtgtaaaggatgcttattgggtagatcaaaaggatagatttgggaactatgatgtgctttggagatggatttgagattcaaaggttcacccaaggctgagtttgatgatttggagggcctactccgatgttcttccaacgggcgacaggattgtatccttggaggtaaactcttgtcctgtgtgtcactctgctcctgaaacctctctgcatctgtttactaggtgtaattttgcggttgcactctcgtttacttctcctatgatcgttag

SEQ ID NO: 70462 - DNA, 1574 bp, Cannabis sativa
  modified_base (1412)..(1413): a, c, t, g, unknown or other
aaataaataattttttcaaattaattaaatagaaaaaagataaaaattgttaagacaaaatttttcaagataagatttgtgaatacaaaagttgtcaagacaaaagataccatctttgtcctaaaatagacaaggtaggcgcctaaggtaatgtccaagagtttgtctttttggattaattaattatttaattaatttaattcggtaaagaggtaaagatctaatttgaaaagtggctatagacaattcaaggttgttgagatattctagttgagagattccctcatatatatcagtaatcgaaccaattctcaacttgttatgattaaaatttatcaaaaaaaatctcaacttgttactaaactcgcccttatgaatgtcactatctcatttactgtaggatccaacaccaccaagaaaggtggcatcgggactttagcactcaatgttgggaggtcagcatctgagcttccaccaccactcttgcattcctcggtgggcttggccaccccgacctttcactctccctctctattgagaaactcgacaccttcgtaatcaactatgacattcccaagaatattgagtttcattatctgaaatttccccttttatttatttttttattttatttaaaattatagaatgaaaagtttgacaatgttgtattgctatttcaattttaatcttaggatgttcggtttcaattcatgaacagagtgaatgtgttgaacaagcagttgaatttgacctacaatcatacgagggttgataaccagacagctttggatgcgacccttttgatcgatttgactaacaagctattgggaagttatgggtttggctctggtgattgcaagctcaagtacaactatgtctatggaggattgaggacgttcgagccttgctatgagtttacgaagaacttttgggacatttccgtgtctcaaaggattcttgatggagggttgaagttgctatgcaagggctaaacatagatggaagatttaaggtacttaattatgcatagtaggtgtatgagaaattgcaacaataaaatcacaaaaaagaatcacagtattgttcactgttgtctgttagtgccactatttttatacattgaagttggtctttcctttttagtctatgtatgaaaatttgcaaaattttgaatgatatacattgaagttggttttgaatctctatgataatttatctaaaatttaaatgtatattatccagtcacaaagttattatatttcttttttctacagaagacagggtcaatgaacttgtaggagtgttcataaaatagttgatccaatctaattcataaagtgtgaatattcgcacttgtgcggatttgattggaaaattcaaaatccgcatttgtgcggattggatgttgattnncatgtaaaagtaaccaatcaaatctgatccacacatttataaaaatattaaaagaaattatatatacaaataatattttaatgtaaagaaaataataatttaaaagtctaatgtatctaatataattatatttcaaaacttaatagattaaatatatattc

SEQ ID NO: 70463 - DNA, 1485 bp, Cannabis sativa
tagcacataaatcttacattggaaagtactaaaaataacaatacactctcttttctctttttagtactccattagaattgatcttacatcacatatatagagtaatacacaattggacatatatctagtcgcagttattggacacataacaactattttatgagtaaattgcagccacaaatcccctaaagtttcacaacacttgttacagaaaacaaatgcatggaaatagtaaattgctaataaaaaacaaattttggagattttcctatcaaaaaatcagttttggaggttagttgcattgtaatgaaactttaggggatttgactataatttactcttattttataaaaatatgagtgctaccgtcaacttcttattaaaatctcttaatccatctccgtgctcaaaaatatatgtcagaatagtttttttttcaaaaaaaaaaaattcatagtagtgttcgttttagttacaacatcatctttgtaaattttggaaattttcaaatagtttacagtatcggaaataagtttgaagtcttttgaacacgaatggtaaattggaactataaactatttaaaattttaaaaaaattacaagaatgatattgtagctataacgaatattatctctgaggagtcaaatacttttatccctaggcatttgatatctgataatgctatgattttggcttcgagtatctttatgcaattaaaaggcataagaagggtatgaaggggtttcttggttataaggttgataaaaagcttatgacagagttactgagccttctcaggtgcttagacaaggggatcctctctctccttttttattcatgatttgtgctgagggcttaacatctattatcaagcattagattggtttgggtaatattttgggtctgacttgtttgtggaagagaagggcctgtgatttttgattatctctttgctgatgacaatttcttcttttttgaagcttcggtggaatattgtttccatttcaaagaaattttcttgctttatgaaaatgctttgggtaagttggttaatctgaataagtttggttctatttttctacaaggatgcatgcagatacatgtgtttctttggcttgtatttttgggttccactagttccttgttttgataagtgttggtttttatgccctaaattaaatcttttctatgtaatttacatttaataattccataaaaaaaatagaaaatcatttatgacgtagtcaattgcttagttgacaagtcttgtttcaggtgattagatgtttaatatttaaattttattaaacccaaaatatataattattcacaattaggaaaatatttatgattatatgattcaaattttttgatcctgagatttatcagtgaactgaatttacaactgacatgataattggccaaatgtggtctatttacactaaggaaatgtggtacgtcttttccaaggtgttgacaaaata

SEQ ID NO: 70464 - DNA, 1344 bp, Cannabis sativa
aatatatattttaaaagttgtggcgagtctgagctacaaagagctggagaatgttttactcttgcaggatgctatgagcttgcagctaaagcctatgcaagaggaaatttgttctcgaagtgtatagatatatgcaccaaaggaaagctatatagtaagggtttggtgtacatagaacgctggaaacaacatgctaagaaagaaggtgatatgaacactaaagctgaagaaatagaaaaaattgaacaggagcttttggagagatgtgctctcaattgttatgaggttaaagataatagatccatgataaattatctcaaatcatttaaatcaatgaatttagttcgtgactttttgcggccattaggttgctatgatgaacttatgttgttggaagaacattcaggaaattttatggaggctgctgaaattgcaaagctgaaaggagatgtacttgctgcaataaatcttcttgagaaggctgggaaatttaacgaagcagcaactcttattctttcctatgttcttgccaattcgctctggtcatctggtaaaaagggttggcccttaaagttgttcaaacaaaaggatcatcttttaacgaaagccaagtcatttgccaagaacgtgacaccggatttttatgagtttgtgcacacagaagctgagattatgacaaatgagaagactgacttagccaagaagaaaaatcaaatgattgcttcacagagtaaagagagtgttagaggtgagatcttatcatcccggaaaattcttgatgctcatcttgcttcttcaaagctggcagagtatgtctgggaagaagatttagtacatgatcttatgaagcattcagaagacttgatttccaaaaaccagatttcagtggagtcattagtctacttctggaatttttggaaggacaagattgtcaggatttttgaatatcttgaatgtctacagtctcataatgttgatgtatttaaaagttatggagaattctgtttgagctttttaggtgttttgaaacagtctcagaatcagcatacgaattttgtcttgctgaacactgatgctgcttgggcaagaaatgtagagaaaagatccgtttgcagtaatggaaagttggtttctatcgatgtcttcgagtttgtttctgctgctaagaattactggtcttcagaagttctctctgttggttttatggttctacacaaactagaggccatccataagtttgtgaccgagaaatctcatccagttttcaggaaatgcaggactctttctcttatgtatgaggttgtacaatttcttttagagtccaagtttcttaagagaacacat

SEQ ID NO: 70465 - DNA, 3320 bp, Cannabis sativa
  modified_base (434)..(439): a, c, t, g, unknown or other
ttttttctctctttttctaaattatatttatgtgggcaacaataaaatgaggaaaaaaaacgaccctcgaacctgaacagagtcggcactgatgatttctccattgatgcgcttggctagctccaaggcgagtctggttttgccggcaccggtggggccagatatgactatgactttgtctttgtcctttgaagcggcggtggtgaggaaacggcggcaacgagggaggttgagagatggagctgagcggaggagaagggtttcaggggagtaaaggcaacatgttcggattgtagccattatcattgctttgctcttttgttttggaaaatagaaagaaagttcagtgtgcttttggatagctttataaattttgttttttttttttttcaagaataataataaattggatcaaaataataataataataatnnnnnnaataataataataataatagttcttgtcatttttacttgtatttaacccgtttaaattttggtagtaaaattctttaaattactgaatcagtagtaaatttaaggtgccatccaattagttgttattatgattgtttatgtgcatactcttgtacatgcgacatctttattttttttaattgctactagcaaagtgttgaggttgacagagacggatccactaactaaaatgttattttttaaaaaattaaattaaattttttaaatttgataattatggattaaaatagtagaaaaacttcataaattaaataaatctaataatagtaattataatataagtataaatatttttttatgaaaaatgaaccccacaaaataaacattctttagagctcgtgctctttaggaaggtgataaggatttttgtttttttttataataataataataataataataaagataaataggggtataaagatgcaaagttttaagcttatgaacgaaataaatataataatttttttagcagcataagtacccaatgtttgtaaaattataatttttgttcaattttgtcatcacaaactctgctaatgtattaaagaagacataagtaagacttagattcttaatcattaaatatgggtagaaacatgtactatcaattacttttatttattttttactaaatttaaaacaaaatatgtatttggtacttatgtcgcaataataataaaataattaatttaaatttttatccccggaactttattatatactaaatcacgtcccttcaacttttcagactattataaatttccttaaattattgaaattgttatctgattttgttcaattttaataatatatttaacggttcatgtactaaattatcttcaagatagttatattgaaaaaaattgtctacgattaaactcaagtttttatttttactattttgtaaaatataaaatatattttatcacttaacaaaataaagagatcaatcagtaacttttataaaatataaattcaaaataatatttacccaaattgtaatttacataaatataataatttcacacaactgtgatgttattatatgtaatgtttaggcatatattattactctcaaatctccatagttcaaaataatctcattaactaaaaaaaaaagaagaaagagaatgattatttaaaaactataaattaagtttggttatatttcaaaatatttattatattcataaaaatattaaacattacctttctcatataaggattccaccataccaacccaaaaaaaacacctttaaggctttaacaaccaattaagagatttgtttgcttgatgacaaaggactagactaggtagctaattcaaatataatatattcacacattgaataaaatagagtcaccatcatcaatgtttctaattgttacaaaatcattttcaaacttctattttattatgaagataattgttaatgagtgaaaaacaccactttgttatattattacgtgtaattaagtattaaattcaacgtatattttaatataagaaaaagaagattcgaactttaaaattttttaataactattatgaaaacttgataatcatttgtagaacgatcctaagcatgtttaatgggagaggtaacatttataattgtcaaaatatacacatcattctaaaatatatatttttttatttttttctctcatccacataagattcgtcacctcttctaaaagttgtccattatgttctcacatcacattaaattaataatttttttaagtaaaaaataactttttctaataaaaaaatatcatgcgatcattgagcaacacttctcataaaattagtcctaaaaattgaaccacattgagtatgttataagaccactttaatggcaaccttcacaggaaatgctctaacaattctttgagcaaattatataaatatatatatatatatatattaaatgtgattaaaaaatttgttaagaataatcaattaagcaaaaacaaatacttaaataaaccacttgagaatgaccaactacttccaaaattaatagaaagacttacttaaacacaatacaatttacttacttgatcccaccaactggttgttgcaaacaatgcatggtctactcaactaccttagaactcaagttaagctaactaaacaaaaccccattttcccaagaaaaaaaaatcagagagagcgagagagagaaagaaaaaatgaagcaaatagtctctcttgatagaaagattcaatctttgtaccctcttgcattggcttctattctattgttaggaactacaaggttgatttttgatgggttaaagagcaacaatagctatgtattccagaaatatggaaggcaaactagggcacaacaacaacatgtagtggtttctccaaaggatcttattgatgagagttgtaatgtttttgaagggaattgggtttgggataatgtgtcttatccactttatgaagagcaaagttgcccttatctggtcaaacaagttacttgtcaaaagaatggaagggaagatagtttctacaagaattggaggtggaaacctaatgggtgtgatctaccaaggtaactaactaactaactaataaactctttctttcaatattgattgggttcgattatggttaggatcgtacattatcgagtcaccacagagtttctcatgttttgttagactcgtttgatgaatcgtgttgataaagtatgatagggtaaccaattgggtcatttacaaaatcaaaacccgggttttcccttaaagcatcaaacattgtgtgtgtgtttttcgattgaaatgctttgtattatccatt

SEQ ID NO: 70466 - DNA, 2147 bp, Cannabis sativa
  modified_base (104)..(104): a, c, t, g, unknown or other
ttgttttttgtactttttttttttttctgaaaactgtttttaaaaaataaagccaaacaagccagattgttttcaaaatacaattttctgtttttaaaaacaanaaacagttttttagttatgatgtcaaatatgcactaagctttaaaaatactacataaaatcaaagtgctctgctctccaatactctctgtttatgtgtgtgtgtaagctttaaaaatatagttatgttacttattttaaatgatttttattatgttgtcagcttgtggggggtcttttaggtgtagaatcagggcaagatgctgtgattagagcattactatacgaaagagcaatgacaaaagtgaaaccatatggaataactgtggcagacttcacaaaccgaatttctgacctaaggaaccaactcggacatggtggtctcaaagatgaaggcctagtggttcccccctttcaaggagccgagggaagagtggccggaaatgtgctcgccggagaccgatactcactctcttatggtaggacacctgaagagatacttagaattgtatatggtggaaatggtgatgaacatgttgttggtggtttctatcctaagggagctaatggtcatattgctacatcatatcttacttaataactaataatttcatccatgcaaatattttatgagtaaattattaataacacaagttcttttaactctcaactctctcattgtacaaccctttgtttgatcaaaactactatactctatacatataaaagtagtctttgggtgatttaattaattaaaattaataaggtataagagggccttttttctagttatttttatttttgtaatttagaataaccgtttaaggtaaagatcaatattgtttcatgaaaaggagagagaaatttcttcattatatataaaactcatcgtctaacatgagaaatagatgtcctaaaaaactaaacaaaataaagttttaatattttaaaagaaaactcccatctcatattatcatcccaccaaacaatgttgtatggaagagaatctattacacttgatgatgtttaatcaaccttgaatttaaaagagagttgaatcaaagaactctagaaacagagatagattgtatacataagaggtagaagtaagaagagggacaataacaagggatcagaaaggaaataaagatctaaatcaatttggtaacaaaaagaatatcagatgctatcactgcaaaatggaaggccatatcaaaagggtttgttctgaaaggaaaatatttggtgatgacagatctgaaggagatgcagtagtcatgagtgatggctatgattcagctgaagccttacttgttacctttgagaattcagattctgagtggattttggattctaggtgttcctttgttatgacaccaaataaatcttggttcgaagaattcaaaattacgggacggtatatctgagagatataacaagtcttgtaaaatggtgggaattggaattacatgatggcatggaaaaagtactaagggatgtgagataagtactggatctcaaaagaaatttgatctctgtagaaatgttagatgatcatggagtaggtactttctctcaattatagatgattattcgagaaaattatggtgtttatcctaaaaagtaaaactgaagtacttgaaaagtttaagctatggtaaataatgcttgaaaatcagactggaaagaaagtaaagtcttagaacatataatggtttagaatattgttcagataaatttgatgtattttgtaagaatgaaggaatagctaggcacatggtctatgagaaagactcttgaacttgatgaagatttaaaaagatcatactggattaaccttgtaaatttgtaaaactttgtgtttaataaagatattaatgacggctgttccaactgaaatgtaaagcattgtactaagtttgaactcgtaaatccctagtgcatgtctttctctcttatttcttgtttaattctctttattgttctttgtatttctcggattctttgtgttcttgagacgaattaaatccttgaataaaattattattgtttgtttgttgagaaagcagaaagtattttgagccttagaggaggaggacgattgt

SEQ ID NO: 70467 - DNA, 1359 bp, Cannabis sativa
cctggttaatagctttaattagcacttcttttcttcctgttgaaaacatagaacacttccaaccacgtagcttattccatactcgatttttaatgacatcaaacacttgctttttacttctcccaacttgaacctccaatagacttgctaattcagccctctctccctcattgacttgccttccaaagctcacttcagacttgtgaaagtttacaagttgaccagatgccacggaatatttttccaacaatgtttgaaaattttgacaagtctctcttgtagcatcaaaaatactaaattgtcattcgaaaaaaaaaagagatgagatatcaataatccgttgcgcccaaacctcactccattaatactacccggcctctcttcatgtgtataagactagaaaatgcttcagcacaaaagataaataaggaaaagagattggaggtctccttgtcgcaatcctcttcttggtatcacttccccttgcacctcactatctatgagaaaagaaaacctaaccgagcctacacatctcatgatctgtcaaacccattcagtctgatagcccaactttaacatcattgcctgaacaaatctccattctaccctatcataggccttagccatatccagtttcagaactagctttttcccatttcaaaaacgattcttcctcatacaatgtaactcctcatagcccacaatggcattatcatgaatcatgaatcaatcggcctttaataaaagcactttgagtatcggaaataatcattcccaaatatcatgtaataaaatgtcattttttaattaatttttattttttttaaaagaaaaatgagtgttttaatttattgtgtaatttttttttttttaaaaaaagaagaatgagtgtttttttaaattaatcaaacataacattaaatgagtgagactcatattataaatcaattctaatttcctataatacttttagtgaccatgaatctctttttatatccacaaaatataatgagactctttctatttgggaaatttaaaattccatgcttacaataccttaaatttttttttcctaaatccataattattaaaattggtcatatatgaccacattactaatttcccacaaatactcctcccatttgaaaaactaaagtcaaaaggctcaaaagttctctctctccctctcgcacggtacacccacacccaccacgatcggcttcaccgacgacgacgacgaacgaccacccaccgtgtaatatccagattaaaatagtatttaattttttttttttggatattaattgagcgaggataattatcttgtttctttgtgttgttagtgagttgatattattg

SEQ ID NO: 70468 - DNA, 1388 bp, Cannabis sativa
ttttattttgttgctagttatatgaaaaaaaatatatatttttttcataaattctaaataatttaatattaaaaaataaccaatccaaaataactgatagattggattgattggatttaagctattgtatatctaattattcacttttattaaccttgtaaaaaaaatctagagaagtaaagaaataaacccaaaaaaatttcatgttcataacagattaagtacaacaaagtgatataaatattacagcataaactaaacaatcacataaaaattaatactttttgttcttgagatatatttttgttatgaattgcaaactcggtattcaacatggctcctaaaaaaatataaatcactaattagtaaaggaaacaattataacataactcaatataccaaattatgacatatataactcaatgtcaatattcactaagccattatataatgaaagaaaattaatattatacaataacttcttacaaaatcatcccaattaaatatgctaaaaatgatcaagataactcaaattataaatcataacaccaaaaaaaaaaaaaaattgatcttataacaatgtagtatccataatagactaaaaaataataatgaaaaaaatatagagttcgataataagctttggctttcataataaatgaaaaggaagctttaaaaaatatttagcacatgattttttaattatataagtgcaaatatatcatcacataataattttgaacctcaaaagttagaaattgattatgaattaccctctattcgtgtaaagcatgtcattgagagactacgaaccttaggtggaacagcgaggttggtctttgatgggtgcacccctttgggcgaccatgaataccttaggcctatcttaaaaacttaagtcatctccaattctaaatcgtttagcccattatttcgaaatcgctttctgcctgcgaggatgattgtgagaacaaatcaagatcagtgtgaaccaatatatatgattgtgtagaggagatgatcacttctaatttaagtttagatattagaatcatatgaagaaagaatagtttcctagtaccgtactcatacaaggccattaaaaatagtattacttattatctggccattgagctcacagcggtcgagagcttccatggtaacaatggcataaatcaagaagatttaaaaaagactgtatcattaaggaattacattgtctagaaatttataaatttaagagtttaatatagttagatacaaaacaaatatcttaacatctttatatatactaggtgaatgtacgtgccgagccacgtattgttagtttcatttaagattttggtctttttaagattttgaatgtattttatttttaaagattacaa

SEQ ID NO: 70469 - DNA, 2175 bp, Cannabis sativa
ctcacatcttcttttgtaaaatctctcaataacattttagcttgttggggattcaccacaggtccttgcttgaccacttcttcctgaactgcttttcgattatctaacttgtttccatgcaaactttgatagaaggaatgaaaagcattagttacctaagttggttcatcaactctagtgccatgtcgagtttcaattgaaagaattctattttgcctttgtcttactctaatgttgttgtggaagagtgtcgtgttctgatcaccgtccttaattcaactaagcctagctttttgttgaagaaaggaatttactgccttgtgaagtgctgcatatttggttctagcatctagctctctaaaataaagttcttgattgagttgattagcttgaagattctcttgacactcaaagagagccttttttgcttgatccgctgccacttgaatattagaaaaactttgtttattaagatccttgagaacccctttgagagctttcaactttgtaaccacttgatacattttagtcccacaggttggttgctaccatgtttctttaactaacactgggtaccgaggatgtgaagacgacatacaaaaatatttgaatggttttttaacactttgtgtttcaggatgcactgtcaagacagcaggtgagtggtcaaataaccctttaatcaagaataacacttcaaccgaagtgaaggtactcaaccattgctagtttgctagtacccgataaattttagaacaaactctgtcactgccttgttgcttgttactccaagtgaaaaagcttccactatattttacatcctctaattgacaaaactgaacataattaatgaattcagcagctggtttgtagttgaatctctctctggtttgtagttgaatctcttgccaattctttcttctttcgacaaaatctcattaaaatctcccaagacaatcaaaggatcaatggttcttaagcgttgaatgtcattccaaaggttctttcttctatccatgtcattgaaggcatagacaaaggtagcaaaaaacttatttttgccatccaaagtcgagacagccaagtgtactagctgactagtacatttcagaatatttacagtgaagctacatggattctactccactattattcacactcgtttatgccaagctatgttagatgtaaaacaccatcctttgaacatatttacatacaaagccccaagctttggggctttgactcttgtctcgagaagaccaacaagactaatgtgttgagaattaatcaattgcttgactaaattctatttttattgatcgttgatccctcatacatttgaatttaggattttatccattgcatagaggaggtactccccctcctcttgttctttccttcctttctacccttgctaaaccttttaatgaggccttctcaaaggtgaagttctcatccacctacaatacatttgagccacctgctattactctatcattctcagctactatcacaagttcttcaatagatgccatcgagggacctggtattttagataacacctaaaatgcattatttgtatgagtctcaacaataggttacttctttgtctctcttctccccttagtaacttgttgccacccctcactatcaatcttcggatcaacactggtattagtttctgtcatcttctttgcatcttctttaatcaccaattgttgcttcctcccttctttctttcggtaaacattagtggcatgtcccatacctttgcaatgaccacatatgatgggtttccattcatttgtaatcgaaacattgttatcaaaaccaagctcatcttcaaaccaaataagatcaaggaagtcttgtttgagggatacttctatgagcacttgttgataccctagtttatccctgagttttgtcactaaatccacatgtaaaggcttcctgaattcgccaacaaatttgaacaatgacctctcaccccagtatttcaaatccaaatcagagtctttctcacatcttattttttgaaattagtgttggggttccaagatttcataaccattggtctttcgttaaaaaagacatatccttcattaacaacttcatccctttctgtaatggaataaatctcactagaattactcgatatgatagcttccctac

SEQ ID NO: 70470 - DNA, 1556 bp, Cannabis sativa
taaatttctctttacttatttaaattagtgttttagcctactaattcatttccactcttttttggaagaaagtatagaggtttattctctctgtaatctttttaagtttttattttagtattccagcattccaacatactcaaatattttttgcttgttattgcaggtggtcataagtgagaaaatagaatggttcatacacggttcttgttaggatctccttcattagaatccactcctcttgttacagttgctgtttgttctctaattgagacaaggtctaagaaaagaaccatcccttgttcagcttctagtcgttctcaagttgaaacaaggtctaagaaatgaccctcaaattccacacagattgttaaaagccaaaaagactcatgtatctattaatgatcagttagttgcccctcgcgaggtacacttttatttttcttttgctatgcctcttttattattttattgtttcattttttaaatgtttttaacattattatttattagtttattatgtgtaatttttttttgtagggtacatcgttcctcattcctcgtagtctacatcgcaacgtcaggattacttacgaaggcattgatggtagattcattgggtctattcgggaaactctttcaacaaaacaatttccagatttctttacttcttgctttggccagtttgcatcgttggaacaattcacaattcaaaatcagttaattcacaattcactccttagagagttgcgacaacccaatccagttgagatttagattgggatcaatggaatgcagctaagttttggccgaggagagtttgcccttgtagcgggtctacaatgtttggggtctagggataaattaaaatatgttcgacatgaaaatggtattcaatcaacatattttaataatttgaagttctccaaggaacaattgagtaaatgttttgttgaaaagagatggaagaatgatgaggatgctcttaaaattacacttctgcatttccttaaaaaaatttgctccgttcagaaccttgttataatgtgtcacaagaacacttaaatatattggatagtggtgcattttcagagtttccttggggacaagaagtttcattttccttatgaaaaaattgaaggcaaggattaacttgaagaaggtggaagaagccaaagcacattctaggaagccattttataggcattttgggtttgtatatgcatttcaagtttggttctaccagtgttgcccatacatgaacggtggtcttgccactttgcatcaaggttcaatttctcgtattgttaggtggaaatgtgatttgaatcctagattcgaggatgtttctataatgctatctttgccaatggatgaggtattttacattgtataatatgttcttactattatatttttattttatttattattttacatatatatatattttgatttttttttttttgttttattttttaaaatttttagttgaaattgagaaatttatgtccaacttctgaagagagagtaaaatataatctggatatattttt

SEQ ID NO: 70471 - DNA, 1206 bp, Cannabis sativa
  modified_base (1161)..(1178): a, c, t, g, unknown or other
aacacagggtccaattggtaacttttgcaaaacagagggtccaaaatagtatttaccctttctaaaataatatcagtagaatcttcaattttcaacaattttatttgtaatataatcaacttgaaaacaatttttagtacaaacagatataaaaagggtaaccagttttgttataatacctctatattagtttattattaaattttattttgacaaaatttagttcaaggtactattttggaaaataaagtccaattcgtaacttgtgcaaaatacagtcggtccataatagtgtttatctttttcttacattaaatttttaatataatgtgttgggttttagttcattttctaaatatatggcccaataccccattcctttgcataataagtttaaattcttatctacttttattagcatcttctttttcattagtttttttctttttcttttttggaaagaaaagatcactctcttacattacatatctcacacagttgaactcggtggttgtatgactttgttgatgattggattggattggtttggtttgaattgaaacatgactcagaatttgtcctttacaatattaaactttttatgtctttttacctcatatgattgtccttgtcctatgtcacatatctattatcataaagacaccaacaccaaattgatttagtacatgtgctgagttcataacttgtcttgtaccctaattttaataggggaatttgataatttcattgaattataggttattttgcaaatttacttgtttctttaagaatttagtttgccattatatttcacactagttttgagcttgcattattatgtaaatacaatacacatacattatagcttatatgtttctaccttcatttcatcaaaaattattagtcatccatttattttggtaggaaggaaaaatgaaaagataaaagatgttagtagtaaataatagggaaatttatataatacacttaaaatcatattattatttttttaaaaattttatttgtactttttttacagattatgttttcttacagggttttcatttgtttttcttcaaaaaaaaatgttgttttcacattatttttccataacagcaatatgataaaaaaaaaaaaaaaaaacaaaacaaaaaaacaaannnnnnnnnnnnnnnnnnaaaaaaaaaaaaatttttttattttttt

SEQ ID NO: 70472 - DNA, 1052 bp, Cannabis sativa
acatctgaagccataattgaacttgaaaatctcttccttctctttgttttcctgttttttcccaagtccccaaaataattgagaaaaacaagagagaaaaagatgattttacattaactctctttcatcaaggaaagaagcactattcaaacttttctccatttacatcaactggttttccccaaagaagaaaaagagaaacaatcaagagcctcatctaagtccctagcaagaattataagagttttgatgagcaaagttaagaacctgattgtacataagatgaggagcttgggagcaacggggtagccatgtaatgcttttgaagctctgctaaagaatgatgagaatgtcattttcagaccaacttatcaaatcggagagattcttcttaactgaaaaaaagactgaactagcaactgtggcgtaaagaaaataaaaatcagatatagtcttgaaatcaggccttgactaatagtagttgactttgtattaattaattaattaatttagaattaagagattattaatgaagtagtatttaattaccaaccaaaaagtacatgtgtcattaccttattgagttaagttccaagttccatgattagaatttagaggttttattgttgactggttggtttttaaaacttgggataaagtttccattaagcatcttccaacaagttctttcaacataatttttagttaaaatagcaagtgaacttttaaatattaagctctaactatataaaaaaggcttcctataataaataatagataggaaactttttactcctttattaaaaaatttaatagtattttaatctaaaaaattattattttattaaattagtttatatttaataaattcaagatataaaaaattattcaaataacaattaatgtaaaaaaacattactaaaataacaataataaaagggaaacttgattttatatacttaaaaaattaaaaaaatttattattaaaccaaaaatttaaaccctaaaaaaactatactttttttttcaaaacctcaaaaatacccccctca

SEQ ID NO: 70473 - DNA, 570 bp, Cannabis sativa
tgaaaaaattgcttataccattggggttgcctttagactgtaagtaggcgtgctaatgtgtaggggtaatcttgtccaaatttctagcatatttttgcaagtaaaatttatagggtataatatttcaataattgtgactctttttttttttgagaatcattgaataattgtgacttttaattttaaacacatgaaatctatgctctatcccaaagttgtcccaactcattgaattattattacttctctcaatagtttggtagagaaacaaagtgaaatgaaattaattttgggtgaggaaaatgaaataaaatataaaaatgagattgtttgatagaagaaaattgtgataaagaaaggtagaagaaaaaatagtgagtggaccccctaagattttttatctccaaattaaaatttcatacaaataaatatgaaagtgactagagataaaaattgagcaaaaattgacagagaattctctttttattttttttatttacctaaattatttcatttgtagtacttaagtacttgtaatattattatttcacaaaaacataaaaacaacaa

SEQ ID NO: 70474 - DNA, 3074 bp, Cannabis sativa
aatgaccattccaatgtaataagaaaaaaaaattaatgatttttttatcattttttttattcattttaaattttattccattcctatttccattcccatttctcttcctatattttcattcctcccaaccaaagcctccttagtttttggttattcgaatggaaaatgacttaactggaagcattttctttgaaacaaattttatgtacatgttattatcgataactttgttttttttttttttctttattattattatcattttttaatcatgcttcatatatatgtcttcttcacggttcagattatattaacctacctattaacttgcgtaaaccacttggactggtttttgtatggttcataatcgtggaatgtctttcaagttatagaccctttctaccttagggcctttccttgaagtgtacttaccaggacaatccagaggcgatgtatcactattattctgtcaatgccaatatatttattaaatttcagtaattaaaatacagctgttacactttgaaaatttgttaatgcagtatacaaatttgcagatgcaaaacagaaacagaaataaatagtgtagaatttaaaaacttgaattatgtgtagtattagtattcttttaaacaattctagtccatgggtcacacatagagaataaaattattagtaaagtatcacagattatcaaaacaattgatttaaaataaatttagactccctctagtgatttgatgtaaccatttgtaatctaccttgctaatctgatctctgaaacgcaccaagtagtgaactctcttccactattgatgtgtggttattttctcctaaaataagactcaaacaaatcttctcccgaagatatatgttcactttcttccgaaatgagacttggaaaagtcttctcccgaagacccatgcttgttcaaacaagttcttcaaccaattctacaaatagtataagaacaaaacaaacactaaaacctagccgaacactctaggttttacaaaagaaactctcctcacaaagatgaaaatatgaaaaaatgaagctagtagaggttagaatcattttgttgctctctaagtccaatttatagaacataacaactctggaaacatttacaatatcaaaattgcatcagattataattggatctccaatacttgccaaataaagattatttgatatgctaaaatcatgacaaaaccgaaataatcaattagaaaaagaaaaagtcaagatttataaaaataggcaactttccataaagagaattttttctcttgcaagaaaagattgccaaacaaatgcaactagctgagaaaagatctttccataaaagaaaggagcaattatatgcacgaatttaacgcactaaaaattaattaaattgctaaaaaaaatacaaattaatgaataaatattttgtcaactaatttgtcaaaaaaagactttacaatctccccttttgatactttagataattaaaatatttttaattaaaaagaacctgcaaaacaaaattagtaaaacaaatatataaactccccctgagaagcacaacattaaaccaaaaaaaaaaagttaactttaactaaagtttaacacaaacataaatattaactctcccgagacagttgagtatacaacccaaattaaaattcaaattactctcctttttgtttatctataagggtcaaaaagaaaccaaagcaagttcaacaaaacacaaaaagagaaataaataaagagaaaataaattggtataaataatgagatgaaaggaaaccaatttaaaattgaaaaaaaaaaaagaaactaaaataaataactaacctttaccccttaaaaaagaaaatcacctttttttttagcacatgaaaagtaaaataaaaaaaaaaaataaaaaaaaaaagagaaacaaataagcaattaaactaagagttcccaaaaatattaattaacatatgaagaatcaatcatgatcaacaattaaatttcaagagaaaactcattaaaaatttaccaattaaagcacatgttaatacttaccaaaaaaaagacaaaagactaatttttcttagcccgcaattcaagccacacaaccccctccccaccccccacactttttttttttcaaaaatagtaaaacaaaaaaactaaaatattttatacaaaaatcaagttattctaaaacatatgcatctttctttatttcataaaagggacaaataatcatgttatgctttcaaaaatgataagaaattagtatcttaaatacaaaccatacttactagatattgagaaaaaatagacaagttacataaaatgtgaaccatgatttttttttttattttagtagaggagacttacaaaattgtacacacttgttagacattagtgtctgcagtgaaaatgagatcattgtcattggcatgtttttttttttttttttttccattttcagtttaaacccgaaaccagatgttgtcacaccatactgaaagtagcccttttctatggtagtgcatcctcttcacaactcctaattatcaagtttcagcttactcaaaagaaggctttcacacctcaatatgggtagctccattccagcaaagagcttgacaaaaaattaaaacaaaaattgctctatattaaatttttaatttatccctatcgcacatatataagtaactcaaatcttttaacccaatctcaaaattttaaagaagagaagacactaagctaattatcaccaaaaagcatatgcatgttttgtcaaccaagaatgaaagaaagatagatgcaagataagaactactcaaattttttgtacaaactatagaaatgaaagaaaaattagacaatgcaaatccccaaagattttctgagggagtcaaaccgacttaaatctagggccttagtgaaaatagcaatcaattgttttttagtatcaacatattctaactgcaatgtttggttgtcaacaagttctctagtaaaatgatgcatcatattaatgtattttgtatgagaatgctgaataagatttttagaaatattt

SEQ ID NO: 70475 - DNA, 1911 bp, Cannabis sativa
  modified_base (505)..(505): a, c, t, g, unknown or other
tctacagtttttgaagctagaaatgatggtggcggctgattgtttttaaaggcaactgtttgttttgttttcgtatctctttgacatcttctacttgtaacataattgaatattttaaaggattttgctactttcatttctggttttcttgttgattaattaataatctatgattgttgttaataatcagtccattaaaaaataacaacgtttcggtttttagatcactaatgacacatttactatttagaattggaataaattaatggaaaaatgtaataaaataaataaagaataatcggaataaatatttataatatgttgtttactaaaactgtttgaaaataaaataatagtgatttatcttatttactttatttggaaacgtgatcggaatgtttaaattacctaaattactctttgacgtaaattatagtatatgatagttattttgtaagacatattttaaagaataaattattattataaatttaatattaaaaantaaaataaaaataaataaaaatcattacctgtaatgacattctttaaaaattggtaaggaagttctctatttttttttaattttttatttaatcaagttctctattttctaaatttaataaattagaatgactcttttattattgattctcaatgcttaatagtaaacatgtcattttatttttaataggatatatataagttgagttatatttgacataaaaataaattttttgatatttttacatcaatttttattgttaccttctaatgtataattataaatcttaattcaaaatttaatatgttatttaataatttattaaaaaaatataaataatcacaaagataaatataaaatttaataataaaataataataatgtaaatcatttaaattttaatgtgtgggagaatattaaaaatttaataataaaatattaaaaaattatattattaataataaaaatataatatttatcgtaataatgacatatcagacacacagtaaactatattttactttttagttgaattttcacatatttttatgaacctggtataaatacgggattgtaaatttctgattgtattcctcccaattataaaattttttaaaaaaagtttaatctgccaataattttataagttcggtgttttatatgcaattggacttgtttgtaatctattttagcactactgtaataacagttggtagaactaaaatactaagattatacataagatagcagtactaagttaagctccgggtttatctgagtcacgtctaacacgatttcgtactggtccactactacctaaatcgctttactactaaagtaataacctctctctctctctctctgcattcaagtgcacccattttaaagctcaactcttgtggggttttcttcgatttcaccatactcacttgggtcattctgggtttttcttcaactttcaaatttgtcagacctctactttatctgggttctttcaatttttcagctcgcattctttgtctatggagctgtgattctcacttgatttgtaattttgttttagttttctcttttccttgcaatggctacttctggtggctttaatcaccggaatggtgtttctcagaggagttcactcaaggttgataggcctctctctgtaaactccaaccccaagtcttcttcttcttcttcttcttctgtcaaatccaagcctttgtcttcttctggggtccgccgcagcagtactggctcaatgggtggctccactgcagctgctgccaaggacgatacaggaggttggtttcttctcttcttctgtttttagttgaagaatatgattgagatcttggttctcccatttcatatgagttgcatcttgtttgagtaagaaacaagatttgtat

SEQ ID NO: 70476 - DNA, 1080 bp, Cannabis sativa
aatagtaatcctgaaaacgacagcagtttcttggatgatattctcaataatatttcaacgatatatatatatatatatagtgctgagatgagtagtatatatatagtttgattaatttataattaattaattatatatgatcaattgatctgagaagcatatataatgatgatttaattataatcactagtcattggatattttgttgtaagtaatcatggtgataataatatttatatacaattaaagtatatattaacactatagctagggttttatttatttcaatagcatataaattaatgcctcacgtacgtacgtaccataattttggggtaataaaatacgatatatatatcataacattgttatggtatttatcattttgtaataggttaataattttttataatcttatttattaaactaattaaatgctcaataacatttatatatatatatcatgatatagacacattcatcatatatttctttctttctttcccttttttcttaaaaaaataatcgtcatcatatagttcattacattatgctctccaaataataatgataaatgcatgcccccaccacttcctaaaacttatataaagtccaaaacatatattataaaggacaaaatacaaaaccctattatattatatatataatataaataaagcaatatgtatataatataggagattggaaacttattgggagttgtcaaggatcatcaaacactaaccatctccactttaagtataatattatccgctttgggcttaagctgattttgtttttaagcaccttctctaaagacctaatgccaatagaaatatatccatccttatatactcatgattcttattatttctagcaaatgtaagattttgtttacattcccaacaatcctctcctcaaacacgggactacatagcttcccctcaaacgatcttccatcttgtacctctgttatcacaaactgaacacgctgcctgaccttcattgtcaagaagactttcgacacaaggcaccaaacaagatctccaatccgtccactctctaccaactagtatactt

SEQ ID NO: 70477 - DNA, 1536 bp, Cannabis sativa
aatgtgagaatatgattattaattgaggaaattacatcaaatatgggattttaaaaagaagattgaaaaatatggcagtgttttattaggccacattttatggcattttaagctttttggacttttttatggaaatgacatttccatatatttgcaaaagaaaaatagaaagcccatatttctatttttttgggtggaagaggtattggatcactaatgcactccctcaaacctttgaacgagaaccagagagacgatgagcatcgtctatggtgaaacagtggcacttgacgaggctgattggagggtcaaaacaacgccattcgatggtgtgattaatcgcaagcagtgaagcttgggaggggattcgatgggaaaggtggtggtgggtttaactgcaattgttgatgccatccgtcattgatttgaatgtagtaattatttttttgttcgattatcgtttgtgccaaccgtctctctatattgactagagactttttcattgaaatgtaatttgattttgcttcctatgtaatttgatttcatttttaattttagtacgcttttttcatttctttgattttcaagaatagtttatcatttacgcttcttttttcactttagttacatttcttttgatcattatgagcatatttcacaatctttttatactactttgaatttttctttggcttgatgtattcttctaaaattaaagacattctattttcatgttatgatattttttagcattaaaatttcgtttaattgtagcaaaaaggaaaggaaaaaaaagttgtagttttgttattatggttttgatttttacatttcaagccaaaacttgataaggatatgaacgagtgatgaattataatgtgtggattttaactctctcttaataaatttagactattttctttcatgttagttattagtaagtttagacttaggttctgttatgtaaattttttattttacttaattattgagaactttcatttgataagttaatatttaaagggtgttagagatattgtttgttaaccggttttggtttctgtatctaatagttggtttgttgttttgggtttgaagtttaaatttttattttaattatttaggtaattaattttcgtcaattaatttttaatttatttgttttttccgattttgttatattagatttctgctcaattgttttattgtaattgttttttgtattccaatcgattttttgattgttttagctattttatgtatttgttttatttttttagttagttataatagtaataaactggtttctgtggttaattattagttatgttattttatgtaattgaattcaaaatttcagcttttgatttagtttttcaagtaattggtttttatttggttgatttttgttactagtttctttatgttaaatttcagaacatattgaacatgtataatactcttgagatcgaacctaaccatattaggattaagatcatttgatctaggatcatcaggtgatattgaattgaatag

SEQ ID NO: 70478 - DNA, 2154 bp, Cannabis sativa
atagcaattaaaatttagatttttcgaaattgcaagttgcaaaaataggcgccgccggtagccaagccataattggaagcagtagcaggcttattaggcgtgatcaggttcagggaaaagtgggtctttccttattattattgtccactaaccccatcactacccccacctttccccaaatcccctttctttctttctattttcaactaaatattttgtcgggtctcatctatttcaaatcaacggtccagatttgtttgaatattcaattcatattattattggattctattaattctattgattagtacaacaaattacattagattaaattaatatataaataattgactagtcttccactcttcattcgcttaaatctatagttgtggaaataatagatttttgggttttggaaacaaccaaaggaaaaatctgagcgattttgtcgccacttcccactttaattaattacaaaacaatattattactgattgtggtggattttttctctactgaaaagacaaatataatttgtatttattaaagtaaataaatatttgtaaattaattgataaaaataaaacacggcgtgattagttacacacgtgtctaatagtaaacattccaagtaagccatttttttttgtaagaacggccaccaaagatctaaagccactattatctacatagttttaaacttttaaaataagaataataattaaataaaaaaataaatagatcccaaaaatcttaattctactatgttcgattctgttccaatacaatataatatttcctctccaactctcaaacactctcaatttagctacgatcactctatcttagccaacctcattaacaattaaatatttaattaattacacgtaattacaattataaaacatcataaaaatccttaacagtacagatttttttttgtttctctacgacacacaacaaaatcgccgtatattatgggtaaagtcggctgactaaggtaagtaggagttggacactttgaccactgtagcattaaacctcggaatgagtttcttttgtcccccgaatcctgttccgttatcggaaaagccaatcacaatttgccgcgtgtacccacaattttgtgtgaaattatcgaagtaacccttagcaatcaagtagactaaatgggcaagcttcttaacacgtggcgaaatattctaaatttagaaaacgacgtccatcaaatcgaattcgctgaactcaatttcagctaacccaagactctttcgcggcagcataatatccggtaactctaacggcgcgtaaaaatcaaacccgaagttttcgggtcccaagaaaccgaaatcgtcaaacggcgtcggttcttcgtaacggagaactgaagttggtgacgacgcaactgccacagttccgtctgaagataacggcgactcgagcgacgagctctcgtcacttccagtaacggcgtcagtcgattcgctagtagccacgttaggaaagttggtaacggcgttagcccctttaagcctaaccgcggcttggtcgtaaacggtggcggcttcctccgccgtatcgaaagtccccaaccatacccgttttcttcgggtcgggtctcggatctcggccgcccaacgaccccacggtcttcggcgaacgcctctgaactttttccggcgaacggaatccgattccggcgatccaatcggtctcttcgagactctttcttgcttagtaataagtgatttagccgaaggagagagagggggccgttgttgtaaactaatctctcttacgtgcctcttgactcgccgttgtacggacacagactcgtcttcgtcgctggaagaatcggtggcatctgcgtcggtgataatgatccgaacgattttctccggcttcgggttcatgtcgggttccggtttcgggtcctgctgaaagagcttacgggtcgtgattttgtgctccgaaaactttactgatggatctaagaaacttttgttgtagtgatgatctaccctcatcactttcttctctttatatatttgtataaagagatgaaattaaaagaaaatcaaaggaacaagtcgaccaaagtggcagaagaagtaaattatatcagagtaataagaaaggacttgaaactaccta

SEQ ID NO: 70479 - DNA, 578 bp, Cannabis sativa
gagggcaaaatagaggcggttcttagcacttatgagaaatgctaaaaggtgcttagcaccctcttacgtgttaatatcgttattgttgtaattaagtaacgagttttatatagtttaatgttataacttttagaaagtatcgctatctagaaaatgttaaataccactagtacctaatatcaatatatactctttatatatattatatatataatttttctttaaatgatatgagaaactattctactattttttttagaaagtttaattataacatcaattcaattcactcagcacataattaatatttaataatataacatacataattttattattttataaatatttagtttatataaatatattactattagtcttgttagcttggatcacttgcgatggaggcgtttgatggtgagcattgctagcaagagaaaggcgcttgcgccgaggaaggataagacgactgcagcggctccttggtggcaaaatttgtcgaaaacattgcaaaccttcttccattgcacatgtgaattgccttgcaatccaatcaaaccaacggctgctgcggctcc

SEQ ID NO: 70480 - DNA, 2115 bp, Cannabis sativa
ttggatgtgatccaatgaacaccatccacttctcaatcccatgatggggacactttttgataagatccttgaatctctcccaagattcatagagagactcactgtcgaggtgataaaagttattaatctcccttcgcaacttggcagcttttgctggaggaaagaacttggacaaaaaatcattattagtcattccatgtgacaatagaattgggtggcaaagacaccaaccaaatcttggctcactccctcaatgaaaatggaaaaaaccatatacgaatggtatcgtcacttactctattcattttgaataactcacataactccatgaagtttgacaaatgtatgttgggatctttcaagggtagtccctcaaactagactgtggattgaactatttgaagtatggccgacttgatttcaaaattgttggcttccatggcaggtggtcttatacaaaactgaacccccgtcattgttggtaagacatacttccttaggcagcggttaggtggattacgactattagcccggtcttctacatcacctttattattgtcgttattagtcataacctcttcttggtcaaccctttcaacaactctttctaacctcttgttttttctatttttgtatgcaggtcttctcaatcttaggattaacaaacactcttgaacttggtccttgatgtcgcataaaccaaaggtacctgagatgcgataagaagaatttgacactaacaaattaacaaaaagcaaaaaaaagaaaccaaagtaaaattaaatctaattattgtaatatcaatttaagcaattccccaaaaatggtgctaaaaacttgttatgaaaattactaaactacgcaagtgcacgtatcaagtagtacttaacaggttaggtcgaacccacaggaattaaaattgattaccactaaactagatctatgtttatatttagttggaaaataattttgaaagagaacaatataaattgacaaaaaattaaagaaagcgataaaagttatttaactatggatgtgaattaaggatatgaatctagttgcttcaatttcccaatcattaatgctatttaactagtctttttcctttttaataatgacagattataactctcttcaaatctaaaagtcctaaattatatgctaattattgaatctttgagatataataacatataatttgcattgagtaatagtctaaatgccacacaaagctatgtgaatactctcgtttcacatcaaaacctgtgcttgttcaattagagcattcctaatattcacttttaagattttatattaggatcatgaatcatgaataaggtgatcaagcttaaacatgtattaaaacaaatatgaacaaaccacaagtacaagaaataagaaatagtcaaatcacattaactcgtagaataaaatcagttaacattcatcatatctctaaattgagaaattagttcataatttcaacaatcaaatccatgattaaactaaagacagaataaaacataaagaaattaaagggaagagaaagaaactaggtggagaactcgatcagatcgccacactcattttaaaagtcttattcttatgtttctagggttcttttctgcctccaataaaattcaaaacctccttataaaaatcaattttataactcaaaatagcgaaaagacaaaaatatccttgtcccatatagaggtgtcgctgtgaccacagatagtctcaccgcggcaactataatgagtcgaaaacatcgattctgccaaagctccttgccgcgaccatgctataccctcactgcattaacaattagtcgcgaccaacaatgagcttttagtggcgagcttcaaaaattcaacatgatcttttcatcgattttcaacttatcttgtccctttaatagttaattaattttacacttttaaatcccggaaacttgaaacaaaggaaaataagcgtaaaattgtccaaaaagtaacaacaaagaagaaaaataactctaaaaagtgattcgacagataggctaaaaatattctaataaatttaccaagtaaatttcttaacttactaatttatcatgactctactatagactca

SEQ ID NO: 70481 - DNA, 851 bp, Cannabis sativa
tatttacatttatttaagttaatattctataaacataccatctttccaatgtaattaccaatatccttaaccactattactgacttaaagccagaaattatgtcgtgcaattgaacccaaaaatttaatcgattaagagtgatcaattttgggttttctccacttttcgacctttcacaaactagcgatatccgatcaaaagtccatggactgccttcgatcactccatcgatatccatttcatggtagaattgaaaaaggaatcgatgtggatcaagttctttcacaaataaactcctaacaggtctctacagtgatgtcattttctgttgcattgcttgaaaatcaatggttctatctataaggaatctacccaccaaacaccatcgatcatcaacttcaaatagttcttcatcaccattctcgtacattaagaagtcatcatcctccccaccaagattcatagtttgataatctgtgtccatttcaagggcagcatgctgagtagacgtcattgcaccaagatatccaactgaaaacaaaacaaaagataaccgaaaaccaaacagatatgacagagatcaaaagaataacaactctaccatgtcaaaggacaagacaaaagtatatagaaaactttttttttaagacagttgttgaatttttcttattctttttttctttctcttctctctctattttttttcattttttttctaattctctttgttgtatgtataattaaaaatattttttatggtttaaatataggtaatatggtaaataaaaaatataaattaggaaaaatcaatcaattataataattagtagcattataatagataaaaaaa

SEQ ID NO: 70482 - DNA, 871 bp, Cannabis sativa
cttcactttcctggtagagcttttgggtccctttcctaaggttaacagtgtcctcccctttacatggtcacatggtggcctagagtcattagacctatgaaaagaatcccatggaggatattagtttctcgcattgttaaaattgcttcgagtagaattgtggttggtcctatcagctacatgtggtggacttgtaggtctgcaatcttgagtctgagtccttttagatgctcacttatagcttgtttccttaacagttgaccactccatatcagggggataacccatagatccacattcttgagtttgagtcctttcggatgctcgctcgtagtttgcttttctatgggtaatctcagtacctattgcttgctgagtattggcatgggtaccaagagtggtagttttttttttttcatgttcatgggtgattgcttgcttgaacttatgaattcatatcagaaaaaagctcctagcaaagaaatcaaactataatcgagaacttgaaccaaaaagttgacactgaaaaatggccaactcgctagtatgtatggtcgagatgaaagttagaagtaattaagtaaaatagagagcacatgaaatttctattagttcactcccatgtcgcgatagtaatggagctacgtctacttcgagtttttatttctcacaagaattacaagaaaattagctaagtttggaagctttaatttctagagagagaaactagagagagatgctcttaccttatgggtacttttctgaatgtgaaaaatagattagaggagctctcctttcatagggaaggaggtcctattaaaataataataaaattttctaaaaacatgaaaaaatacatttaggatatttt

SEQ ID NO: 70483 - DNA, 827 bp, Cannabis sativa
taaaataataccaattgaagaaatattgggacctttttttttgttctttctgtttgattgcaatgagaataggcagatagtattctcaaaagtgttcctttaccttcatcaaaagctctttgtgtatttgcaaatttaattgcaaaaggttgctcttgttgccttaataaaccttaaagaaaattttaaaaaatcaaagtatttttaattttttcttacccaaacactataaactcttttatattttttttaaaatgcgtttgctggttttcaatgttaaaacaccaccaataacaacaactagcatagccaaataaaaaaaactttgatttttaaaattttctttaaggtttattagagcattgctatgaggcaccagtggtgcctagcaccttctcgacatgtcgagttgcgattggttagcgatattctctaaaagctattatattaaattatatgagactcgatacttagttggatcaatagcgatattgacatgtaggagggtgctagacaccactggtgccctttagcatttctcggtttattagggcaacaatagcatctccaaatccaatgggggttgccgtctttgctacatgtgcattttggtcaacatttcaaactaattttataaatattattgtccaaaataagcaatgatcatgtgatattattatttatttattttttttgaaaaaaattacttcatcactaactaatattttgagagaatatatatataaagagttttttttatttttatacttaaaaatagttttttttttttttttttatatttctacagaattctatacagaaattct

SEQ ID NO: 70484 - DNA, 894 bp, Cannabis sativa
cacgtaactttttactagtataaatataagagtgtatatataagagaatttaattcaaaaaaaaataatataaataattattcataatcgttaatattaaaaatggaaattttgatattaattaagattataagcacaatctatccactattttgaataggataatttatctgaattgttaagtgtagtttacacaatgtgataggagtaccatatacaatagtaaattgtataaaactagagacacgatgaaatattagaacttttaataacctccgttaaatatagaagttcatcattcatcacatgatggtcgtataaacttgatcttaatcatgatgtgagtaatgaacacatacttgtagtcttgtaaccacgggcggagccaggattaagttcttgggggggccaattattaaaagataagtatcgataaaaaaattaatatttgtttcagcaataaaagttgatactttagataaaagatatattcacataaataaaaaagagtattgaaagcacaataattaacacataatcaaaattttaagggaagaattagaaaaattaaagtcagtttttattagggatattctacttaattactttcttacgatacttaatttattaattaaatataatagaataaatctataataagtacacctcttaaaaggggtgttttgacaccttcctagctatttgttttgatatttaggagagtttttaatctatttttttttcatgattgtgtatattataattatttaagattacttataaatttttaaaagattccaaatagtttgtagtgccaaaaaataaggtttaaacaattacttattctgcgccgaaaaagaaaaaacaatcacttgtgcaacaaaatatttaaat

SEQ ID NO: 70485 - DNA, 1435 bp, Cannabis sativa
ctaatacattgtatagctaggcacggtgacaaatgatgtttcagaagcacttaacaaagtaacaagtcatacggactttaaaatggacaaaacatccattgtccacgttggagttgggaaggtaccaatttattttgttatcaaacattctgttgcattcaaagagtagtttgctagaaacaaagtaatgtgcttacattattattattttctatcattttttttttgttatatgatgacattattattactcttcaggtaagctattcagaggattttctacgtgagaatattggtgcatttgttaacgctcttctgcttgccaaacctcaaggcttgaaaaagggtaactgatgctgttttttgtttccgcaaacattattatagatgtactaatagctatgacttgtcaatacactgccctttacttcctatactaccacatcgtagcaatttaccaactattaaatgaataattcgatgtttaggaccaacagtcataaatgaatttcagatgaaggaattttaacatgtctcttcacctaatacatgcttaaaatggtaacttaaagaggattgagagagagagagaaaaaggattatattttcctcaatgctgattagcagtgttaatttaacattatacaactggccatactcgattcaatatgtttggctagttcagagtgatgtttagcaactctagatttctttgaacaagaacaagatcagaaacattttaagtttagtcttttctcagttctatatacttgtaacttttcaagctcaagtttcaccttccttagttgaatattttccttcacaaggactttagctatttgcttgcttacttgtgtacttacttttttctgcagcatccaaatacgcagggtatatcacatccttccatatatgcagcacggtcagccctcaaaaccatttctttttcggacactttacatctcattcaaatagttttagccattccatctattattagtaacatttcacattggttacatacacagatgggcccaggattccctgtctctatacaatcaatatccaaggccgcagatcattacaacaaagtgcaccttaaatgatgcctttgcctcttatgtgagctgacaagtccagcgtagatcaacattccatttattctacttctcaagtcttttcaactttgaagagtctcaaccactagaagaggtgtatgtccgagatgaaggtgtttcctttgtttcaatctatgactcccttggacccttatatacatcaaagcaataaacagtcaggttatgtaggggttacccatttgaacagattgaaagttttgcttgcgtttcttactcttgctgtagtatgctaagttattaaagctataaatgatatcttttaacaattacatagtaagatcaacgtcaaaaacttt

SEQ ID NO: 70486 - DNA, 972 bp, Cannabis sativa
agtacataccaatggtgggaatggtggttacaatttcccctaatttaagcttgtacaaaatggtggttttaccagctgcatcaagacccaccattaaaatcctcatctctttcttggcgaacaatttgctgaacaatttgccgaacgaaagtcccatttttgattctgggtttaattttgtaactcaaatctgaaatggaatggaatgagatctaacaattctcagatttcggattttcctatatatacccctttcctccctttccttcctcaattaatatggaccttatttcaacatatttttatttaataaaaaataaaagggctttcttttttttattttttaaaagttaaaaaaaaaaaaaaaaattgatcatagctttgaatggcacatcacaaatttattaagaaattatttcataaaaataaccaaaaaaaaaaaattacaaaaatataattgtacggaattttaaatatttttatgatttttataattttatttacgaaaatttagtttttatattgtactcttgttaatttgttgttgatttttttataatctgtatattttttttttttttgatgttgtttgaatgttatttttatatagttttttttgttgttttcgtattatttttgatgaaaattgtaaaaatataaaaaaaaaaatctttaaatgtaaaaaaatataaaaattttacaaaaaaatctttctttatgtaattatcccatttattaatgaaaaaatgtacaccataccttcttaaaattatttatttgttttatcattgaggagaatttgaattttatagtctaattttattttatttttttcatatatgtatataatccaaaatgttagttttttaagatgacttgaaaatttttaaaaaatgtaaaaaaaaaaaaaaaagaacaaagaaattaaacaatgccatgcctataagaaaaaaaaaaatcacaattctttct

SEQ ID NO: 70487 - DNA, 1929 bp, Cannabis sativa
  modified_base (1248)..(1258): a, c, t, g, unknown or other
aacactgcgagatcctaatacctcacaacatcgccccgaaaaggggaagcgagccaactctatgagcttaacatcctgaacttgccaccataaatatgaaataaatgatctttgctagaagaatcaaagctggaaactacggtggctgacgtgcaaaaggtgttgagtgacatgcttaaaggaaaaacccaagccttgcactttctgcataaaaaccaattgcgagagcacgagatcccaactgcacaagctggtggagggaactccatgtcatcaacacatagcaccccaaaggatgagagagaaaatggaccattgcgagacaaggaccctataggtcattcaaggcaatgtaggcctactcaccatagtaagaccgacacgatggaaacatcccgtgatcctatgaagggatatcacccagagagtctcatgctagggggcaccgcgcctacgccccctttttaagatcaaagcaaacgaaaggtgtcattccccaatcatgttgggaagtcgcacagtgaggggatgagaggagtaatactcgcaggccccatgcaagccgctaggaaaacccaagttccacttactagctctcgagaaaggatgaacaaaagaataaaggagctagaagcagagatgaaagatctatgtcaacagatgctaccacactagagggaaacttggaggatgctgggttcgatgaagaattccctttctcaagggaaattcaaattgatccgcttccacccaatttcaaggagccttgcatgactccatatgatggtacaactaatccacaataccatctaggagcttttaacgagctaatgaagatgaaaaatgtgtcatgcaagacaaggtgccactactttgtggtcacacttaagggagctgcatataagtggttcaaaaaggcttggaccatgaacaattacatcctggaaggaattttcaaaggaatccctacaacaacatcaagtagcaagtggttatgttatgcatgtaacaaacaagtatcaccaatgtgaagtaaggggaacaagaaagcttacgaagctacatccaatgcttcaatgtcaaagtcaacaaagtggggaagatgtctgaagatgaactcaagttcgacatagccgctagagtgcaccctggaagtggactatgtgtgaatatgctgaaaaaggaattggttggcataaaagacttctatgtcagggttcgtttggtacgccgtattacaccgtattnnnnnnnnnnntattatattgaattgtatttcatgcaatacttttatataaaactatatgtggtattgacttttatgggcacctaaatatataatattttagtatatattaaaaaataaaatagtattatataaaaagatgatgtataatctaatttaatattatataatataatacaatacgacctaatacaacgtaccaaacgagccttgagagagcagagaagtacatccgtgtggaggaagaaaacagtcttgtaaacaaataccaacgagtgttcttcgggaagcttgtcaaatccctacagggtctattaggcgatgcccctaacacttgtaagttggtgcattcaagtgaagcctctgctttacaacatgtaaaaattagatatccaagatgttccttgtaatatcccagaaacctaattatgaatcattatcgtttattatatattatggattaattaggtagtaatgagtaggattatgattttgctaacttaatttagattataaattttttctgtaagtggataaataagcgtaatttgttaattacagaaatttatttaaaatatgtggatgtaatatgccttatttgtgaaataaatatattttcaagttcccgaccctggagactcgattggaggccaaaaatgtcacaacaattttagttagaaata

SEQ ID NO: 70488 - DNA, 839 bp, Cannabis sativa
ctgtgatgtggctcttccagattaatttcctattttgtatggtattttttttaaccaatgacatgaaacctcctggtcaaacacaacaatttggtttgttttggctttacatatcattttgcttttttgtattgaaaccaaaataagcataccaactacttgacatggattacaaaagattaaaccttttggtatttcctttttcagtgaaacatctatatcgtttctttgatcaaatacagctagcgcggtaagaaggaaaccacttcaagaacaagttgaatccaaaatgaagagaatttcactgcttctgtgtgaggtaatatctgattataaatatatttatctgtagacatattgatagatcaaaattagatttgctgaagaagatgtaaataaatttctagctgtcttgtgaaaatttttgtaattggccccctgcaaaaaatattttttttcattttggccccactcgagttaacttcttgcctccaattcaaatatgaacttgtttgaactaattggccttgttgatggatttggttccaatttacatcaatgtttaaattcaaattctagtgcaaaatcattaatgaacaccaacaccttgcttgctatttataatgatgttgttcaacataggtcacattcaaatacaatatgtacaccaaaatattccacacaatgatgtaacagtttgtttcaaccaattacatttacttcaaataggtaatattttggtgcatgtattattaatcttcaaatatattagggtattttatagggatatttacggtgtaaatacttgtacagttctctttgttgcatttacatcctta

SEQ ID NO: 70489 - DNA, 2537 bp, Cannabis sativa
  modified_base (2409)..(2414): a, c, t, g, unknown or other
ttgattctaaacattatcaggagaatcgacatgcataaaaaaagataaaagaaaaagaaaacctatctgtgatcttacgaagaagaaactataacctctgtcatcgttcgaagaacacgaataaaaataaaaataactaaaatattttggtgataatcttcaaataagaaaataggctaaattttatttaacgcttacgaaagagagaactgaggtttgatctcttgagctgattttttttcttcttttttttaataatatataaagttgagtttgaccttaggagaggctagaagcttaagaaataaaactgagagacttgaataggtgtgaaaatcgaaaaaacttttaaagcaaccggttagaccttcgaatctcaagtcaaataccccactttcctcaattaaatattatatataaatataaatgaaatatgggatacctaatatcaacctttggatcaaatatcacactgaagtatgctaaatagtatgctaaatgctatgcatgacaacaaccagcttctatatatatatatatataaagagagagtctcttctatcctccaagtccctattggtggtcttaatgaccatctcatctggaataaagactccacaggtattttttctgtcaagtcgacctatcatcttgctaacaatgtgtctctccctccttctccctctaactcatctttcatcaaaaaaaggttgactacgttttggacttggactctgaatctttctcctaaacttaaatctttctcttggagggcttatcaccacattctccttgctgccctcaatttgttcctcaagaagtctctcccaaacccttgttgctctctttgtcgctgtcctagtgaaactgtgactcatcacttgctagattgttccagtgcaaagcttccccacttagacacttttatgttactcatagatatgttgacatcaaagactttttactctataatttttctcagctgaataaagaggacttatgacttttgttgtatactatctgggcaatatgaactttagaaataaaaaaattatttacaaattataatatgtctcctgctgatgttgttgattggattaattcttatcttttagattacaatgaagcccaacttaatttgaggaagttttatccatctaaggccttacataatcctggcaagtcgagacatattcctccaggtttctatcatcttaatactgatgcggctctgagttcagatcaaggcaagttaggttttggggctgttatcaaagattagaatgaaagggttgtggctggtctttctattcgtgctcttggtaattttcagctgttgatggtcgaagctttagcgctaagagcaagcctagtctggtgccaacatatcaaaatacccattgatgtcattgagactgattccaggcttctagtagattgaatttatggtcaaaagcgagatctatctgccctttcaaatgtggttgatgatattaggagttctttgtctttcttccccgatgttagccttcgacatgtaagcaataaacacaactacaatgctcatcttttagctcgcaaggccttggggctagaaaaggaattgagctggtggattagttccagttttgtgacttcttctgttgctaaagttactttcttttcaaacaaaaaagagagagtctacaataaaaatagaagctcttattgcggaagcaaggactacaagaaaatgcgaaaaatttagaaatatatagattaagaatccaaacagcccaaaaaattaatttattgtactaattacaaccttctcaactcgttaatagactagaagaaataaatatgagttgaaataagtgtacacgattgaaatattaaacttgatttaatataattaatttctaaaatttttttattgctactaaagtttctagactacttttataattactaaagtgtctagagtttttttgtttgtttgagtactcttgaattttctagaattatctttcacttatgttagtagagggacgtgaatcctctgtcaaaatttttagtctatccctctgtctaaccaatcaaaacaacccaagtcattaatgacttagcaaacacttacttatcatatattcattccgttagtttgttattccctatataaaatatataataataataataataataataataatatattatgtaatattataatttagagaaagaaaatagagaagagatgagaattttcttagtattttattccaatgggtgatctcctatttatacaaatacaagagtcaaatattaagaaattaagaaaaatggaaactaagaaaaagggcctgttgattacaattaatggtaataaatattggacatcaacataattattaatatttataacannnnnncttggatgtccataataaccgcctcattaaaaatgtcgctgagaaaacccagtgggacaaaactcgatcaaagaaaaagagtgcagtatgaaattactccccctcattttggcattcatggag

SEQ ID NO: 70490 - DNA, 1105 bp, Cannabis sativa
cctaccgtgctagagtcttgccctatatatatatacttgggttgaagatgaccttagtaacaaacaaatacaaaaattatatatttgatatttcatattgttagaatttagccactttgattagttagttagcaactaacttagacaactacttagtaagattgttagctagactttcctaacctcttacaacctatatgtgtgtctatatatagggctcttagttcttagttctaggtgacgatctagagagaaataataaaaaaaaggagcgagcaagggtatacagaggctgtgtgtgtttgatcacaacaccctcaagtaaagaaattgtaggtccaagacaccatttcgagtttgatctttgaagatcaattactgtgattctgagcaactctcttctgaataaagattagtcacaaggtggttcctcccaaatattaaatctaagcaagaaattgtttaagaatgaacctcactaatttgggtgctccttgtatttaaatactatacaacattgtttcatagcattagtttattattttttgttattttatacatttagtttaattgttattttgcattatttcgcattatcattgaaactaatcgtttttgaagtgtgttaattcacaacacatattatatataaaactcacattttattttaaaatataactaactcacatttgatttttgatattttaaaatagggtaaaaatagtagtatatgtacccaaacttttgagtttgtaaacgacataaacacgattgtttttttagcagcataagtatctaatatttgtaaaactgtaatttttctctaattttgtcagtacagactctgtaattaccttaaagatgacacatataaggtcgaaattctatatcattgagtctgaatagattcatgtagtatcaattacgtcgaaatcttcttttaataaatttaaaatgaagtttgtattgacaaaactaaaaaaaaaatacaaattttacaaacattaaatatttatgtagctaaaatataaattattttatttatttatgccacttaaaaacttgaaactttgatacaactctcatactctctctctctctctct

SEQ ID NO: 70491 - DNA, 1086 bp, Cannabis sativa
  modified_base (34)..(39): a, c, t, g, unknown or other
tagttttgagaaattagtaaagtggtcatatatnnnnnnttttaataactatgcatttaggaaaaaaattataaggtgttttaagtgtggaaattcaaatttccataatataattagagtataagaataataagaaagcaaaaagagggagattgttttgttcttatttgtgacacgtgattttttttttctttgacatgtcttgttgttgtgttgatgaaattattggatccatttgcctttttccatatcccattatcccacaagttttagaaacttgatttttttttttttttatgatgaagaatcagcttcattgatcacaagcacttacaacaacagccacgacaatagacctaattacagtataatttttctacataaatatgttaaaaaattaataataaatccaatatcagatataatgtagaacacaataacattatataataattaggtatatgcgtacctgattgatccatagtaattactacaatttgatagtgcaatactatcaactaaatcttcttcctttatctctaaatcagaagcatttatctattcgattataaaaagtatactattgtgatgaaacaatatgtatttatagagttagggaagagacttagctacataaccttagttggagtggacctgctcatcaaaggattcagttaactaaaaaaatccacacttctgcttcacctagactttacggcccattaactattgatcaccaacaatatgggctaataaaaaactatccaatcaatccaagtattaataaaatttgatgtaaatccaaataaaaagtctaacattctcccacttaggctatattaattttaatacatatatatgttatatattaaaataattttatttgaaaaacgactcatgggttgaacaacaagaaaatatttgtgaccactttaaaatgatagttctctgacagcatctcaacatatcagtctcatttaacctttgatataaaactatgacaatcatattattttcaactcaccaaaagatattcataatcataaataccaaagtattaaatcgatatggtcaataagtctagta

SEQ ID NO: 70492 - DNA, 1350 bp, Cannabis sativa
taatagaaactcccaattcagcattaaagcaaagaatgtttagtttttcccaacaaagcatagccaaactcaaagcaaaagccaacgctgaaatgaccgaattacccttcccaacaacaaccaagatttcatcccttcaagctgttatggctcacctatgggtctccataacccgaaaccgaaatctcaaacccgaacaggaagtgagctacagcatcgtaatgggtctgaggcaaagaatggagccaccattagcagaagggtattttgggaatgctgtagtgtttgggagagtggagaccacagctggaaagctggttgagaggaatggattgggctgggccgcattgcagatgaacattatgattgggtcctacacaacggagaaagtaaatgagtacttaaggagttgggccgaaagcccaaagttggccacattcactgcagagcccgggtttggattaatgactggtagttcaccaaggtttaatgtttatgggaatgattttggttggggaaaaccagtgtgtgtaagaagtggtaaagcaactaagtatgatgggaagttgactgtctttccaggggttgaccatgggagcgttgactttgaggtttgtcttcgagctgagacacttgagtccatggcttacgatcaagagttcttggacactttatctatgtgaaagtttgttgatgagtttattattgtgatgtaaaagttgatgagtttgttttcatggaattaatgaaaaattctaacaattatatattgttattattttggaaagaagtcccaacacaatttaaacattaagatgataattaaaaaaataaaaaattttagtatgaagtgtaaataattcaatgattaaataaaggagaattatcttatatttttattttttaatttacggtttgggtttttgaagtagtttttccaatagtttctatatgggttgttatactattatttgttgtgatttaaaatttctatgtagtatccgtaaaaatattaaaaaaatatatatattattttaaagtataaaaatgaaaaaattcttaaatgaataaataggtatgtatttatgagaaaaaaaattacaaccaaaaagaaataaatatctaaaatagaaggaaaaataaacatggaaatttcagctttcatttgctgtctcttcttttttctctttttaccaagtcttcgtaattacatatacaagtcaaagcacaagcaaagaaaattctacttctcttgtttgtccacttgtacgtacgtacaccaataatataattattaatgataagctttaaatgtgcacatatactccatagtccatacaaccacaccct

SEQ ID NO: 70493 - DNA, 1328 bp, Cannabis sativa
caaaacaaatacacaaatataatacactctttatcccaatcccgatcatcacctgtatgtaaaaagtacagacatccgaaactaagaacactgttaccagatgccacaaaagatgagcagtagtaccgtaacaccttgcagccgatcatggtgagtagagtagtaattaaataatgaaactctgtctatacagtcgtatgcatatctttgtgaattgggttctgattataatttttgtttttatggtttgggaaaaaggtccataagtgaggactcgttgaaaagatacgttcactttgcgagtgagagctgcatacaagagttgctttctgcttccgactcgaacagagttgtcgggatcaatggcgccactggcagcgatggatggaaggttcttacggtcgagaatggagttgagatatctaagcgccggtctggatctcttcatgcctttcgcagccgttggctgcttaaatctctttcacctcagcagttcatcactgttgcaaacgccattgatgctgcaaaggtgaaattttttgttctatgattattggtcatatcaactatatatgcatgcatgagtgcatattaattttgatctaaaaggtctttcatttctgttgatcccctggcaagttggaacaacaagactttccaactgaaacaactagtttacttatgctagctagctactttggaaaacatcacaaaataagaaagctgtctactagttgttatttagtctttgattattcttaggctgtcttgcttgaaaaagacaatttatttttaacttttgtggtttcgtggaaggaagccggcaagtttgtggttctgggtagtagtacttccattattattatttatttatttttatttcttttttgatgttttctctattgaaacctgcagcaatgggactctgacttggtagaagccaagtacattaaggacctggaagaaaacttaagcataattcgtctcaggtttggtgatagtgctaagccactgtttagaaacagagaattcattgtgtacgagcgacgtgaaaccatggaagatggcaccgtggtaactaattaacttatttttgttcacattaatctctaattaaaacttactttaactaaacactcaacactcgtttcttcaaagtcatcttaatacataatcttgtgtcatccttgtacaaaataataatataataaaaataacatatttggttttggattagaaaagttattacatccatcgtttgaaattacgatagctacataataatatattaatagttttatatgtgtgtgtatgtatgtttgtatagg

SEQ ID NO: 70494 - DNA, 1317 bp, Cannabis sativa
gagaaaaaaaatatatataccttccttccttccaagcataaattgcacatagacagcctatgcttatggaacaaatgacccttcagctgttcaatactacgaaaccttgcacggcgacgctttgaaacatcgtttaactgttcctccatcttatcacatacgctgcatgaaagcttgcacattgctctaatcatcttgtagtgatcagcatcatcaaaaaacgcttgcgtgtcctcatggtaccagtatggacccatacgaccctcccttacttccgatggcaatagcgagaagtcgttaatcatcgtagtatagtctcccaaagcctgaaagaccggcagaagcacaaaattttagtcagacgcttcaacaaaggaattcattagtagcataataaaaaagttcgatccacaaaaatcttaacacaaaaaagatttgaaactgcaatgattagaacaaaagtaaagaaatcgaattgatcttcaaagcatgggaaatcgatctctattaataaatatttgtaaagcctgaccttagtgacaaaaacgacatcggactcgttcttgcagatgcagcagcggcgatcctcgcatacgatgcggaggcgaacaacgcaggtggagcaaacctcccgatgtccacagggcccataggcaacccactcgagagtgtcagcgcagacggcacagttatcttccatggctgtgattggttttgggagactgaaaggaaaccctaatgcagatgttgaagatggagaattagggttttcagaagaatgaaattgggattgcaattgatttaaaaagtatatataaatattattttgatttagacttgttgattttgaatttgtagttcggccaacgtcgaaggttctttccgctttcaaatcgtctcttcacctgctcccccaacaagcaatgtagaattagaattggaataactttttgaacgtattgaaactgatatatacatatatactagtgtttacaactgtgtgaatgtataatttttttttgctatataattaaaataaaatacaaactatattttattttttataaggagctataataattattttttttaaaataaaaatgatctattagtcctccaactgaataaagaaacaagagtctattgccaagcaatgagtcaaccttgcagatcgttttacaaaaggggttttcttattagtgttatattacaaaaaatgtgcaaaaaaaaatacaattttaaaaatgtacacatttgaaaatatatttataaaaagagaaaaaaacaggaaaattccaaaaagggtaaaatattaca

SEQ ID NO: 70495 - DNA, 1404 bp, Cannabis sativa
tcgtagaagatgggaaagaggtcgacataggtgggactatgagcgattgagaaattaagggatttagattttgtctaattggagttgtgctaatagtgggtctatagggcttgacactttggcctgtaacagctagtgtccccctcttaaatttgttgggttgtttcaattatttgggccaggcacaatggttgtagtatgttcaatgctcccttaattacttcttttaagcccttcaaaaaacttccttctaagatgtgctctggtactcttggtaccaatttgataggaaccacctatacaaattgtatcaataataataaaggttatgaatatggaagaagcctccacaaagggaatgttgatatggagctttttaaatacttcaaggaatttgctgaacgacttatccatgttatttttgcgaagcctttgaggataaggaattttgatatgatgattaatgttaatgggaggtgaagtttctttttattagagaccttagtagtctttttcttctcttatgctgatgttggtgcatgttgatcctgatcttcatcctctgacttgtctttgtttcgctcgacatagttcttaccacttctcaaagtaatcgtctttcaaatttcttttggattgacttcagtaatgcaaggaaagttaccttgattcttgttagccatttgagtagccaactaccccatctgagtttctaaggctttaatggaagatctagcttctttcatgaactgaagtagcaaatctgtctgaagattagaccctccactagaaccttattgttgtgactattattgattttgttggggctaatttctttgttggtaaagcccttgttgttactgatttgaagactgctcttggtaattctgtcgacgaccccctccttagttttaaccatagttgttgttctgagaatagttcccaatggctttagattgatccattggaaaactatttacatccaccaaataaatatcatatgtgtgagatccatagctcacaagtaacttgatctagctttgcttgagcagtcatcaacttagtcaaagcctcctcctgtgttgtcaacttttttatggcatctatttcatgcatatctgcaactttcttttattggctcctttcggttggccattgtcgtttcatggccatctcttcaagcagttcataagcctcattcgcactttttctcataaaagccccaccaactgcgacatctatgattgtttgagtattgccatccaacccattgtagaagttatgaacttgcatccacttttcaatcccgtgattagggcactttctaagcaagtccttgaacctcttccaagcttcataaagagattcgctgtcttgttggatgaagttgttgattttagatct

SEQ ID NO: 70496 - DNA, 1221 bp, Cannabis sativa
tacaatggggagaaacaagaaagctatttcgggattccttaaagataaaatgcaaaaacgaattcagagttgggagggtagacttcttttcaaagccggtcgagaagtacttctcaaaactgttgctcaggctcttcctagctatgccatgtcagttttcttgctacctttagacacttgctctgctttggaaagcatgatgtctaaatattggtggaataccaattcccaagattcccgtggtatcacatggatgagttggaagaggcttacgaaaggtaaaaatgatggaggtatgggatttcatagtcttcatgattatagtctttcattactcggcaaacaaggctggcgccttcttcttcatgaaaatactctcgtgggacgtgtgttcaaagcaaggtattatcctcaaggaagcttcctcacttcttcacttggaagcaacccaagtttcatttggaagagtatctttgagtctcaagatcttgttaaatctggcgctagaatccgtattggtgcgggttttgatactaatgttctcaactctccttggctcccatcagatacatcaccctttgtcacatctgaccatccttccttgtactcttgcaaagtgtaccagctcatgaagaccgatgttaaagagtgggattctgaaattctgtttgatcttttcagctttacagaagctcaaaacattctacagatccctcttattagtaattctttggaagatgtctggtattggaataaagaaccaactgggttctactcagtgaagagtgcttatatgcacttgcaagcattgaagggtaatttctcaatgaataacagctcggctctttggaagaatttctggaagattaaagtccctcctaaagttctacactttgcttggcgtgtcttaaccgattgtttggcaacccgtgtacagcttcaaatcaagcgagttccagttcaaagccactgcttattttgcaactctgcagctgagacttcccttcacttgttcattgattgccccttctcaaaatcttgttggaacatatcagctgtgactattccacctacgactgcttctagctttcttgactggtttactacagtttgggatcgacataagggtgatgcaattgaagaagttttaatggtaagttggtctatttggaaagcccgcaacaacattgtttggaacaataaaactaccacggctgctga

SEQ ID NO: 70497 - DNA, 1247 bp, Cannabis sativa
gatttggctcgtatcactcttgaaaaatgcattatttgacgaggagggaatgcatagttttggtgaggttaatcgagatcactagggtcgggtcgtgattgggattttgggattataggttgggtgagttcttcttgagattgttaaaactgtagctctcaataaagtactttcatggttgaagcgggattttttcggtgaaaatattatcaaattttactgcatctattgtagcagggtgtattgtaaaaacacccaatattttattatataaagcactctctctccggtagttacatttttccatctctttgtttcttctccaacctgaagaattatcgtccgtacacttttcttcttttaaaccaattattttctcggcgtagattttttcattttcccgggaaaatgattcttcaacaacctcatctactccaaaacccttggctacttctacacactcctcgctctcgctctcgctctcactctcaagtactactttcttcatcattctcaaacttcaacagtaattcaattctctctctacctactcgcttcggcaacaccactagtacctctcctctttgtcttccgagtttgagattaaccggtcgccgttttcgtttacttcccgattgcaatgccgccggagccggcagagaaatttccgacggagaagaaagttttggtgatgaagatggtggaggagtgttggcggtggaaaatgcggagattacgggagaaggattgttgggtaatcaaggtatgtgggatcagatgaaggagattgcgatgtttacaggacccgctgctgggctttggatctgtggtcctcttatgagtctcattgatactgccgttattggacagagaagctctcttgagcttgctgctttaggtacgcattcatttttttaaaatttgtttggttttccttaattaataaattatgtatttatcttacacaattatatctttttattattatgctatacatttaatggaagataagcatgaataaattgttggggaattacccatatactaatttttttttttttttcaaatttaaagtttaggttgttttgatgcttgttctgtctacgtgggttgttacgtgaattttagttgcgatttaagtttttccattagtgctacattggttgttatgtagatttatgtaaaaatgccaaaactgatttaagtgtaaaaatacccccccttttttttatcttgagtctgaattt

SEQ ID NO: 70498 - DNA, 1237 bp, Cannabis sativa
ctctctctctctctctcttttttgaaccaagaagaagccaaggacttagggttcttctgattgttctgagtaattcttgctggaattcagagtagtgctcaacagtttgtggaaggtttttatcaaggtaaaccctataattctagcttgtatgttgtttaagcttaaagtttggtttggctgtgcaattttgtgaattggtggctgtttagggtaggcttggttctagaatgatttctaaagttattttgagtagaatttagttggttgttgatggtttttatgatttgagtcaagtttgagtttgaaaactcaaacttgagtcattaatgacacttttaaattttgagtatttttcttgttgttattgtttggaatatattattggatgttgttataggtaatctggaaggtttggggaagtttggaaacgatttgggcaagttttgagtttgtttggggttacctggtgcaaaccaattaatcggttttacaggccctgtaaaattggctaactagattaggggcaggattctcgaaaaattcattttgtcgaatcgtgttatttccagagccttagtttgttattccttgataactaggttatagtcaagttagctatctagtgaaacctataggtgtgagtttagattcctggattaggttttggtgtgttatttacctgtttatgtaaatgtgacttagggcatctatccaacatgaggttttccgttcaggtcagccaactcacttgaatacggaaacgaggtaagactagcatagaaaatattatatatgtgaatatgtgtatatatgtaaattgcataaagttatgaattaatatcatagcggcacaaccattgtgtcgagtcagtagtatgagcatagtactaggtttgactgatattcaattccagaaagtattaattggtgttatcatagcggtatgagcatagtttaggttaagagtgatattatgaccaattatacttttaggtattattgatgctatcatagcagtatgaacataggcacggtcccacagtgcaatcatagtgctggtagtggctgatatcatggtcaataatatcaaatgttaaaaacgttcttacttatctgataagccttgcggataggtgtaagggcaccttgttacgcgtcggtattatattatttgttatgtgtttttcttattgaatgtgtcgactcacagatattacttctgtgtgtaggtaaa

SEQ ID NO: 70499 - DNA, 2752 bp, Cannabis sativa
ccacactattctttgtgtgtggtggatcgatttggaagatactagtgtgagtccaattgcaaattcctcaacaattggattaagggatacaatatacgagaaattttgagaataccttgataggcttcaagaggtatactctaaacttattacaatttaattttttgatttaatgtatacatatctgaagatcctaggggctatggtataatgataatctgttaatacgaaactcttctgttacgtacctgatttaatactataaaaccaatactaaccgcaatgtacatatcatcctcgccgtcttttgtgcttcgttgataggatctgtattttgtaatactttgattatgtaacaatattttgtaacaaactagtatagtggcatcttagttaaaagtttctaactaagggaatcctcgaataaagtaatattttgaaaaaaattaaagttataccttaaataaattttttaaaaagttttcattaaattatatttttcttaaaatattagtttattattataacctaatttataaaagcacacacgtgatgcctttacgggttagggcattacaacatggtatgagagccaccaaggtttaaagatcctaaagactggttggatatgtacattggctgtgaagactcgttcgacttatggtatagtaagtgtttattgattaattgattatttgttaattgtttggaatatttatttctttatgatgcatgagttattagaagagcatgataggttataggcagtgatgttatatatatataagtatggaaatatttattagcattggtgttggctcgagaattctaaattttaaagagcttatggttgcaggtgtattagattatgcaccgaaggtaattcagtaggattaaccacgagctttctaggcttaaggcagtcagtgaggatgcgaatcctctactaccacaaaaatttggaataaatgtatgtttcaatgtaagagaccatttggcagcaaggagatcatactataaaattgagagggcaacaagtttgtcctgctcgtaattttattcttccgacacctttgtttgtgtcgcatgacgtgagaaaccgtttggagctattgtatgagcagttcaaaaagtaaaatccactagtgttcaagggtgtgctaacccacttaaggtggatgatcatgataatgtctatctttgactttatgtgagtcgaaggtaacaatcgggttgggtatgctatattcatgttgcgacatgatgctcacatttggtgggaaactgtgcctcagggtcatgatttgaataacattacttgggatacatttcagaccttgttttatgaaaattactacaatgaatccatccagcttctaaggcagagaagtttatacgattggcttagggcagtatgacagtgaccgagtatgccaccaaatttgactggttggctaagttttcctttgatgaagtggccactgaggcttctaggaaggctaagtttatctgagggttggaagaacatattgctcgtgatgtggttgtagttgctaagcaactgaggtttgttaaaacttatgcttaaatggttgagttagcccttactgctgagggtgctcaaaatcaaatatgaaagaaaattaacatgagaagacattctttgaggttgtctcccaatattggtcagaataggggtgttgaccccaatgattgtaagaaaagacccaatgacccaccaaccataggtcctaataagaaattttaaggtaatcaaagtttatgccgaggtgggaacaaaaactaaagaacctatcctgagtgcccaaggtgcaagagacgctataaaggcaaatgtcaagcttgagcctgcttctagtgtggggtagtaggtcatctgaaaaggaattgtccatagttacaaagactagaaataaagaaagaggatgctctagttttttctcgggtatttgctttgaaccatacagaggttgatgatggtccttctaccgtgataggttaaatttctattgatggtattatattgtctgctttaattgattttggttctacacactcttatgtgttgagtagagtgatttttagtttgaacaagccctgtgatgttttaccaagtggttttggtactttactgcctattggggaatcggttatctccagtaggtgggttaggtcccttataatgtatgtggaaggtagagaactgtcagtaaatttaattgaattaaatctagaagatttgatgtaatattggggatggattggctaataaattataatgtaatcaccaattataagaggaagatgatgatgtttgaacccgagggtgaggacccatttgtgtttgtgggaagggtttaagtatcccaaattccagttatctcaatgcttaaggcaagggattaattacgagataaatgtattggttatttacccagtgtggtcgataccacgagagaagtaccagtgggacctgaacacgttccagtggtacgagacattctaaatgtctttccagaggagttacccagattaccaccaaagcaggagattgattttaagattgaattgttatcgggggtagagcctgtatctaaggccctgtatcggatggaactggcaaaattaaaagaactaaaggtttagttgcaaggtatgttggatttacagtttaaaagactgagtacctcgccttggggtgcatcggttttgtttgtaaggaagaaggtgt

SEQ ID NO: 70500 - DNA, 2068 bp, Cannabis sativa
aagaaaatcaaaaaatatcaaacttcactctctcttgctttctttctcttggttcggcctaggagaaacaccaatgaaccaaaaattttagagtaatatttattttcttttagccatgattaactcctggagttagagttaaattgttgggaatggtaaggtaatcttcttctagctctctttgtttttctcaatggaaagtttattttaagttggagatttcatgattggggtgttgtgtgctggataggaattaaaatgttatcctagattatttttaaaggttgtttggttgatattcagtgggttttctagctggttggttagagaaccaagcttgagctcttagaactcaaagcatggtcattaatggtgaattttgatttgtgattcgattttgatttctgttaattagaaatgttattttgatgttaagtaactattgtgtgaagtttggtagcatttgggattgattggagaaaattttggggctttaaaaacttgaaatttttgagcccctgctattgtgaacgagaattctaaatggtacagggttgtaccaaatagaattttatttggcagtaatcgagaagcgcaaatttttgtattttggccataactttccacttggttgttcattttagacgttctatatattgttttgaagcttttgaagagctctaaagtatgatacataaattaaagctaaatatgtattttattttggggtgtttgcaccacaaggctcggtagaaaaccctaaagttttttatgcagcattagacaatgttttataatagacacttatcaatttaccattgttgtgacatatggtcgggattgtcaagcatttctccactgactcgcatgtatgaatctggattaaaggtaagaaaattacatttttactacatagcatgtcatgttaagatacaattattgtcgtttgtcaatcgactattatcgagattaaaatacggttattaccattatgtgatgaaaaggttgtcttataagagaatgataaaaaggttatctttatggttgtctttttagacaacaacgatgatattgggatatcgaaaataagtatcagtgttgtcttattagacaaccatggtgatgttcggataccggtgataagtatcagagttatcttattagacaacaacagagatattgggatgcccatttaggcataagggttattttgttacacaacaataataaaagttactttatgaagtaatgggtatggattgtattatttaacaagtaattgtatattactaaatgtttttatattaatttttatttatgacttaacatttgtattgatttggatttaattatgtgtgtaatgtgtgatcatttgacccttcttattgagtttaattgttgatatttgtgtaaggagatgtgatgttctattactgcttttcttgttgagtctttgtgactcatgtgtgtatgtcataggtagaaatatttggacaactatgagtcagggatcttctctagtaaatgtacatatcagcttatccgacaagtggtgccaacttgtcaggattggcatttttagatgttctgaactttaacatgtattttgtaattatattgtaatggcacatcttgtaatattttaaaggagatccctaattttaaaagtgatgatgccatgactttaattagcaatttttttattaaatcacattttttactttaactgttagtttacttgttagtttataatcataaactaattgtagaagcacacacaagtggcgttcctagaggttagggcattacaacatcgtctcagagcagccacagttttaaagatcctaaagactggctggatatgtacatttgctgtgaagacaatcacgactcatggatagtaagtattatcttcttacttgttctatgaataattaatatacgatgttgttagaaatatatttagaaaagcatgagctaagcttgtcaatagtataacatgagtttatactaattgagaaagcatagaatatctacatgtctgattgacaagtaaggaaatgcttac

SEQ ID NO: 70501 - DNA, 2760 bp, Cannabis sativa
gaggtaacaagttcttggagtgtacctctaagagttatgattcgtggttctggaagaacgttgtacgatctaaagaacttcttaagaaaggagcctacaagcttattagggatgggaaggagacgaacatttgggatgacccgtgggttatccatggatgggatttctaccataagcctattacttgtctgccgaaggacatgagggtggtggatttactcttacctaatggggattgggacacctcaaaactcattagtctttttgacctgaaaattatcaacaacataatcaaaggtggcaagcctattggtcaagggagcgatagatgggtttggactaaagaatcagataggttgtttttcactaagtctgcctaccttatttaagctcttaagcgtgctctttcgtgcaatgttgccccgacactttggaacaaattatggaattcaaaaattttagaacatcacaaagtcctctggtggagcattctctctaatgctctgcctattcgtgcctctctcgctaagagaatgcatattgaagaggtctcttgccccttttaatttgcggggaggaagatgagacgatggaacatctctttctctattacaacttcgcctatcatccgtggcggtcttccccttggggagttatgccagtgttaaattcaggagctcgtatttgggactgggttaaatttctttggaatttgaattctaatggggtggatactgaaaaattgttcatttatgcttcgattatggcggatatgatttggagagcgcgtaatgacaaggtacacaagaacgtcttgtgtaatattaaacatgctattgactttttttatttttgttacgcagattatggatcttatttacttacctccctaaagtttgttgagtctacatggtcgccgccaccaatggattgggtcaaaatcaactgttatgtcaaagttggttgcgataccatgtgcgttgtggccacatagcgagggatcataagaaagttattttgtgggtggctacaagaatgctcaatttctctaattcccgcattggagaagctgcggcttgtttgcttgccatggagacggttgtttcacatcatcatcattttgtgttaatggagagtgattctgatatcaaggttctaataaggggtaccggcaactgttggggtattgataattatgtgtgtaactgtaaacatctctctaattttatgttaagttgtattttttcttttatttctagaatttgtaatttcgcggctcataatgtggtcaagtgggcttttgccaacagtgtaatcggtatggtagagctattttcgatatcgagtcctatcttttgtaatgaccgaaagatctaacttctatttttattttatttatatatttaaaaaaaaaattgttaattttaaccaattgataatgtatacaataaaaagaaactacatactaaaaaatttacatgatatcttaaccaaaactatatatatgttgggataataataaattcaaattataactatccaaataccaaatataatagagtacattgatatgtacatccttttaagggtgcacccgcttaaaaggtataccaaaaaaaaaagaaaaatacacaaacatgcataaattgttcaatctagctatatacataatatatgtacttatatttatacaccaacattagtgtaactatctttcttattactaacacaattctacaccaacatatcacattgaagtagtttccacatctttagcattgttttgttttcttctactcattctcttgataattaggtttcgtaaccatttaaacagctttataaaaatatgaatggcttggagtagcacaatcacatgcatgactataccccagcttattaataaaattgtgataacatgacatggagtactatgaaaatcatgtcttggagcagcaacagcaatagcaataaggtatgttatagtcatcgctgttacagtcacccacaaaattattgttaagatccacatcaagaatttgcgacaaaagggcaagcctgtgacaagaagtaagattatactcaatgatccagcaaaaccaattgtgttagtaaccaagtaagcatgataaggatatatgtttccgtaataacttattattgactcccctgcagagtggggaatattttcggaaccattatcttcccaaagaccgcctggaggacttattccggcctgaaaagccatagtggcaataagggaagcaacaatcattaacgattctctctttttagctagccagtagtattctggattcgatgttcccttactattgtcctcttgattttttcgtatttgatgaacatgatcatgaggaatcttgaggctagctttggcagcttgaataataggcattttcataggtacgggttgatttatggttcgtgaagctccataagagcgaagagactctacaatgtcaaagtctttctcgcttctttgactctgcgctaaaatgtctaatgcagtgaacatgtttgaattgaccgcgttgacttctattttagtatttgtaagcaaatactttaccgtctgagtaatagaagaaaaagaaaaactagttaaaaattcaaattttaataaggaaggaaaataagaaagagaaatgaaaatggaaatatgcatataaaaatattaataaaacaagttatatgcataaaaaaaatttcattacattaaaatatatataattaaacaac

SEQ ID NO: 70502 - DNA, 1026 bp, Cannabis sativa
tagaagaagaagataggtctatctcatgaagaaacaaccacataacatgacttattacaaatacatatagattctaccaaacttatgataggctgtgaattacagtaattattgtttgaattagttatcttgcccacttgaccaattaaccatatgtaaaattaattccaaaatgaaaaaacaaaaactcaagctttacaattttgaagaaaggtccacactccacaaaatcccaacctacaaaaattaactatacatctagctactaattaaatagttaaaattatttcccctctctccaattgaaaatcttgaaaatgataaccaataagattccacagcctcaacaccaattgggtcagccatagcttcaattacctaacttatataataaacaagaatcatgtactttctttcaaaaaaaaaaaaaaaaaaaaatcaaaattcaaaactatatatgcacaataaaaagaaataaaaaaaatgttcatcatcatcattatgatcacatggataatgcataccatagaaatgaacaactagatcttctttgatcattgaagatcaaacttgtacttcttctatccttctaatggcttctttcatatcaattcgttcttgtggattactctctacacaatcagctccaacatgaaggagttcaatcatttggttaaccgcattggaattagcagcattcccagaagcgatttccgggtcaagcaactctgtctccctctccacagtcttgtctgccgaagaaacccactgaacgatgtcaattccgcctttgcctttgttgagatactgagaagggaatttcccagtaaggatttcgagaatgagaatgccgaggcagtatacatcggtcttttgtgagactctctggtacttgacgtagtctggggttttgtaggcgaacatggattgagctgcgttggtgggactcatcaaggggtgaaacgcatagtcgcttaggactggttcgtggtcgtggttcaaaaggacattgctggacttgagatt

SEQ ID NO: 70503 - DNA, 1744 bp, Cannabis sativa
gtcaattttctgtcatagaatttaagcccaaaactcgaagacctcaaaccattcttaaaataaatgataagaaaattagagatcatcttggtaaatcttgtcaagaagaaacctctagccatttttggcaatttttgcaagaggttattgagagtaggcgtcagtatttgcgagaagcagcttggcctaaacccttaaacttagttcatatacccttagtgaggcctatgtttttacctccaacactattgctttttcaccaggtgacttagactttgagataatggcacataatgctcgtaaattaaagacccctcaagaccccacaattacctttgaagctgaattaattgaatctaaagttagctctattgaaccttatgttaaatatgttttgagatcatgtggcatcaggaatgaatagggatgtcgcattaggtctgttgctaagggggagttgagttgttatccccctgaatgtctagtttgagacgaaggttacaacattagcgagccttccagaatagacgcttagagcctcgagcatataagagttggggcagttctccctctcaaggactattttaaagatttctataattaccttggtatagccccattccaactgacacgaaactcatacatgatattggcatgtttaaagtctaccatatgctgaagtgggagtgtccaaccccacttgaaattctttgtttttattctgtcaaagcttgccctacgaggaaacgaggtgtaggaggcttctactacctcgggacccacaccaatgaccataagatcgttgtgagatttccaacaaaaaagagttcaaggatgacctcttttggaccactggtcttttctccatcaacacaacaaaatttcaaattatacgtaagtatagttcttttcaaaaaacttggatttgagttttagtacaatatatgttttccatactttactaagttcgttctttgttatgttaacaacgattaccacgagacctgtcccaactcctgagatcgaaaagaggcacatgatccttcttggccttccttatgggttgcgagtggctgacttcttgttacatgagaacaacttgaagttttgcgcccttctcggcaaagaacaatccaccaatgactttaaagtcccaaaatttttagactggaaacaagttccagtaccagctgacgaggaggataaggactatgtggcgagcaaccactatatgaagaatatgaccccttgggaagtttaagatgatgcctcccgaggtaataattttggtgcttgtggatggtccccaactgttcttaaggctgaacgaacaacattagttaaatttaaagatagacaatataacttctatatttggaactgtgtagacctcatcgtccataggtttgatagttggtaccctaaacatcacatccagttgagttgtaatagttcttactttgggattgctagccaatatggtacaaactttgatagggctagaagtttagattgagacttgtctccactcaattcctttgatcttttcatgatcactgattctagggaatttagtaattactatagctcttcttccttgtctaatgattatggtaatattcttaagtggaggtggagatctaacaatttctacttctgtatcatcaacagcaggagacttcctaaaatcaaacaagtaaaataatacatattagttccccacatgactttttggcccttcttc

SEQ ID NO: 70504 - DNA, 1070 bp, Cannabis sativa
gatgcaacaaaggcatatcagtcacacaacagccatttactatgcaactcttacaagaaactggccatcttggcaccaaacctgtttccactcccatggaacccaataataaactcaataacgaatctggaaaactccttaccaacccaacacagtatagaagtttaattggtaaactcatatacttgactataacaagaccaaacatttcgttttcagtcagcaaattgagtcaatatcttcaagcccccagagaaccccatctccacgcagctcatcgcatattgcagtacttaaaaggaactcctggtgaaggcctttttcttttatgcctcagccaatgaaccaattcaccttcaagcatttgcagatgctgattggggtgcatgtttagataccagacgctcaatatcaggttattgtgtcttcttaggcaaatccctcatatcctggaaatccaaaaagcaacatactgtttctcgctcttctgttgaagcagagtatagagccatggcaaatgctgcttgaactaacctaactccactcaatccttcatgaatttggcatccaaaacaaactcccatcaacattattttgtgacaataatgcagcaatccacatttcataaaatcctatctaccacgagcacaccaaacatatggagatcgactgtcacctcatccgagaaaagataaacaatgccaccatcaaaatgaatcacattacttccaaatccaacctggccaacatcctaacgaagcctctcttccccagtcatttccacgacatagtttccaagatgaacctaaaaaatctctatagttatcttgaggggcctcttagaggcttagttagttcatgttagttatacggttattagtgttagttatatttggttggttagttatatccaccgactttcccctgcaatatataagcagtcattttgccattgtaaacacattgtttacttttccaattaatgaaaaactaatttaagctcttcaaagctaataaggataacaaaaataaagcatgaaatcaaaatatctcttgattcacaaagttga

SEQ ID NO: 70505 - DNA, 1202 bp, Cannabis sativa
  modified_base (1138)..(1150): a, c, t, g, unknown or other
attttagtactttggtgtagtggtataatattttaaagttcttaaaaagtgtcaagattcaattctccataggcataatttaatatttctaaaaaaaattaaagggtgaatagcagtataaataccaaaatttttgagtttagaataggtatgaacctaatgattttttttaacagcataagtatccaatgcttgtaaactaattttcttttagtttcagtacgaactccgttttgaatatattaaaagaaggtttggaagtaactaatattatatatttttgtcaagccccaataatctgagtcttatgtgccctcttcaagacaataatagagtttgtacttacactcctactacttcaaaatgaccctttcgaccactatggtagacactatatattttgatatataatttcttattatttaatagtttatctatatactaattttttttttcacaattttgaggccctgagcattcgaggcccaaggcacaacccttgctcgcctcttctgagggtcagccctgacaaaaaacaggagttgttcctaccttgaaatctccaatattgtgccaaaaaatgtactcaataatgtgcaaaaaagtgaacaaatttggcgcattacaaatcttgtgctaaatttggcacaatgattcaaaatttgcataaccataaatgcacaattttattatttacttctaaacccttttattattttattagtatatttagctataacattaattatgaactctttatatttttttattattttacataataaaattaatggtatagttactattttttatatattttaataaaaatattaaatttcgatcaatttttgttattgtgcattggagtatagtactaaaaatcgatgtaaatatatcgcaattttttttttataataaatataatataatttttacatttttcactgtagatagtctaaaaactattaattgcttcctacctaatacatattactagaggaaacaattattacccttattattaatcaagggataattacataacacacttatttttgtaaaaaaattacatttttacgtttaatgaattttttgttacattttgatggttttccgtaaaaacaacacgaaaacaacnnnnnnnnnnnnnaaaagtaacataaaaataacatcaaaataataacaaaaaataacatacagat

SEQ ID NO: 70506 - DNA, 1819 bp, Cannabis sativa
acatgtatgggagtctatcatattgaaattgcagccatacccgtcttttttcatgtggaaaaagatatcctgggaaaatcttggattgaatggagctcctcactttgaatttgaagaacccattaatagtaattcggttaacatccagttcttggatttcgacaatgtctcctgccatcgctaccagtcttgccatgttagatttggtaattaccttcactggcagattatagacgcgtcctgagatgaagaatgatgtcaatttcgtttcccaatcggacggtatccccttcattcgatccagtattagaaatctcgcattgagcacccatggagatcttcccaggattctttctagtgtgttgttctcagagaaagaaagaaccaaaaacgtggccttagttgaaatcttctttacttttaaatcccattcattttcccctaagttccatagcctacaaagaatattctttatcaaagaacgactgaaggatttcattgtgcacagtcggccaatgaggcaagacttgccaatgtcttcagcccctgattcgttaatttcccacccttcctcatctgttaccgtaagtttgctggtgcggggcaacaaatcttccattggaggtaggcttggggagcacttctttagagtaggctctttcgaacagagcatggaggaattcacagagttcaccgagagagacgagagcactatctctttttgtacttttaaattttcctttcttttagtgttcgtatatgtatcccaaattatgtaatgacttactaatcagtcaaaagaagcttgtaattgtagctcaataagacaaattacattataattttatgtgcatgtaatgtgaatgtgatgtgaatttgtcttaaattgaatatcagctcttataactttttagtcaaacttaatttttaaaaatatatgttaaaaacatcatatcatcaatattcgttacagttacaacaccattactttaattttttttttaaaaaaaattaaatagtttacagtgctgaatatatatttgaagttttttaaacacgcgtggtaaactaaaatatcaagaattctgtttttggtacaataaactatttggaacttttgaaaaatttacaagagtaatattgtaagtataacaaatactcgctatgaattatttatttatttttaaaatgcatattccagcatgtaatttttgaggcgtggaagttgactaagaaattatactaggaggttataattagcactctactatctaatatctttcaaagatatatagtattgtaattttctataatagaccccctaaagaatagttatggtaaattttatctcttttggcatataaaatatttttaatttatttttttatggttgcgtacattatagatatttaggaccatttttaaattttcaaaaaaatttgaataatttacaatgccgaaaatagctttaaatagttaattaccacacatataaaaaaaataatcgcgcatgcaacacattatatataaatcttattttcgattgtaaactacttgaaattttttgaaatttacatgtaatcataaataattacataacatacacgatcttgaaaaacaaattagactaaacaaattctcctgaatgccaaaataaataagaattttaccaaaacaccctttcacgggtatactaatactatacccttacccagtagtattatataaatttatatatatatatattactagtaaaaagctacgtgcgaggcacgtatactaaatgtaacgtcctaatactaaggcacgttacagtgct

SEQ ID NO: 70507 - DNA, 851 bp, Cannabis sativa
aaattagatctaattaatatgactaaagatataaacaatgtgaatgtattgatatattttgatacttatgcgccaatagcacaaacgacttcaataaaaaatttattcattttgctttttatacataaccaacatgtggatcaaatggacgttaaaacaaaatttataaatggtgacctaaatgataatgtctatatggaacaacttgaagtagttgtcctacaaaataatgagcataatgtaaatatgtattaaaacaagatcaaaagcaatgacgtgaaaagtttgatcatgtttttattttaaatgtctttagacataaccacaaaaagaagtgtttgagttcaaaaatgttatctgcgtttttaaatatgtgacacatggatattcaaatcgacccatttagtttaacgggctcattcactaggccgaaatggattgaccaccccactcatgagtagaactggacaaagagtttgaatctaatagtggcttcctcgcgactaagtcaggcggatggttttgtaaggattttgcacatttaatcaacaagaattcaaataggcgaaggtgaataccctcaggggtcatccaagaaaggtagtcgaagaggcgtatgggaatgaacaagtgttcaagaaccatcctacatggcacactgtagcaaaaatctcgataaatctagcagcttgtcccttgtgtcagaccttggaaagacacacaacaaaaagaagatcacatttttaggccaacgtccactactctaacattctctcaacaaactgacgactcatgcccaactgtcgctattaataatacattcacacacaaacgacaattgtctctacacc

SEQ ID NO: 70508 - DNA, 1429 bp, Cannabis sativa
tatatatatacatagcagaagttacaacccgaactcacataagccttttatgagaaaatttaagatgtgaagaacatgtatgtatgtaaaaataatcatatggatcaacttttttagtagcaagtatataagtaaacaaaattgctaaaagatatattattagtgtctagtactccttttggtattaactgttattggtgtaacttaaatattttttttatgaaatattaatatgcaatcgtgaggcgctacctataaaagtactctgaatactactaatgttcaataacaatggtcataattaaactacttaatttttattaggaggaaactgtgtgaattggaaagcccaactccaaccagtggttgcactttcaacaacagaatccgagtacataacaactacagaagctattaaagaaggcatatggatgaaaggactcttaccagagatcaagctacttaaagagtttccaagagtttactctaacagttaaagttgtgtacacctgtatagaaaccctgtgttccacgacaggactaatcacatagagattaaatatcagtttataagggataaggtaacacagggagagatacaagtggaaaaagctctcatagaggataacacagctgatatgggaactaaggtggtgactttaaataagttcaaacattatatgaacttgttgagagttgacacaagatggtgaatggaaacttaatcaagctataaccctcaaagtcaacaacaaataaacacagtaaaggcaaagatactttttggactgttagtatgaatatttaggtggaaattgttggataaatctccatactaactgtccataaggaaatacctcaacagaccattataactcttagagtagtcggttctgtttcataagctaaaatcttacagctccagctacatctctttacaatacaagaaagttaaataacaacattcaagactccaacaacttgtcacaactcaagaaaataaaataatagttttaaaactgtttctcaactaactcatctcagctcaacacaacaaatcacatacaataacaacactataaaaggagtatcaacctgcccatttgaagagagcttcagtccagcccttgggagatgcaacaactcattgttgcagagagttaaaccaagcaataagagagagaaaaaccaaagaaagtcttagagagatatgctgtaaaatcaaactagaaaaatagagaaaattgagagagtattcgagattacctgctggtttgtggcttggaatctcgaaaattcttgtagctaatcttaacattgatatggatgatcaagcgtctttgagggaagcttgacggagatgtacccctaatttagggcgaactccgatatcaatttctgtcgaaatgcatccttttgatgtcgggga

SEQ ID NO: 70509 - DNA, 662 bp, Cannabis sativa
tacatatcccaaaaaataaccacacagttaaagccctacggtaaaggtgttattaatgtctctacattgatgaaaataggttaaaagttagtagattataatttgactagatcattgggctactagactgagtctaatggattttcaaatgaagcctcggtagttggaacatcactagatatagtttgctctaaagctggaacaatctcagaggacagaagagaagatccttctgggatcacatcaggtgatggcatatctttggcatccacgttgataaccactttagcagccttctctatagcttcaagctttaagatttgaggaagaagctcttctttgtcatcctaatctaaataatttaggatttccttctttatttgtgataagtgaaacaaggtcactactagagacttcttcagctcttcctgatgtttctcctctatggtgacaagcttctctcttcaagactctcagcataggttttatccttcacaacaacaactttggcttctccatttcttcttgggaattcttggccttctctattttccttgggcaattttatccttctacatttcctattggacatgctttcgagactcgattaaagcttttttggtctctttaagcttttccaagcttgattattttgaagcttc

SEQ ID NO: 70510 - DNA, 1568 bp, Cannabis sativa
aaaatttaaattgaattaaaccttgcctttagcttttttgctcaaagaaatcactatctcactagtaccagagcttatatcgctaggtttaggattgaaaatcgaaaaaataaaatataaagggagagcgttttgtcgaacggagaagacgagggttcgtatcatactatttttaaactaggaacatattatatatatataaacttatgataagttttacaataatattaataataatattatattaataaaaaaattattattaatatttatcttaccatttcttagcccctaaaaatgtctattcgtagggcgttaattcaaatctcacatactcctaattaccccaatacctacattattatcttatcacaagattcccatcaattttatcgattaaacatgttatgacatttttagcctccgatcgagtctccaaggttacctaacctaaaaatatttttattcgacatatatcttatattacattcacatatgctatataaatctctgtaattcataaattacgcttatttatccacttatagcaaatttaaaatttatgttgaactagattagtaggatcataatcgcacttattaccttattaacacaaaatataatataaacttaaattatttactattaggcttattgggatattacagtgttccggtcccacttgtgtttctttcgtaatattcgccgcacgagctaagatgttgatacatccatcccataacaaatctctagcttcaaacgccgagattaatagaattcgagacccttcaaccttgcccccgaacaggaatgggtcctcagcttttgattcaaaagttaccatctttctctcattatcaatggttgtgttataccttgcaaaccagtccaacccttgtacaacatcaaaatcctctatgtttagttcaactaaaataactaacaattcccttccctccacaaacaccgaaagggacctagcccacctgctggaaaataaccagttctcaagtaggcagtaaggtactagaacaccttggtaacacatcactaattttatggaaattttcaatcacccttctcaaaatgtaggaatgtgttgcaccggaatcagttaaaatagtcaacaaagtaccatcaatggaaatctaacttttcacggtagaaagaccaacgttagcctctagctatggcaaagcaaacacctgagcaagaactgaagtctcatcatccttctattccgattgttgcaactgtgggcaatttcttattagatggcctactacccccacactggaagtaggctctagtttagcattcaccctgatggcatctcttgcacctcggtcctctggattgtttttcaaatttttgttcccaccacgtcaaaaacttttgttgccataaattcttgtactaggacccgtaactggtgtgtcattagccctttttcttgggatcattaatgttaacacccttattagagctgtaagcccaagttcttgtctaacctatctttttcatatttagattgattttatcttgatttaagcttgaatataaaaaga

SEQ ID NO: 70511 - DNA, 753 bp, Cannabis sativa
cccccccccccccaaaaaaaaaaatggtttacattagtcttgtttcttcagtgaaaagaattcaaaattcaccacttgtatagcttgtgtttttttgttttatctttttttttttttattttaaatttaatattgtagtataccatacatgatacaagagccgcctatgtacaaagtttgtgtttgttatgaagcccttggttttttgtgccagtcagaactgacagtgatgttttgtttttattatttagttctctattaaatcagcggaattgttgaggtaaaacattattatatgagaatttataaataccatatgatgtaataagtaattatataagatatatatatatatatggtgattagtaatgaaagcgaatatcctctacagcttcgtctataatggatatatatatttatatttgtggatctgtcattagttaggaaagttggtaaatcaaaacattcaatatttcaattgagacagcataacctatttattgattaatcttctcatacttttcttctccaatcataatattcattattctactttttctttccctacaactttggaataattgtcatcaatttcataaaatatttaatacagagagcattcagttaaaatccttttagtgatgatgcagttttagactatatatccttatgtccatattccatgatcttgtgtaggatttttttcccactcatttacatcattatttaatattatattacaggcctaatata

SEQ ID NO: 70512 - DNA, 788 bp, Cannabis sativa
  modified_base (37)..(38): a, c, t, g, unknown or other
  modified_base (677)..(681): a, c, t, g, unknown or other
  modified_base (760)..(761): a, c, t, g, unknown or other
tcataaaccaagaattttagttatataggcacacttnntatagaatagatatatatacaaacatatatatatatatatgaattttctactataggttgtattaaaaagaccccggtggagatgttggggagccaagaaaaatgtgatatatcagtacttaataagtatgaattttatagagtggagaaatatatacttgattattttctattttgcatttaagaatttttttggatttttttaaaaattgttcgtactttttattgtttaagaaaagactatttattttttagttttcattacaattcctcttcttcattgccattcatcataaagagcaatattaattgttgacagagaagttcatacttctcattactatttatcttcttcttctatttatttttccttttctactttaaattcataatagcaaaatttgggtaacagctctatgactctattatacaaaaaaaataattataaacccataattcattctcttgtttagaaatcatattcaacacacctacactataaaaaattttactcttaatcacaataaaatttgtgactaaagataaaaaagttatgactaattataaattatcattatagttgtgactaaaaggttcgtggctaaaagtactattggtcacaaaaattacaatttgttnnnnntaaatatatttttagtcacaatacatttcttgtgattaaaactaattaaattagttacaacttgtaactaaatactatnntttagtcacaagtaatttttttgttgt

SEQ ID NO: 70513 - DNA, 1722 bp, Cannabis sativa
aaaataacatctaaataacaataaaaaataacataaaaataacaaaaaatcaaaaacaaatgaacacgagtacaacataaaaaaattatattttctataaataaaataaaaaaaatcctaaaaatatttaaaattacataaaaccatatttttgtaattttttttttttgttgttttgtgatttcgtgaaatactccttaaaataaatgggtcccagtaaaattacccctccaatatggaggttggatattattactccactcatttcattatttaccaaatcctttgaaactcttgtcctgtaaaatataaaaggaagatggaggtgccaaataaagaattaaaaagggaaataaattgaaatactcaaaaatatattgcaatttctgtaaaaccagaaaattacaattatagctgaaaaaaaatactctctctgttttttcattatcgccggcgtcggagacttgttcgatgctatttgtttccgactagattctccggtgcaccaagaatgagacttggtatatgaaaaaactgatgttactgagatgttcgggagtttgggagacctttggttcctgctatatcggaattagggttctagtggaatctccattaacctcagtggtcttagggttggaaattaggtgtggcaatagggttttttaaattccaatttccatcagcaatacgtccagcttgttttcgtatgcaaggtgaggttttgatgagtatttaccaattttttttaacaaaaattaaacaattatatcattgtcagttgtgtttgatggagtctgatttttaacacccaaaaccgaccccctctctctatattcatctctaccatttgttgatttgtttgagaatttgtgttgatttcaagcttggtatttggaggtgttgaggcttatctttacttgaagcttgaggtagtttcctactgttttaattttaaattttgttgctgaagttgaagttgaaaaacatgtttttgggctttgaatgttcttgaatgcatgtaaggtgaaatggagttaattgatggttattttgttgcttgaacttgttcaattgtggattatgcatctatgctagttagtgagtttttagggttgttttcagagtttgaaatctgattgttaattctgtttttgttgtttggaagttggtataatatggtgttgatgctcaagttcttgattaggtgattgtgtggaattttgctcaagtattgagcttatcttaattagtgttaatctaagtttgggatgtatatttacatgaaaatgaagcttgaaattgtgtgttttaatgccctaccatgatatcttataatttgtggaatatgattttgagttatatgtaagtttggaatgatttaggtgtgttttgagcatgatttcgaaactattttttttttttttggtttcttgggtttggaacccatgagccgcgaccccactctacgggcgccgcagcttgcccctattggtggcttgggttttcaacccaggtgtcgtggccctgtgtggggaatgctgcggcccgcttctttgttgctgggcaaattcgaacgcaaaatttgaatgctcgtatctttgtgattcagactctgttttaggagttccgcatatcgttggaaagttcgttccgagctctatgtgattatctggaattttaaatgctaattttataattatgtggaaatgaatttaggga

SEQ ID NO: 70514 - DNA, 1425 bp, Cannabis sativa
gtgtgtgtgtgtgtgtgtgtgtacgtgtgcgcgtgcgcgtgcgcgtgtgtgaaaagaaatgggggtggctgggggaattaggttaagttgggatatatatatatataagtaaggttttttaaagatggttcgaagcccataaatgatttttttaaagcctttttgtgtcggttgtgcaccgacgctaatagtgtatataatagctttttatgttggttgtacaccgatgctaatagtgtatacatatttttttatatgtcatcttttgctttaatgtctattttagcgtcggtcaacaagtttgaccaaatgtgttgactaacgtaaaaacccctttttgtagtagtgtctatcaggtttgttccaatcttgacaaccttggtcgggtttgttgtgtcaagggaaagttctttgagttcttcggtcagaccaaatcccgagtcaatttacccaaaataagggtcaatgtaatccccgtcttgggcataccttcaagtgactttaggtgttgtctccatcttatccatagtttggactctggaggtatttggaatctttttggctttcatgggagaggccttgctcgtccccctggagtcataacaactcttaatatacatatgcatacaattcatttaacacatattcaactataaacttttagggtaataatcctaactttcataagtttgattatttattcacgtaatacattatcgcatgtttatgataatacatatttagggtaataaacttaatttactatatttatgcttagggtaataaccctaactcacgatagatatacttagggtaataactctaattcacaatatatataacttagggtaataaccctaattcatgctttcatctaactgatcacatataattgtgccatctccctatactctatgtgcataattcactgtcttacttgatttctaacgtataaggataaatcctaatccataggtgatcctgaccaaatgccggtattcttattcacaactctcaagtttcacacaatagggttaatcccaattcacatttcataaatattcatatttaagactctaatactgaaccaaataatagagctcaaaacaagatttccaacaatataaggaacgtcctattgtagttcattccaccagaagggagttcccgtctgaatactagcttacaataaagctaactgttgtccatcatctactttctttatcttgaaagcttcctccttgaacctcttgatgaagttcttcaaggtttccaaaggtagctacttaatgttggttaaggctctaacttcaaggtgtatctttttggctgcaacgagttgtcttctaaaattggtctgcaatttattccaacaatccatagattcgggctctaactttttgaaccattctcttgcatatcctc

SEQ ID NO: 70515 - DNA, 2267 bp, Cannabis sativa
ttttttttcatatttttaagctttgttattattttttttttatttctaatgaattaatacatttcaattaaaataatagagcaaaacgggtgataggtgccatccgcaccacccttcactagtaaatatatataaagcacaataataaggaacacatgtaacatcctctttttctaataatttttatatattttaaatatatttttttttaattttttaattttattttttctttttcaataatttttatacttgtaatagtagttgagtttattttaaaaaaatttacatagattaaaaatcatattaagtttataattatatgatttatataatatatatagatttctattaataaaagtaatattgctcaatcagtattaattttttaagtcaaagtaatacatatttttgcatttctgaacgtttgaataataaaaataatcatttaattatttttttcatataaaaattttttcttagaattttttattttggtaaagtttttattaaaatttttatttaaatgtatataaattattatttatataaaataattaaaattattataatttattaatgtagaatttctattagaataataacactctttaaaaatatattgtttatatacttttagtgatataaaacttaggataatgcttaggtagattcataaaaaatatctgtacatacagatatttttttttttcattatgtgtcactcccatattcaatagcaatatttagttaattccttttatattatttattttaataattttgtcatataatataaaaataaattacaatgcctaattacattaataaatatactttaccacttgcactgagataatttatcttctcgctgaaacttgtgtctaacaagcagaatttattatataattgtgttccttccaaactctaatctttaatcatacagagaacactttttaaccattaatggaattaccaaacaaacaaagtctatcaccaagtctttttattaatttttttttatgaaaatttttacaccgaaatctctcaaaaaagatatttataatacttcttcttatttaagttaactttttttttgacaattattagtaaattgttttttttttttttaaatcctagagtttggaagtagaggaggtgtattataaatgtgaaaatcctatatatgtaattactaatttggtcgttccttgatacatgtaattactaagttttctttttttttttttctaattttttttttgaaaaaaatgacaagtaactttccttatatttatatcacaaaattattaaaataaataatataaaaggaattaattaaatattactattaattatgagaatgacacacaatgaaaaaataaaatgtcaatatgtacagacgttttttgtgactctacctaagcattttcctaaaacttattagtattatatattttatatgaggttgattagtattatatatttactatgtgtgagtgataaacttagtcttaaaataaatgcaatacttatttttatatttttcaaactaaaaaaatatttattttaagtattttaataaataaaataatattttttagatttttttattttaaattaataatttaaatttaatatgattatattattacgtatataaaataataataaaaattataattattcataataatttattaatataacactatgttatctcaatttttgccaatctgacgtggcatacttacatggataaaatcaatgccacgtggcagttaggtcaccaataggaaggccaaatcagcacccgaacaaatatagaccccggtactcaaacaggcatcaagcgacagattagctccctctcaagagttggttagccagccttgggactacaccatggctgactagcctggcctccacaggggcctagccagccaagaggtgctctgcagggttccctgtgcacttctacacatggacaacaactcatgggctacgaattgggccctaaaagcccaataaaatgactgaataagatctagattcaaaggtattttagtcttttgtaattatctaacaaacaatgcaaatatctaggaatttaaactataatctagggttttaggcatcttatataaaggccttaactttagcctagaaacctaagttgaatgtaagcctaaagtctaagtctgacaaattctatcatcctcacttcctctctcacacgcctacactagtgtaacaccctaactaac

SEQ ID NO: 70516 - DNA, 3614 bp, Cannabis sativa
atgattcgatttatcatttaacaaaacaaatagtctaattagtaatttttgcacaagagctctaaattagtatttgtgattgaacatttgagatttaatgtttagggtcttaagcaaaacttactatgttcctactactcgtcttgtacttgctacagtttgtttgcctccaaaaatcctagccaaaccaaagtcagaaattttggggttcatctcctcatctaatagaacattgcttgttttcaagtctctatggataattcttaatcttgaatcttggtggaggtaaacaagccctctagctattcccagtatgatatcaaagcgtaactcccagttcaagaacatgcttagtgtcccacctagcaacatttatatttcaagtgtgcattttaataatatatagagtagagaatttgattgaataattcacattgacaaacttaccaaatatgaacgagtccaagctcttgttaggcatatattcatagagtaacaatttttcttctccttcaacacaatagcccaaaagtctgacaaggttccgatgctgaagtttggcaatcaaagtaacttcattcttaaattcctcaaagccttgtctagaacctctagagagtctctttatagcaatttcttgacctcctggaaattttccctgtcagagttcatagcaaagataaataaattaatccaattcaaatttatggagatagttggaaaattagacttaagtgatagtactaggatgattgataatattgagcattaattaccttataaacagggccaaaacctccttctccaagtttgtttgcatctgaaaaattatctgtagccactactataatttctaaagcaacaaagggtacatctatactttctctttcatcttctctaaactgccctgactttataaagtttgcaatttgtttctcagtatcatacaagtggactgcctgttttccccaagttatcattttgtcacctatatatatttttaaccaatactttaagttagttacactagcatgacttggtaccaaattcattctagtaatcagtattaccttttcttttgctctgttttcttctctgataatatgcataacaagcaatacttgagattagaacaatagccgctataattccaagaataacatagagtatcttagacttcaaaaccatcctaccttctgtaataaatatattaacagtacaaaaaagattagcattaatagcacaacatttttgtggttatataaatgctaaaaaagatccagcaaagttggacatgcttactgttattacgatcctcaaactcagaagctgaaagtcgaatatagagagatttactattgctgtcattagcagtgagttgcttcacatttaagagatcttctgtccaaaataaacaaccactgttgttgtgggcataagcgatgcatgagcacatacttaaacatgtggaagcacagtcttggatggtccctgttcttaaagattcattatcttttggcaagttaacataaggtatttcaagaaatctatctcccccaacattatccaaactgtcattaccacactgcaattccctttctctgatacatccattggaatattcctttaaatcccattcactctgaaactttggtgcgaaccctgttaagcagcggcagaagggtaagtaattgtgatcgcagaggctatttgctccacaaaaggcataaacttcacagtgttgtcccggatgggacccactgagttcccatttcttagaagcgaaaagccagttgaatagctttagttgcccagaaacatctaggaatacttgagatatcatcgttgtatttcttacagaatatgtaaagtagctttcatatccatttgattcgtacattaaattgtaggagatttcaagtgtggaacggactgagcgaaaattatgtccgctccatggtccactactccaatatgttatggacctattccatattaggatatacgagttgtcagtttcgtttagatgaaaactgtaaaggccgggtaaagggtctttggaattcttccatgaagtcagaaccctgtgagttttggttactttgttgtatccaatttgattacctggtagaaaggtatgggaagggtaatcaaaacttttccataaagtttttgtgggattggaacaattaattaagatgaggttcccatcatctttaattactgcctgtacacaggagctgctggagttcacatttgtggaccaaattggaacttcatcttcattgaaaagaactaaattgccatctgagattcttaggtgtgagtagaaggaaactggtttttctctgtttgctatccaaactacactccgagaaggatccacttggtaccatatgcctacatagtagttttcattgttacctgggctaaagaatccaagcacaaacaccccacctgcagagacaatggttgaaaacccattcagggtttggtttgaagagattgtatcacctcctgttcttactgaaaaattggttttgacaaacagacataagaactgaatcactaagataaagattcggttggacttggaaatcaacatggtataactatcaaatgaagacccagaagacgtgatctgtagaagaagtagaagagaagttatatatgtgatctgattcaatcaattgttgcactacttaccccaaatgaactgtttattgtttctctgcactgcacttggaaaagtcttccttataaaagattatcatcttgaattctaagggtgaaataagttaaaacttaccttttaattatttcatcactctcgaacttttatcacaagctgatgtgggtgtttgttttgattgccacataatccagtcatccaattattcaaatgtgaacatcaactcttctctatatatttttgaggaagtcataaatatcgtcaatataaaataaaagttataagtcaatactaaccttaccgagtacagagcacttgtggaggccctcaaagaagtgttaattttcttctcaactgttttcctatcccacattagtagaaaaataatacagctgctcacaacgtaactcaaacttatattaagttagttaacacttggtattagtctgacagtgaccttttccttaacctaacaggtcactctcctctcaaaaaattgtttaatttgtgaagagaagtgctactgtcaatttcctgttacaatttcttagtcaatctttacgttcaaaaatacatgtcggtatattctttttcaatttgtttttcacaggagtattcgttatgcttacaacatcattcctgtaaatttttgaaaattttcgaacaatttacattgccgaaaatacatttaaagttttttaaatgcgcgtgataaactggaatatcaagaactctgttttcggtactgtaaactattcgaaaattttcaaaaatttatagggatgatattgtaactataatgaataccgctataaaaaaaaattaaaaaaaatatttcgacatgtgatttcggacgtagaggttgactaagagattgtaataagatgttgtaattaggattcctcatttttgaatatgtggg

SEQ ID NO: 70517 - DNA, 1568 bp, Cannabis sativa
aatgtctaggccttcttatcctcccattggtggcggtggttctgtttttgttcttctctgcttcgtcgcttttctttttcagacaagctcagctcaaacacaaaacgacaccgtagatcctaaccttctaaccttcgaaaacccaagtcttagacaagcttacatagctctccaagcatggaagtcagccatattctccgacccatttaacttcacaaccaactggaatggctccaatgtgtgttcatacatgggtgtctactgtgcgccgtcgcaggccaactcatcgacacgtgtcgtcgccggtatcgatctcaaccacgctgatatcgccggctacctcccctcggaactgggtctcctcactgacttagctcttttccacattaactctaacaggttttgtggtgtcgttcctctgagttttcgtcgtttgaagcttctacacgagctcgatatcagtaacaaccgcttcgtcggaaagttccctaaggtggttctctcattaccttcgcttaagtatttggatcttcgtttcaacgagtttgaaggctctgttccttcaaaactcttcgataaagatctcgatgctatattcttgaacgacaacaggttcagattcggtatcccaaagaatctcgggaactcaccggtttccgtactggtttttgcgaacaacgatctcggcgggtgtattcctggaagtattggaaaaatggcaaagacattaaacgagatcattctcttgaacgataatctcaccggttgtttgccaccacagatcgggcttttgaagaatcttaacgtgttcgacgttagctttaacaagcttcagggctcattgccgccaacaatcggaaacatgagaagcttggaagaactcgacgtggctcataacaagttcaccggggtcattcctgacacgatttgcaagctaccaagattacagaacttcacttattcatttaactacttcaccggcgaagctccttcttgtgccggtggtaaaagtgtggtctttgacggtagtgagaactgtattgccggtaagtctgatcaacggtctgctaggcaatgcgcttctgattctgctcgtccagttgattgtagaaagctcagttgtgatgccactggcggtggttctcctagacccgttccgaagaaaaagcctcagccagttcctaaacctccggcaccaaaaagggcttcttcacctagaccaattgtggctccgtcgcctccacctcctacttcggcatcttctccttctattagatggaggtctccgccgccatcatctaaatcttccccagttagcaaaacatctcctcctccaccaacttcaagatcatctccaactacacactatgctcctccaccacctaagacaaccactaaatctcctccttccaatcattaccactattcttccccacctccaccaccaacttcaaaatcatccccaaccacacaccttcctcctccaccacctcccaccaccaccggatcccctccatcaaatcattaccattactcttccccaccaccaccaacaccaacaccaacac

SEQ ID NO: 70518 - DNA, 1524 bp, Cannabis sativa
tcaattttactgtttcagtgatatgtatcaaaccatgcccctcaaactttgatatgtactaaatgatgtcccttacactttcatccttgttagaatttttttactaaaattagataaaagtccttaaatttaacaatctcaatagttcgggggaaatttttaacggcaaaaaaagtttaggagcacgatttagtacatgtcaaaatttagggagaaaattactaattagccttatatgtatatatatgtatattacttgagaagttattaaatattgatttgatgcttaaattatgtaaaataaaattgtgattgaaaatagaaatgggaaatttgattttttatttattttgtaaacccaaattaaaaccttaaacctaagtatacaaaattggccatataggtatactttattttaaaccccaaaatactcctctcattttcaaactaccgtcactctctttccctcctttctctcttagataccctaaacccacgatcatcaccgccccagtatcggtccaccgccccctacccacgacgatccaccacccctcgaccacctaataatcgaaccaacgactaccgaggaccgcccatgaccaccacacaaaccgaccgaacccaccaccacatattctctctcttcctcccatctctctctttctctcaaaagcattttctctctcgaacccatctgagcacgaagactactcgaccgaacccaccaccacgcaatgttggccaaggtaagattttgtccctatggtattttttaatatttttattattgatttagggttaaaatattgtttattagttttaaggtgtgtgatttgtgagttttttattagatttagggttagatttgtttctgtgatgtaaaagatggatctaggaaaaagacaaaggtccgatatagggcccgatgttgttgaattatatttttttttttagggtccgatggtgattatccttcttaatttttggtcagggtccaataggctcgacatggggcccgatagtgggcccgatgtccatattgaatatttatttttttgctagggcccgataagtctgatacatggatcgattatagttcgatgcttatgcacaatttttcagacatccattttttttgtattttttgcagtcttccaaagttccacgtcttttacttccagtgtcagaatattacactagtcgtgtgacttggggaggtggtagttggtattactccaatgtgaaagccaagtttatgaaaatgcagttgttggaaagggtgaatgaggaatcccctttcaagaatttcttttgagagagagccattagcgttttcgggtgcacttatccatcaattgttcatgcataagatcaaatcagataaggatgacgaagtgtatttctacattgcaaggaagatatgccgatttacccgagatgagtttgccctagtgattgggcttaacatgttacgtggacatactgaggctgaggttaaagagaatgccatggctaccagga

SEQ ID NO: 70519 - DNA, 2499 bp, Cannabis sativa
tttcagttttcagataattttaattttatttatatttgcgaatttcataataattatttaaccggctgaaaattgattttttattttattttatatgcgaaataatttaaatcttactttatgtattataaattattttaatttttttaaaaatttttacaaagtatattaactgattataatatacactattaggtgaaaaaaatatgaaattataattattttatattaaaaatacaaaaaggtacatcaatactcttattttttaagaggtgcatcagcatccaaaaatatatatatatatataatatattaactaaataattcacaaatttcatatataaagaaaaaaaatataattataattcatgttgataaaaaaaacaaaatatttacaatttgataaaattctcaaataaattcacacaaactaatattaaattttatattctcatattatttttttcgaacaaattaacaacggaataagtccacacaaacttgttatatattaaattattttgtggtttgatttaagtgcaagattaatatagtacatgaaaaatttaatttattttaaaatattcctattcttgatttttattactatattaattaaaattttaaatttgatttttataggattacttttaagaagcaagttaaataattttatttcaagcatttatttgtaaaaaataaagaaataaaatatataaattagcaaataataaaaaaaggcaaataaaaggttgctacttgaaattttaagcatgtttaacctcatacatgtggaggggtgttcaaaacttgaaaatcacatattgttatcaatacgatttcatacatgtcttatatatttaatttaaactaaaaatagtaccaatattgatttacatcaataatgacaccgaattcgatattgaatatgttaaggtgcttttcgacattttctagcttattatttggtagcaaaataattaagtgctaaaaataaatacataattatactaattatactgataacaatatatagtgtataaataaaagagataatattgttattactagtgatgcactacaaggtattattgggaatgattaataattttttataataattattaaattaaaatagataagatttgatatttaattacactaattagtggaaagtatttggacactactttagagaattgttaaaaagcactattagtgtctagtatcatatcgatattagtataattaagtatcaaatctcatctaacttaaaaaaataatttttaaaaaatatcactataaaaattacagattaccactaatatcctataacaatactcgaaactttaagtagacaacaacaaaaaaaaaattatatataaatggtataatgcgcgtgcgcgtgaacaccaattgtacgaattttaaggggcccaatactcattactcattagtagacaacaaattcagtgtggtttgagctttttaatcacaaatttgaaaaatgccacatactcttaatcaattagaacatagatttaaggttgtgtaccctattatttcaaagtactatacatctttttacatttaataattttaatctaccttccaatcaactgaggtcatactaagtggctttctttcactaattttggtcattactttttctacaacttgttcaaacaataataacaacactatcacttttttttttttgagttttatttaaatctcttcatttcagttgtcaacattgaaaatgttgtcatcaaatatattttttaattcaccgataaagacattacaagtaacatatcacatgcttagtattaaaattaattgtgttatattcttaatatacttaatattcttaaattaaaactagttccattaataagacttttaatgaagtctcccgccgcattgcttcaataattagtatattaagactttcaataattagtatatttaaatatcttccatttaactaaaatattttttttttggatagattctataccaatatctttagtagtctcatttaaccaataattattttttaactaaataatttattaaaaggagaaattctatatgtaccattttcattagtatatcggtaaattaaataattttgattaaattatacttttgttctatcggactccaaaaaaaaataaaaataaaaataaattaatactcgattatttaatgtttttcaataaattatattttttgtctcatccttattatggataaaaattgaataagtaataagcgagtaatgcatttcccgacccctgttcctatttcctatttatgcctccatcccacctccaccacgcttaatctttgatgggttcggggtaggagaatccctattgggtataagaatctattggatactcatgacaattaatacaataataataaaaaaaaataatttaatataattcaaaataaaaaaaaaattaaaaaataagatattgactttaa

SEQ ID NO: 70520 - DNA, 1579 bp, Cannabis sativa
tatcagagcgaccaaggtttaaagatcctaaagactggcttgatatgtacattggctgcgaagactcgtttgactcatggcttagtaagtattaattgttaattgattaataaactatttgttgattgtttgaactgcctgcttattttaaatgtgtaaattattagagaaatatgataagttttgatataaagttgtgaagtttgtttaagcatgcgcggtaatgcttattgcattaatcttggttggaaaagattttaaccatgaaaaaaaatggtcgtgagtgtactagaaggtgtactgggggcaatctagtaagaataactgcgagcttatcaggcttggagttggtagtgtgggtagaaatattccactaccacaagattatgaacaaatgaatgccataaagtaagagattagctgagtggcaaggtattagaacttacagagtttatcccgagcagcgcgatgatggcgaatgacactaagctggaccgaatggaaaagttttgttttaaagaagtggatgctaaggacgcttctttaaagagagattcatgaaagtaaatgatcaatgttggataaggtaaagggtgtttaccccaatgaactcaagggaaaggattaccaacccaccagttatgggtttagtaggaaaatttaaggtaatgatggggattggattgacttgtaaagtatagtgtaaacattgattgtgaaagaaaggtgtcaattgttgaataaaaaggtgggtatcaatttgtgttcttgggcaaggttcaagggtcccaaaatccattaatcacgacatttaaggtagaaagattagtatgtgatggatgtaccgacctttcagttggtgtggcaaatattacaaagggaacatcggtgggactaagacacaattttatggtccaagggtttgtagatggctttttcagaagagccaccagggttattgataaagcgggaaattgactctgaattgacttgttactggggtaaaacctgtatctaaagttttgaattagatgataactgtaaaattgaaaagggttaaggtttcgttgtagaaaatgttaggcttgaaattgctagtttgagtattttgtgttggagtatgctagttttacttgtgaagaagaaggatgaaactttatgagtgtgtaatgaccgctgggagattaaatcaattaacggtgaagaataagtatcctttgtcaaggatggatgttatgttgaacaattttagggaaggttcatcttctctaggatcagtcttcgatctggtaattaccagttgaagactcgaaaggaggatattcccaaaacagtttttgtatcgatgacttcgtaattgtcttcattatcgctattgtgatatcttccgattcactagagacatatgagacacatcttttgatggtgctgtaacatctctagaagcataagttttgtcctaaatataagaaacgcgagttttgttgaccccaaaattgttgtgaaggttagaggttttctggaactaataggatgctatggaatgtttattgagggttgtctacgccattactggaat

SEQ ID NO: 70521 - DNA, 1364 bp, Cannabis sativa
ttcattttccaaaaatatatgcctaaattcatatttatataataatgattaaaaatatacttctcaaaattaaagtaaaaataattttattataattttttattaaagcgtttaaatattatattgcacaattaaaaaatcacacaccttcccatacggccatacccctatggccactttagaattctattatgttaaaaacaattaatatttattacattttcttaatattaattttattaccataaaaaagtgcaacatcttaacatataaaagagattacttaaggattttaggtgttggacagtagtgacattttgatgttatgtatttaaatgatttgttagaaatttattggtaatgtttcacattacctaagttaagtaatatgttcacatgttttagagacacataatcttaactatattattatcacaaaagctcaacacataatgatgagaaattgaacttagaaggacccaacatgttcaaatcataatcataagacaaacaaaaactaggagacaaggaccacatacaagctcaccaagaaacatctctatgaaaaattaaaacatacaaattatgttattagatttcaaacactaaataggaagtttcatcaaattattaatttgaaaaatacatttgggtttgtgtcaagtttattacaaatactaacttattgagttgggtctaagaataacaactttgcccaaaaactcgattaacaaagtggacatatttaactttttttttaagaaaaaaattatataaaggtgtaaagagatattattatctcaaggattagaataactcatattaagttaagcaacaaaaaaaaaagttttaactcatattttttttagtctcccaccaaaaaaggtaaaagccaattattctaacaatataattttagtatttgtttcaacatctaaaaacatttttagtctatttttttaatccataattatgtgttgtatttattttagactacatataagataaagtaaattatgaaaagtttatagttttgagaataatgtttaaacaattacttaccacatgtataagaaaaaaatagttaagtgtgcaacaaaataattaagctaatttttcgttattgttacttattaaaaaattgctaaaaatttacaggtggtttcaaatattacaacgtatgcgatcatgaaaaaaaaattaggcaaataaagttttctaggatggcgaaataaataggaagtgtgagagttgttttagaggtgcactataaaatgagggattattttcacaaatacacaaaaacaacaaaaaaattacaaaaatatggttgtaatttaaatatttttacaatttttatgatt

SEQ ID NO: 70522 - DNA, 2109 bp, Cannabis sativa
  modified_base (56)..(61): a, c, t, g, unknown or other
tgccactaaaaaaaatcattgggtttatgcatgccgcttacaaactcaaaactttnnnnnnttatgccgctatttacccaaaaaattattatgctgtccaatttctcataaatatttttttatgtttctctttgattctctagacttagagatgtttatatacttcgcaatctgttgttccgaaccttaaccaatataaaaaaaccatttaagatcggaccaaatgaatctagtgtcaatggtttggtcaatttgggctgtttataattctttagttcggtcacggtttttaaattcccatctgtagtttaaactaaaccaaacatcctaattcttaatatatactgaacattgatatttagctacagttataggcctgatattgataattatcttaacattgtgttaagaatatctttttttattgttatttacgtattataagctttaaagtaaaaataactgagtaaaattattaaaacaattacaaattacaaaccgcggttttaaaccaaaccaatcagttcttaagtagattggtttggtttggtttggtttgagcatttaattaatctgattcagttttaaatttttttaaagaaaaaaccaacattattggtttggttcgaaaaaataaaaatctagaccaaatcaaaccataaacactcctacttaaactttaaaaaataagttaatatgggtacataattaaaaagaaaaataaaaatcttaaataaaaaaaatatattgccaaagcaactttaagcactcaactcttcatttccttccttcctttttcctattagggggcgtttggaataaagtgttcaaaataatttgattatagagaatattataaaatagaatatgattgtagagaaatgtgtaaactgtgtttggttgtgtatggtaatgtataatcatattcccattaattgaattacactgtttggttgagtacaagaatctcatatattattttaaaatttttaaataaaaatattttttttattatatttgtttaatattaattatacataaaaataaaataattatgcattaaagaaatatatttatttttttgaaagcaaagaaatatatttattgattaataaatattaaattttattgattttttattaattaaaatgaacttttctatatactttatcactatgttatttattttgttctctatgtcatttatgtataccttccacataaaatttatgtatatgcatatatattgttattgctaataatagaaataactcagttaaaaataaaaaatcgatctcaccgactaaatttatatcgcaatattttttttataataatcaaaatattgatggcatttaaatttatttattaattaaaaaataatattcaaattaatataatagaagggaataatttaatctcacattttttaagttgtcaatatacccggggtagttatattactaagaaaataacattataagattaaaccctcaaaacaaacaagataatgtttcacattaccatctaattccaaacagccccttacaatttaaacatccccatcataatttatatatattttttcttaaattcccctcaaacatttatagcccgaaacaccaagatttgtataataaacgctctgaggcagttgtaatatggtctgtatgaccctagtttttcttagtctataggacgtcttctcgaaggatgcttccactattggttcttggattcttgacatagttgaattgtgccacggcgatttgacataattccaatcttcgtcagaataatattctggcttgaactccaaagcaatataagatctttctcaaaataatggatctcatacttcacattgccacatatcaaaattattggtaccgtcaaatttctccacttcaaattttacatttaataacatggttctcctcatagaacctcttgaatcaccagaactttttatgtcaacttgtgcatcttttttagtttctctatcgcgctgtacacaaaaatttgtaaaccgcccaaaccgaataatccgtccaaaccgaaccgaaaaaaccgataaaaattacaaaccgaaataactcgaaaaaatta

SEQ ID NO: 70523 - DNA, 1276 bp, Cannabis sativa
catatgaatttcgtttatagaaaggtgaacgaaaaaatatgattttttttttctgtgttctttgtgccaattgctgattttgtagtttactatgttatgatataattgattggatctttttatactcatttgaactttctacatctaatctaaccgacctcaaaaacatccttatacacatatagatatatatataatattgtttttgtttgccacttagaaattacttggccaatatagtacttgtatgttccccagtcaaaaatgggcattatttaaaaagctatttttatcagttacttttataaacaaaacaaaagtgtggaaaacgatccaaagtgggcattatatgattgaaaaactagttattatatgtcacttgctttggatttggagggtaaagcaagtcgtgtcactttatatgtttctttcttctgtcacttttatttgtccaaattaaactgagtattattctaatagtagtacacaatcccctgttacccatttttaaattatgcataaatcaataaagaaagaattattttttattttgtagtctacttccaatttttctttttcatttggggactaattttgtgaagaaaccaacaaaaggaaaaatatcaatatggtcatcataataaagttgttttttctttttcctctctctttcatgggaattccatcaaaggtctccgaaaaattcctcatatatattttgtcacttcaaaattgcaaatatattttttattttgttttgatcatttttgacccaaatagtccaacgagtgttgttttattcaaataataaataatttcttaataatggaacacataaccaatcctttcagcaaatatttctggtttggtaattaatttggcacttttaagctacagaaatatatatatttaaaattaaaacttattgttgaccaatctttttagtgtcttcttttttattgagttcaacattttttgggtagctagtcagttgatcactttttatcacttttaattttattaattattattttttaaaaaaaaaataggtcgatatcgaacccttataaataattgaccaaaaggagtgttattggtcgttttcaatgaaatagcaattacactgtcgttttcaaacaacaaacaaagagagaaaacaaatatgaataatttatatttaaatattataagaaatcccaagattaatattggaatttataaaagaattaacagtgcacctaatttccttaataatctaattcattattaaataatt

SEQ ID NO: 70524 - DNA, 805 bp, Cannabis sativa
agttcattacaaaagccttcatatgtgcacagattgtcaatatgaaactgtttggaactttcttcatgcaaagtcaaaacattttttaatcgacgggcaatttggattcagtagaatgttttctccagaccatgtaaaattgcatattggcctaaattacgtttcttctgtgtatgagattgagatgatgtattgaagaccttgggatgtccttgcctgtagatagttagagaatctgaggtccaattgaaaatggttagacaaactccaaactacaatactacatacagaacaataaaagtttagaatttttctttggtgagtgagggcatgtgttttgcccctatccataatttttcttcatgtgatggtacttagtatcatttttttatctgattattaggtactccaatctgctgtgtaggattaagaattggactttgtttatatttttcgtttgttgaatcttttttctgattttgttgtgtctactctttttgtcaacttgttagagcatttaataatgaaaattaatgcataacatagtgagttataattgtagatgacaatcatgtaagaaagacagtagtttcaattgtttgggttgggttatttattttattgttgttagtggttagtgaattcaaatctgattgagtatggtgtaattgtgtttgcacaacgataaacaatcaaagaatattgtaaaatgtatttctaattattaaagatgaaatcacatgggagtttcaatggtctaaataaaatgaatacaacttaaaaaaattaccaaacaactaaatag

SEQ ID NO: 70525 - DNA, 3337 bp, Cannabis sativa
ttcataatagtatttttgagaaatatattataaaaataatattaaaataaagatacttaataattcggtgtttcttgttatcaaataaaacacaactttatcaaatgaggtgtcaacttcttataggctgttagagacttcaactgaaggggtccttttgagaggcccctactatatctatatggaatcattaagctatcattttttttgtagatatgctctgtgtgtggtcgtggtcaaatatgattaaaggtactcattttgaacaagtgatattaaaaaagaaacgtggggatcaacaaaatgtcatttgatgataaaagcaattaatgggtaccattgagtctggactaaacataatcctgtcctcaaatgtcactataccttggttaactcattttatggtgtaggccttatcgtccaaaaaaaggccaaccgaattcaattccaacactataggtgtcggtttcgaagagtcggctactgatagcttattgtccaaaaccgacgctatggttggtaatattcttactaatttttttccatcgacgcctactctattcaattttgcatcggtagcataggcgacagttgtaagacgagctgacgacaatactttacccgatgttgaaaatcatggggttccatctcaaaaccaattggcaatgagcggagtagccgatgttctttatatatggcttaatacttttacatttaatccatgtgggacaatattctccaatacccgactatttaaaaaaaaaaattcattttttagtagtgcttgtatctatatatctagctgtttcttcacacgtgattagcaatcttttattaaattaaaatatattaaataattgaatttgcatgcatgccatccatttcgtttcctgtatataaatatagagctttcacttcacatatctatacacaatatcgtagcatatatataacacatatattataagaaaataaaaactagaataatacagaaatggaatcattcattgcttatattttatctctgtacttaataattttatgtgctaattttcatcctcagcaacaggttctggcgttaggtacctctggatccgattatggtatgtatacacactacaaaattttttacttttagtctcaataaaatttataactaaaaatgaaaaaagttgtgattaactataaattattattcttatgtaaatagtctgtggctataaaggtattagtcacaaaaattacaatttattgtgacaaaatatatttttagtcacaatatgtacttattgtgattaaaattaaattagtgtcaacttgtatctagatactatattttaattataagtaactttttgttgtgactaaaaattacatttagcataaaaacatttatgttataactagacaggaaatattttgataagaagaaaaaaagtatgtgacatatcaaataaagtaataataattagaaggctgtcattaacaattattcttcttttgaaaaaataatgttacagattttaggtacatgaaatctgtatatgatgccacagagatgtcattagaggaagaatattatgactacatcataattggtggtggcacagccgggtgtcccttggctgccaccctatccgaaaactactcagttcttgtcctcgaaagaggcagtgtccctacagctaacccgaacgtcttgcacctacacggattttttgccaatctcatgcaagaagaagaagaaaataaggttaccccggcccagaggttcacttctgaggacggggttgagaatgcgagaggtagggttttgggagggacgagcatgattaatgctggcttcttttcgcgaggcgatgagggtttcttttcgaagcctggagtaaaatgggagatggatagagtagagaaggcgtatgagtgggttgaagagagtatagtgtttcggcctaagttgcccctttggcaatcttcctttagagatgctttgttagaaattggtgtgggtcctgataatgaattcgatttgaatcacaaacttggtactaaaatttctggatcaacttttgatgaagttgggagaagacatggtgctgtggagcttcttaataaaggaaatttgaagaacttaaaagttgttgttcatgccactgtggaaaaaatcatcttctctacaaaagtatcaagtaataataatatagatatttaattaaattgctttgatttatttaataatgattttcatgtatcttgcttaattatgtagttttatttatttttacaattatttttgttttactaaattataaactaacacaagacttgttatgaaacacaggaaattatcattctggcgatgacaatgatcatgataacaaccctccaagtatgtgtaagaaattttttatattaattaatttatttaaattttgacaaaaactacaaagaaatgtaatatctcttctgagttctgaccagtggtgaataacatttttcaaattttttattgtatatcctcgaatataatttaattataaatttgtggtctagaaattgtggatctaaattctctatcccaatttgtattattttaatatacaaagtctcatgagtcatgatgaccttattttaccttttcgagaaaaacaaaaattattgagtgaccctactatacctatagaaggaaagaaagataggatagaaaatatatgaatagattgaatatggagaattttatttgtaatttgtaacaaaaacaaaattataaaggcattcaattttattattatttttttttttggtataaaatacatatttttaaagagaaatactttatatattattttttttaatttatagtttgagttgctgtgtaaaaatttccgcaaaattcaaaaaaaaaaaaaaaaaaagactttaaaaataaaaaatccctatttttaatttatacaattttctttccttttcatcacattctaaatatttatatatttatatatatataataaaatatactttaaatataagataaacaattaaaactagaaaaaatataaaatatttttagagttaaaaaaaaaaaagtcaagaaagtacattgaaaggagaaaaaaaaatattcagagtaaactttaagattagagtgctaattaaattataaaagtttttgaggtgtatctattttgtatgtgattcttgcataaatgtttgagataaatgattgtttttatacatatattttcacagaaccttatgccattggagtgatatatagtgattcaaaaggaaagtctcacacagtgttagttaaacacaaaggagaagttatattaag

SEQ ID NO: 70526 - DNA, 2790 bp, Cannabis sativa
ctctctttgttcggccaacccaaaaaccaggggaattttcaagcttcatcctttttctcgaaattcagtaggggtgtaagtgttcttgaagccaagagcatccatccagcttgagactttccgttcaggtccgccaactcacttgaatgtgaaaagaaggtaaagaaaaggcgaaatctgaagaggagtgagcactgagctgggatgaggttgtacatgtcatggcggcacgacctagaatgtttagtctcgggacatcttgagttgttaatttgtagtcgatgtgcgacttgacatctgtatttgagaatatgttgtaaaaagtgaaaaacaggatcccgactttgtatatatttatgtaaagattataaactttaatatttaatataaaagttttaatttgacacgatttttgagtaaattctttggttagcaaagatagcactgtaattaatcactgtagattggctcagtattagggcattacatcgtttgataaaaacactagaaacattgttaagatcagagattaaagtacgaaaataaaaaataactaaaccaaaaggagacaataaaggacgcaaactatacagagcatcaatgatgcttttacaattcgactcaacaacaacttgatctaggccccattctttcatccatctcaaagcttcctttaacccaattgccttcgccaaaagaggagagacacgactaggcaattatttggaccaatgataaaggatagctccatgatgattgcaagccatccctctaatcccaaaataaaagccccagaagtgacagagatatctgcattgactttaatatattcaatactgggaaccgaccaatgctccacccgaacacaaggactgaaatccattgtgcctgtagaattttcttgagcaatatttcattaattaatgtaagacaacgcagcagccaccaccctatttgtaacaaaatttttactttgccaaacaagcttatttcttactttccaaatagaccaacaaatcaatgcaacatgacaaaccaaagactttggaaattcgatgaccagttgataaagcattcctgaaaaatttgtggatgaaaggttacaaatagccccatcaacttgttgccaacaagctttcgctaaaggaaactcaaccaaaatgtggaggattgattcattcataccttggcgcatcggacaaatgaggactttattaacatgccgaccttttaactggttcaatgttggtaaacacctagaatataccctccagagtaagtctttaaccttaggaggaattttgagttgccataatgccctccaaaggcttatattattatcttctgaccacctaccgtacaatacctagagaagcttgtgagcactcttcaccgaataaagctgaagtctctttaaaccaatactaatcatctgacccaagattatcattcaacacaatactcttaattaactgtttgtcaaaagcattgaacaaatcctcaagaatttcatcatcccacacctgggcccttcccaccataatctaattaaactttgccccctccaaactaggatggagataagtaatcttggactacttcttgcacggaagccacgactgccccagaatgttcatagaagaactattaacaatgcaccacctagaactagctttcaataactattgagaagcaagaatacttctccaaacataattaggatttgaccccaacttcccagacaaaaacgatccactatgataataccacgcttgaaatgtacgaccaacaagcgaacaagaatgagttaaaagccaccacccttgctttccctaacatagccagattgaaattatgtaaacttcaaaaccccattctgctattatttttatgagctgccatcttctcccatgataaccaatgaatacttgggccattactacttgcctgtcacaaatacttacacatgatttactctattttagaacaaagcttaacaagaagcagaaaaattctcatagcataactagggagaaattgagcgacatatttcaaaaggaattcctttcccgacttagagagctactattcatcccaactttccactcgtttacacatgcattttatctttgaggaaacccaaagtaacatttttattcctacccatagtattaggaagacccaaatacaaactttgatcacttgcaacatgcatcctcaaaatttcctaaactcaaacacagtttacctctggggtattagtgctaaaaaaagatagacaatttagcaatattcacctgctaacccgaagcttgctcaaacttttttaggcctttctttcattggctcgacaatagagataactgtcatccgcaaacaacatatgagaaataacaggagctctcctagccaccttacactcatgaagccacttattcgtttcataattcttgataagtccagaaaaaccttcaacagacaatataaaaagatatgggaaaaaaaacaagaaaatacaaaaaaggaaaaaattactaaaatacagtggaccggccatttcaacatttatacaacccacaaacaaataattacaaaaataccacctcctctaaacctttagtcgcatgaaacagaacgatcaacaacaaaaagcttcgatcgttcaaacgggaaacacaactaaaatgaaaccaaatcaagaggaagaccaccattaattctgtcgtattcactagaaaagaagacacgaaacgattgaacctgaaattgacgaaaataagagcataaaaa

SEQ ID NO: 70527 - DNA, 1152 bp, Cannabis sativa
ctatttacgtcggtcaacgctactgttcatagcgttgaccgacgtgaatagtactcaaagaattggcccgtctctttaaaaatgacactaatagtatgttatttgcgacttttattaaatgatgctaaaacataaatcgacgggaatacagccaaaatttaaaaaattacttcccattttccgtctgttattaacactcgagtattgtattagcgaggttttaaaaacgtcgcaaaatacaataatgagagatagtaaccgacgcaacaaaaagtaaaatcctcaaaacctaattaggtactgtagcatgaattttctcaccctcaccctgagctcttcgaatttctctagtgaattcagaggcggctcctccgtcctcttcgaaaccaaacccttacccattgttaaattaacagacgccgtcgttttaccacgaggaagaagaagaagatatctcaatcaaagaagaagaagaagaagaggagagcgagagcgagagcgtctcagccaccacaactctgactagaggcttcgtggagagatggggtcgtttcgagaggttggcggagccaggtttcctcttctttaaccctttcgccggagaatgcctcgtcatcgatctatctacaaggatctactcctttgatgtccgcatcgaaaccaaaaccaaggtttgttttccttttaagataaagatttatgaattaacaaagggaataattgatcatctttatttttcaggataacatttttgttcaattacaatgctcaattcaataccgggtcgttaaaaaaatgctaatgatgcttattacgagttgcagttgcctaaagaacaaattcgggcttttgtgttcgatggtattttcttttgtaataaatgagaattattcttttttttaaaaaaaaaaaaaaagaaattggtacattaatgtccttggttttgacttttggttgtagtggttcgagctattgtccctaggatgacctttgatgagctacttgaacaaaagggtgaggttgcccaatctgtactggaagaacttaagaaagcatggtctgagattcggatccttggtattattgtaagaacttgcaatgctttaaatgtgtgattacttaactctatacctttcttgatttagatttatt

SEQ ID NO: 70528 - DNA, 2390 bp, Cannabis sativa
  modified_base (1629)..(1631): a, c, t, g, unknown or other
tataatatttagatacacataataataatctcaccttataactaataatattttttctttaatttttaattgtatcactttcaactaacatagaaaaaactagaataaaatttagtctacgtgccttgcacgtaggtttttgctagtatatatatatatatatatataaatgagaggtataagacggtgacataacactttaaaattactccaaataatgctatctattctctctttaattttattattaggtttataatatataaagaagatatataagacgatgacatgacgctttaaaattacttcaactaatgctatctattctctccttaattctctcacttttaattttttattaggtttataaatataaataacaaattttttatattctatacatatatatatttaaaaaaaattaaatatctaactgtaaattttctttaatttttaaaacacatataactctaaacctataaataaataaacatataaatgtatattgttttatatacctccatctctctctcacgctctttcttcttctttttactttttatttttttcttctattttttaataaaaattctccatctatctctaattctatttattattttttcttttttcttttatttgcttaaaatttaagtaactattaattttttatgtatgcatgacacctcgacatagcatcaatagatagcatcaagaccttgatttttaatatttctctataatttggagacacacaaactaatttttatgtcgacaattttaccgttgtcgatgacttcaaattattcatgatatacttattagcatgaattatttgatgtagaaaaagttgctttttttttttttttaataataggctcttaagattcatgaaaagtgatgaaaagactattgtaactttttctctcatgtgatattctccattcttcattatatttctatcgctctctatataattatttttagtacttttttctcaaaaagatacacttattcttagtttttattatgggagatttaaatatacatgacttgcaataacatacattcgttatgtatttattttaaattctaattgtacgtgtgaagcttgaatcatgcggtcaatactcaatgcagcctatctgatgctttctttggtgatcccaaactccttgaagaccattacaacactgaacatactcttagtaagaattttttttatcagattaagtaaactctttataaactttttttttttaattttgtaatttatttttttttattttgtgacttataatttttctttttctgttaaaaaagttaacttttattgtggtgcagtatgaatttagagtttcatctttttcctcaaacattgagattctttttattaattataaactatttcttctctatttctttttttttagataaatcagaaattatattgtgttattcctaaaattcggctatttaccagaagctgacacatgtactacaaaagaaatatgaatcagctcaataattataatattaaatacatcttaaataacttgttttgattaattatagttgatagagatatttaaactccctgccatataagcatatgcgagataagaatannnactattaacagatgtaattgacgagataatatgtccatctcgggatagacaaagtatataatagaagcatacaagatgagacatcaaggaaattctatctcattgacccacatacttaggagtaaaagcttgtaactcattgacccacatatttgtacatggagaaaataactacattcatccatcttgtcctttacacgttgaagcagccacctcgctagtatcattataatatgaagagcactgtgaggagaagcatatctatacttagcattctttcctataaagacgatgaagaataagaactcacatttagcaagaaacaaccttcttagtcagcataaccgtttaaagataaagacaaagagcggttgggtagctattaaatatgatcctatatgtgcataaaaataaaacgcggggaatgtccatgtttcatgaacaattgtaaatgaatagatcccaataaaaataattttcatcccatacacctataaatatggacagaatttaggaaaaaagggacgacaaacttgagagaaaaattgtattttacatttattaaaagaattatactctgtatccagatcatcatccctaataaggactcatgaagtatgtatattttaactacaaaatcacgtaaaatatttggtgttcatttattattattgttaaactccgtagtatatttattacgtaaaaggcttatatacttatataacaaaaatatacgttaataatttggtactttcattg

SEQ ID NO: 70529 - DNA, 1245 bp, Cannabis sativa
taaacttagaaggtattggtatattgttataacagttaatttaatgtttatttatacaaatataggttgagttatttctgaattatatataattatattatgatgatttcaggagtggataaagttgacgtggatatgaacttgcaaaaggtgacagtaatgggatgggctgaccaagagaggattttaaagacagtaagaagaagtggaagaaaggctgagatgtggccttacagccgagagtatcaacacaactcaacagtagtccaacagtactatcagaatcaacatcagcatcagcctaacaatgatgaatcaataaccttatatgattcaatatttcccattgtcccatccgatcaattctttcagaatgttcatgattttggctatcatgctaattattatcaagagcacaacagtagtaatagtatcgttgatgaccaggccacctccatgttcagtgatgataaccctcatgcttgttccataatgtagtcatcctttttaatttcatattatctactctaatatattgtctcttctcatattgtcaagtattcctaaaatgtaaaatattaatggtcgataataccgaaaataagtaatggaacaaattttccgaataagctctctaagttgactcgcgcaacaagtctcgttttttaaaaatgttttgctgtagttctgaacatcaagcgggtttaccaggtttcgagttggcgggtttaccggatttcgagttggcgggtttcgggttcaaaaaaatgaaaccgaacctggaccgggttggcgggttgacgagtcacgggttggtgggtttcggttggccgggttggcgggttgacccgatcaactctttaaaaaaattaatttaattagttgttcaaattttaacataaataaattaagaaaatctttcaattgagataatgaaaattacaacagtgttgaccaagtcaagtcaaattatttagatcttaaaaagagtcattttgaatgattaagaaaattaaaaaaaaaaaatttaaaactaattaagcgatttaaaaaattatttattttcttattaaaaaatctatttaaatgtaaaaaaatattaaaattcaatttttataaaaactaaattttacgagaacaagtttgagtctctcttttttcttcaaaaatttaagttttatttaaataaacataatattgttatagtttaatttctaactttttatcaaaattatttttttaata

SEQ ID NO: 70530 - DNA, 1943 bp, Cannabis sativa
ccatttcaaatttcaatggatgcataggaatatatttgaaatatatatattatcagacaaattcaaaaaatatgaaaaaaaaaaaaacaattaaaggtaaccaattatttcttagggtaagcaattacctatcttatactattttttctatattttataaatttgtgactttaaaaccagcataaaaagtcttatgctcatcccaagaagaagaaaaaaaaaagcatatacaattttttaaatagtaaacaaatctgtaaaatcccagacacataattagaaagatctgaaacacctaataattagatctcataaatccaacacatattaataatctcatatttatttgaagtgaataatttggttgcaacaactaacacatatatacactttgctggatattgtaccagagaggcatacactttgttgggtatttaaaattcagaagaaaatctggctgtggtccttccaaaattcatcttaaataaataaataaatatatatattatttgttattaaaatctatcaaaataaataaatttatctttgtgagaattcttccaaaatttgcctctctgtcactccctactcccaacacataaacacctaatttatgtgttgaaattttgataagagaatatatgtattctgttcttgatttggttttcagaaaaaagaagatagaagaacaaaaaataaaatcatatctaaattattaatctttgtctagatttagtaatataccatcatcatctaaatatatatagtagtagatcctactatactatataagatacacttcaaaatatttaacatataattaataagatttgtgagacacatgctaaatcttctaatgatcactatagtatatattaatcaacaagtcatcacactaattttggtaactaattatttagcactctattttaatttgattacttatatataagtacaaaaaagttcacaacacattaatattttaactatatatataagtgtcattacaaaatttagttataagttattactatcaagtgacttattataaaaacacatctagtcacaatttattacatttttgttactaattcttaacttttttagtatatcatgatatattgctcatattattccttttggctagaaaaatgaccaatttaagtcttaaaccaatcatggatacaattaaataagacttaataaacttgataggtgttaatattatgcccatatttataagagtattgttattttaaagcttaaggtgtttaatcatattgatatgtaatattttgtaattagttaacgatttattatagagaaaattagattttatatcctttttatattgtcctattttatttttatttttgtttttaaagtctattatttttatttttatttttaaacattgtacaaattttactccttgtaacttcaagatactctccatatgactttattatgttagaatattttaggtacagtacatataaaaagaagaatgtttcaattaaatataaattagaggtagatttagttaattgaaaaagaaaagagatattttttaatttactcttttattatattatttatttaaattaaaatatgtgagaccccatattaaaataacagtactggtacttgatattttaagagtgtcctgtagcatttctctataattattaataattgctaaaaggtataactggtacgtagtactttcttcggtgacgtcatactatttttggtgtaattatcaggtcttatataatttaaaaaaataatttttaaaaaatatcgataactaatcgtgaacctataaaagatattgaacaatactagtacctaataataataataattgtaaagaccgcctatgaataatactttgaattattaattatttaagaattatgtattaataattatggaatgca

SEQ ID NO: 70531 - DNA, 1008 bp, Cannabis sativa
gaatatgaaaaaaaatcagactaaaaagtttttctggatgccgaaacaagttaagggtgcaccagtacatcccttttaagggggtgcattgtagaatcaccctatatttaattcttacattgtcattattcaatgttcaaattttctaacagaaagtaatttttgtaataataatttattagtagtgcgaaggaaatatgagaaagcagagtcggtatatgtaaatatagtgtatatatatatatgtacaatgtattgattaagttgagatgtatatatagtatataagcaataataatacacacaatgatcaattaaaattgattagtgattatggaattaactaatggtactcattagtcatcactaaactctcacgatatggttttgttacactttaattgcaatatttgcattattaattattaataattaatgatggaattaataaaggaagtgagtcactacaccaaaaaccccaatcagtaatattttaaaatgccactattactaatatttagtgacattttatattttagtggcatttgtataaattgtaagctataccaatgtgactaaaaatacaagtgtaactaattaattttttagtggcatcttaaaatgtcacctaaatataaattgtggtaatttgaaatgtcactataatatttactatatatttgtttaatatttaaaaaataatttagtgtcattttgaaaatgccaaaacttatactggtgacattttcctaaaaggccactaaaatttatttctataatttattatttaattttaattaaaaaataaatttaatttaattttatttatataaaaaccaattatgtaataattttttaattattacctacatttatatagcttatttaatttaattaaatatatatttttttatatagcaattgtgactcgtgttgaatagaaatatcaaaatagataatagaaccatcaaccaaatttcgttgattaactctgctcataaactctct

SEQ ID NO: 70532 - DNA, 2263 bp, Cannabis sativa
  modified_base (404)..(412): a, c, t, g, unknown or other
  modified_base (681)..(681): a, c, t, g, unknown or other
  modified_base (1083)..(1093): a, c, t, g, unknown or other
  modified_base (1146)..(1157): a, c, t, g, unknown or other
  modified_base (1705)..(1714): a, c, t, g, unknown or other
ctcattactcccactcaacatcaagtgtctggtctaatgcatagcaaaacattcatgagacctctcactattgttccttaagaaattattttcatgacttcatcttttcgggaatagttaaaactgttccttagataaataaaatctatgtctaggagtcaaaagacttcctatagagtgagccattagaaaaaatgctctagcatcttactaaagttagttgcttgcactagaataagtaaattacaagtcataccacaagccacaagtttagataaactcaaacctatgatactaggatctggaagtttttttaagcccattgaatatacatattattaaaatttccttattgtccgtgtaatagaaaacttttggttactccatatgaatggttttaaccnnnnnnnnnttggctttgcttcttagttccttattttgacaatccattacttgtttaaaataacaatagattttatcaccattgtcttccaagtcataacagggtgagttccttgaaaccctcccactacaataaggtaccgtgatcttctgtctaagaacctaaatggcattgaccccatcggttgtgtcaagacaacagaggcagtggtaccatcttatatagaataagatgatagaacacttttagaatcaagattatctcctctactttgctantttattttcagatttagtcatatttttagggaagtagtatttgttgaaacaaacactttcttatcttaatgaccatatgatggtcttcccataatcactttagaatagctatcaaacatgcaaacttaacctaatagttctaacttttcttaagttcatgatccgaacatccatgaatctagtaatggtatacactaagtacataattattctatcattcagaaatttttctatcactagagtatttccctagaaggacttaggtagctattagtaactaatcatagaccttatactatcatcagtatgaaagccaaatttctgggaggtaagtttgggtgcaatttgaagttcaacttaatgatctttgaactgcaaaaccaaatatttctccacccctannnnnnnnnnngatctttaaccacttaccttgatgtttatcaacattgctagaaattcatgaannnnnnnnnnnntttcaaatttctttgcataagataaaatctagagtgatcgtcttaagaatttaatgataactcatatccagccctgaatgtacatccatatgttcaaagacaaatgtcctactttcaagtggatataggcatattttctctctgtagatattgatcttgtaaaaaaaatactatcaacaagatgcaaattccattgatattatattatgtgattgtagtcttatgatgacttaggtctagttacaacaaagagttcttaggatagtccaagtggatgctagttacagaatacgaaactcatattccatacataaacatccagtttgatccattgatagaaaatagatattaacaacttatgaaagttatattgtattgttcaatgtattcttggaagctaaaatttttaaatttctatttggagtctaaaatttaaagtcaaagacttaaatttatacaaaatatttcttaagtaattattctttcttggactaccactataatctaactctaagtttaggtgccttaagtaagcatatacaagtagnnnnnnnnnnagatcgaggatttatattatttcgggatagaatatctagaatatagtcatacgcgccattaaatttcatataagaaaatagaatgacatcataagcaaatgacttatgaaccatctatcgaatgatttattttttaagcaatttcgtaatgaaaaaactaagaggaaaaataaaggataatttcaattaaaataagaatccaacgatcacccgtttaggcaagaggcaaaattattcttatttgttaagatttaacactactatgtttgtctaatggatgaaaatcctttgggatttgtcccattaaaaataacaaactaagttagaccaacaatgaagattcaaaattgaatttacaacaattaataacagaaaacaacatgattcaatataaattcatacacattgagaaattattatacatttagcacgtaataaagacatgttattatacaaaacaaacacatcttaaataatttttaaggtttccaacaaactgatacaatgtctaggcaagagtcaaatatatcattcattgaatagagtagt

SEQ ID NO: 70533 - DNA, 1678 bp, Cannabis sativa
cgacgctcttccgacagaaaaggaaaaagaaaagaaaataaaagaaaataaaagaaaaagaagcaaagacttattattattattattattattaaaataaaagattaacttcactatcaaatccttcattgttacagaaataaactcccagacaacattacttgtcgaaaaatacaatagaaaagaaaacaagtaaactgaacaagattataatacattgtttgcaatccctataacaaacttaatagaaatatctttttcaacttttgcattcatcaaatatttatatatgtatgagtctttatatagtagtgatcaaaattaatcactatttgtagtgatttgtttataatcgttagatcttgatctaatggttaatattatgaataaaaatattaaataataataaataatttattcttttaaaagatataaataaataggtaacttgttggtggcttgttgtatagataataatttttattgaattatatatttgagttcaataaaattttttgctttctttttaattcatgaatgattctaaaattaattatttaatattatagtgtctttttttataatttttagaaaattactatggagtttatttttttatttttttttatgtgactatggagtttatttattccacacaaattgatcatgacatcctatttgtatgcatataaatatccatacataatagtaataataatctttatcatgaatcatattttatttgcattatatcaaaaatatatatatatatatatatatcaatgtacttgtaatatcaaagccacaaataatatacaaatcttaaaaataatttatattcaaaagaataaagatcacaaataatctaattgatatcaattctactcttgaagagaaatcaacaataattgttaagttgttagattcagtttggttagttatcagttagttataggaattgagagttagttataacagatgtaactaacatgtgctactataagtagcaagattgtatctgtattcatttcttgagcattgaataacaaattcagttttctcctctgtttcttattctttctcagttatggatttgtgatatggtatcagagccaccattgttggttggcctttgtcttcatcttctttcttgtttctgtctcattgattccttgtttcttcttcaatggcacgtggtggtggagctcaaactcgaaataatcgagatactgctaatgcatcaaatgattcgaacaggtactctattcttggtgaaaattcaagatccagcactgcaaacgatttatcgaatcctttctttctctcgaatggtgataatccagctgcgattcttgtgccaaagattttgacagggagcgaaaattacagtacctggagaagatccatgatgattgctcttgttgctagaaataaaataaagttcgtcaatggcaagcttccacagccagatgaggaacatgaagattacgttgcttggtgtagatgtaacaatactgtaatttcttggatacttcatgcaatttctggagagattgctgacagtatcatgtatcttgataacgcagcagagatttggtttgagttacatgaaagattcaatgaaaggaatgctccaagcatttttgaggcaaagaagactatgcagaaccttgtgcag

SEQ ID NO: 70534 - DNA, 994 bp, Cannabis sativa
aggtactcactcttatttatttatttatttattttattttatgtttcaattgtataatttcgtacattattaaaggttaaatattctatcttgtaggtttcatatgatgtaaagagtaatgatcaaatccataattatatatcactttctcaaccaaattattatttctcctcaaaatcatctactctaaatcatgtaatatattttcttatatttttttattaaattattttacaaacaactatgtttatagatggatgatactatattattatttctacaggttggtaacacatgacaatccaaatataagaacaagtatgactgaattactcttgcaggtatattaatttttattaaaaatttaaatgatataatttattttaactattacttataagattataattatacatgtacaggctaatcaatctacatttaccggatttagagggagtcaaatttacaagaatacatagggatttgacttggtatattttcctattttataatgatcagtaagattttttttttatctcaaaatatcactaagagattgggttgatatgtttgaagttttattatataattggaattatataatgtctattatttttttaaatatacaaatgtggtaattattataacaattcgcaatttatctaaattatttggtgagttatagaatggaaaaaaaaaatcagtttaaaatattattataactaaaataagtttttttttttaaaaaaaaaatcatattttttaaatagaaataaaagttgaaataattaatattataatggtgcaaaaaaaaattcctatagcattattagggaaaattgatattatatgcttaaaattaatttatctactaaaaatatattagcatattttacaaatatactcacagtatttttctattcagttttacccttaaacaaataaaaaccaaacatccatgtctctctctctctctttcttcggcgttaacccc

SEQ ID NO: 70535 - DNA, 1145 bp, Cannabis sativa
gacacacttttggagattaaaatttctaagaaacttttttattttgagcccaataatattactcctgcgaatgataatgtgatgagattaaaattcgtgaggtaattttacatcagtatagtattatagtcgtacccttcgttatatgagcattgctattgggtaccagtggtgtccaacactttttataggctgtagcatctcacgatcgatgttataagagacacgatacttaattacattaataacaatataacacaaaaaaggtattaagcaccaataacattttttaacaattctttccttatatatacctaataaatttttagggtatattacttataagtaccttatagtaaaatgttacttgtaattgtattattaactattataaagtataatatcaaatagcacatattttaaaatagtattaattatcgttaactgctatgactcacttgtaacgtatgtaatgttaagacgcgccggatgaatctagtttgacatatatagtctagagacaattttactttttcttgttattattttaagaggaatttgcggcgaaattcttttatgttttaatttttatatatttaatctccttattttttttttgacaaaatccatttaagtttatttttctttgcaaatttaaggtgtcagttagatattactgttaaatagcaactggattactattgtatcgacttcaaggttttaatgttacaaatacacaggtgaatacaatggtcatccaatagatatttaacggtaatattgaactagcgtatcaaatatgtaaagaaaaataaatttaagaaagtttaggcacaaaaaataaatttaagaaagtttaggcacaaaaaataaaataaagagttaaatgtataaaattaaaatataagaaagtttcgccgcaaaatgctcttatttttaaggaacttaaatagaaatttgagaattagagtttctatattatattttgtattttttggaatttacgttggtcagagatctcaattctatcccaactaactacataattgaaatgctatttacaaaaatatgagaaaataaaaataaattttgatatatgtagcataaatatttaattatactaaatatgtttttttttaaaaaaa

SEQ ID NO: 70536 - DNA, 1035 bp, Cannabis sativa
tagtctctccttccatcactctccctccacccttctccatccacccatctctccctcctaccaaacatagtgttagagagactgtctgcctagtcagcaaaactaaagaaccacgcgctgttggttgcgatacgttcacacaatagagaagcaaatttttgagatggatggatgaccaggagtacatcctctgatctcatcaggtagagctagactacgtaacagaggttaggatctaattagagatcctctccaagggagactagtagacaaattaggcaggatctacagacaaatgatccaaccgagttctgtaggaaccattacagacctctcctgaagtagctgactctagcaaccaatggctttgagggtccaatagggatctctggctacacaacacctccgcttggccaacctttgggtggaaacacctaagaacacatcaactcgagaagtgaatacaatcacctcaggcagttagatccactaaactctagcaactggtgtgatctactcctatcaatacacatgctaaccaaccaattagggcagaatgggtggccaaacattgcccagaatagagctggccagccatgcactattgcttacgatagggctgtcagaccacgactagtttcccgaccctggggctgtccagccttgaacataccttttctcagggtatggctggccatgtcctggctaatctagggttgcagcaacatcaagaaaggtcaatcaaccaggctcctgcaacatcaaatccttatgtgcaagcacaaatggatgaaataaaagacatgataaagggcttggctggcccaaacccatcaggccttgaactagataggtgaggaggatcatcattctcgtcatacattagtgccttgcccttgcccaagtttaagatgtcaattaaaaatgcatactgcgcgagaagatcctctagcacacatcaagtactttgagatgtagactaacctctaaaaagttaatagtgatgtacgatgttggatcttctcaaaaactttg

SEQ ID NO: 70537 - DNA, 1857 bp, Cannabis sativa
  modified_base (1726)..(1727): a, c, t, g, unknown or other
accaataacaagaaccgataaacaagaaccaatctcaaacaatcacaccatgtcacaaaagacaagacaagacaaaagacaagaaccgacggtggccgtcgttgatcggtgtcgccggtcgacgtgaaccgaacagcagacgactggccaacgatgctcctggaggctgtcgttatcgcacacaactctgaaggtaatcgctacgtccctggaagcttctcgtcgactctgtagggtttctctctcctcctgttttcacgctcctcggtgtaaacactttttttatagtaatatttgttatatttacaatatgtaaatttttgataaaatttgaataatttaaagtattaaaaacaaagtttttttttttttttttaaaagaaaacggagaaattccataagaaggcaccaagcctaaaaagattcgagatataaaagatatgcaaaattagacaattaatttataggtaggttcggccaccaaacatgagcctcatctaaatctagagctcgttttgctaaaaaaaatgagtaacaaagtttttagaccgattataatgaatcagggatatgttattaaaagactttcaaatatggtttaatatcattaaggacaataccaaactcactgagatgaggaaccttgctattgacaccaagaactaaccgctggcaatcagagaaggcaataacaaacttataccttactataagcaacaagaaaacccatgaagcaaagctttggcttcagcaacgtgagggtctaaagatcacacgcacggatcatataaacagagttttttatattatagtttatcatatatgtttaaaaaaattcaaatttatttttggcactataaattattttaaaattttaaaaaatgtacagagataatattaactaaaaaatattgatggtaatagaagaaaaaaaatattgataataaaaaaaatattttgatatgtatttttgggcgaaaaaaaaaaaataaaacgcatttcgttatgcattataagttttgtttgactttaatttaattaaagtgtaatatgattagagtttagtttgatcaactttaaataataaccgttaaatcaactcaatcatgatcaaataattatagacataaatagaatacattctctcacttttgtgtaatatctcaagaaagacacactttgtatgtctctttctttgttttcacttttctccatggatttgaggaaagaactagattgagttttttcttaaccttgaaaaggccaaaatatcccaatgtaatttaattacttcttatacaattgattagttgacctataaaatatatatttatagataaattatgtgtacatattaaacaaactatttactatgtattttttaaaaaatatttttatagtactagacataaatgcttaagcttaaatgtaatcttataatagataaacaaaattattttaaaatgaaaaaaaatagtggagagccactttagaagagaggtttgaggtttatcaattttgagaggcaccaaagtggctagtattactaatgatgtgctttagctattttttctaatttttgttaaggtaaaataattaagatccatattgaattacactaatctataactatataaaaatgagaatgtaggtttgggcttcctacattaaattacaaaattatccttattttttttttttgttaattactattaaatcctcacannatttaatcacaagaaaaaaattataatttagagagcttcactttttatatacaatgcatacaaatacatatttttatttctttttactaatagttttttatatgatttgtttatataaaaaagactacaa

SEQ ID NO: 70538 - DNA, 1194 bp, Cannabis sativa
  modified_base (990)..(992): a, c, t, g, unknown or other
agggtaaaacaataattttgaccagatctaattatgatctaattaattagaggacgaactacttatattgattatatcaatggactactagaaagaattttgtaaatataattctcaattgttaaatagggcaattccctctttatagtgaagtaatgatagaaataataaactatattattctattgatgagttcaataataatctagaatttgttagagatttaaaatataggttgatctctatacgacattataatgagaaagatttaaaatgaggaataatgtcttatgagggaattattttctataagaaatttttctaaagggcataatgataattttgaataaattattattttgtataattgtttaattgtgaattgaataatcaaattgatttaactatctagttttactcatttaacactatattttagctaaatataatattattgctaaataatattaagagagagcaatatattattttaatagaaataatatttatttaatctagaattatataagaaattaacgataattagtcaattattatttattttgaaataaataataaattttatttaagataaaattagtaaagcactttcaggctttaaaatgtagttcacatgtgtagggtgacatacaattgccacattatttattttgaatattttattaaatagattaaccaaaataatttaatcatttaactatttaattatattttataagataagatatttaagattaaaatgattatataaaataaagataaattgaatatggttattcaattaattatttgaatttcaaataaaatatttcttatctttatttcataagattaaaaaaaaagttatatctatgtcattatagatttgacctaaatgagagataacataaaattgatataaaaaatggaacgacacaatttttcctctcaaccctaatatagtcgaccaactctctctctctctctctnnntctctctctctctctcatcaactcgtgctcactctctctctagattggtagcataatctgtctctctcataatcatagtgtgtaacgcccgtaccctcatgttgagagcgtgcatcaaggctatgtacttctcatgtgacttcaataaacaattccaacgatctattatcttatccataccctcatgtattttgttaattct

SEQ ID NO: 70539 - DNA, 897 bp, Cannabis sativa
tatatatatatgtgtgtatatgtagagtgtactgcttgtgtgcggggttgtggggttgtagagtgtagtgtagtgtgttttgtgggggaagagagtgaagtaggagtgggggccatgtgattgtgactaagattttgtggttgaagaaacatattagaaaacggccacgtgggtggggtgacatcaagccccacatcaatataaacgcccacaatcaacgactcatctctataatcactcacgcctatatatactactactacttaattacttcattcttactcttacttttttgcctttgctccccaaaaaaaacaaaataaaaacatgcaaaagaaaacaaactcaagaatccaccaattactgccccactaattctcacatttcaccatcctttacttttatttttcttttcctttaactattggttcccaactctctacaactctttctttcattacccttgtttttcaattctctacataatagagaaatggcatcaattgttttcgtaatgctcctcatttagctgtgtagtatatatgtgtatcactttatattactttcctgaatattcatcttacaaataattataacatgcatctttctatcatgctttgtctttattaacacactttttaagaaatatgtttaattttagagtttttaaataatagactaccaaaaaaaatatctattaatcaattatttttgactgtatagtcaacctatatttatacagttttagaatcatcacatttgatattccccaagccatgtgagattgcacaacttactcggtcgaaacccttaatggatcacaagactctgactgtcacaatcatcccccttatagaatccgacaccctcgtcaattatacttccggttgggtctaa

SEQ ID NO: 70540 - DNA, 1593 bp, Cannabis sativa
gtttaacttagctgcttcgtccataggcacagggttaaaccactagctaccttagtagaatagtgacaagagacactcgacactatttgtttcctgaaaattgctaaagaaattgaatacatttacaatttcaatatgacacaaataatttatcttaatttgtgaagatattaatttatagccattaaaggggcagtgtgcacaaatgaattcacttttgcttgtacaacttcctagcttaaaactacaacaaatttacaataaattccagtgtttccaaaagcacttaactgatatccaacttctctattatttcaaaatgcatctgcagatcaggccgccgatcagccaagtaaaatctctcacacacctgtaattttcctccactcctttgagttacagacttaagcaaatgaaacaatttttctttttcgttgcgaatccatgatctattggtgtcacaccactgcctgggagttccatgaagcacaaaccgtagtcctttatccccttctgcttgttcaaggtgttcagtgagtttctcaaccgagtgaccgtcagtaatgtatgcaccgacggaattaagtccaacatccacataatgtatctcagcaatgctgtccaagaagtcttctttcgtacagggtataatttgttgaagttcatcttcaatttgtattctatcttgcattgatctagactttgccaagccaagctcagcaactagctgattaactacagttccacctttgctgaatccaaatacgagtgttttggggcgataaaattgcaaccctgaaatgctggctaagcttggaatattttgtttatgtgttgcagcactctgcaccagccatttatttcaggttcaatcaaataacatgtttctaaagaccaaaatatctcatcattgtttttcacaaagaacctcctttaatcgattaacacatacagagagttactcagataaaagaaaaaagtttgatgaatcacatgaatgaatatcagttaagtacactcacctctcgaagacaatttgataagagtgatacggttgaccaactagcaggaaacccagttgggtcatatgattttggttctccccattgattcacagacggtataaagtccttatatacagcaaaaggcccattaaacaatgaagcctcaataacccaagcattgacagaaccaccaatttttgagaccataatatcagcaatgttttgtaaattagataacctctcaatcactggattcccagtccccataactcgatctccagtgaaaaagatagcatttatagacggcacctgcccatcaaatttacaacaaaaaacaagaactcagttctttaagtgactaaacactaaaaaccaaatgaagattattgtcaaaactcatttgcatagcacaataagaaaagaaacaagaaaaaaaggtcctgaattgaacaaaagaacttacagttagggaatttaaagatagtgaaaggcagagagatgcagcaacctggtaaaaatctctactgtcagcgtgtaatgggactctcaacagccctctccatcgctccataactcgatcaaaaagcaa

SEQ ID NO: 70541 - DNA, 2423 bp, Cannabis sativa
aacaattaaatttgtgattaaaataaaaaaaaaaaaattgtgtgttaaactctcacgtcacgtctaactaatggttgttttttcttatcatgaaaaaggaattactcaactgtttcttctttcaaattaatttattaactttaaaagtaagaaaatacattactcgctgcaaacactccattctgttactccaacaagctcagcatggaaagctttctgcacgtcttttctgttcaagtatttgattgttttatcttcaacacatacatcaatttttgctgcttcatcctgtaaataacccattataaatataacaaaacatacaaatgtcctatttggctctaagccaaagggtccataatcttataattatcgaagattttcctacaacttaaaaagagaaaaactgaccagtttattaagcatggcagattgagcaaaaactgggggcaaacagacatcaagagtaacatcatatgagtcaacgagtctactcatttcgtttgacacttttctccatacttgagaacaaacagggctgaggtttccatcaacttgaacttgtctcctgtatgttgaatagttacacactgaattggccatttcataacttgaatctgaaatcaatccatgagaccaaatgaactcagcccttgagttaaaatctgtattgaattccagaagtggattgcctatctgaaaaatcaacatatatttcccaatcctatttataattaaacaaaaataatagtcttaccagtatcagaataaagttaatgatatagttttcttactgctattccttttagattaatactggcttttgattggacaatgagttgagcaagctgtggaacatagtgtcctgatgacaaaaacagtttcaatttggatactctttgaacttttttttattattttatttggttcagttagaaaattacctccataactctctcctgtaatgaaaaatgccctgtttttgtagttggggaattggatgaaccatcttttgaggaacataagattatcttgagctgaaaggaaacagaacccatcatcaaatttcttagataatcctggatttaatgtagtttcgtttaaagccaatgtttgtaccagtcttctcatcattaacttctgtgtagaaagatttgttagctgagtaggagaaaccaactccagcaggagagtccaagtatatcatgtttgcctctatagaagaaaacttgtcaaaatcaacaaccagtgagagaagaaggaaaagaagaagaagaagaaaatgtcatttattagaacctttattccagctataatcattcttaagcagtgtatttcctattggtttgaagggtccatgttcacaaaatgcaccagctccaatagatgaacaaccaggcccttaagattaagaaaaccagaaaagtatcatctgttaagaatagcactaatgacagagccaaaagtagaaaagtttaagagcaaaatatttacctccatttaaccataaaaccagtggctttgaatcagggttggcttcagcttcaacaaagtagtaaaacagttctcttcttgggtttttgctcactgctatatagcctgaatattgctggaaattgactggtggctgccctggaaagctagtgattttagcagcctctgatatggagtctccattcaacaaaatttcttgtataataattattagtgcaatgcttttcagaacagcaagtaatggatggagctgcataatgtgaatgaaagagataagaaaaatgaaagttgagagctttaaaagttgatttttgagtccttgagaatagagtttgggttgggtgtgacttttttttcgaattctgagatatatgacaaagttaatagtatataattattataatgtctcgattacagccttttatctttttggactgatctgtggaatatcattatatagaaaatatgattattttagtggtaacatgtgataatggtaacttgtgaggtgaatataattgtataacagtagagtcaagatcaacccagagagatagacatatgtggtcatacactaagttaggacaaataaagtagaaagctaaaaacagtctttatgtaattatgtttactccctaacacacaaactaaactacccttttagactcatacataaccgtagtggttaacttaccaaagaaaattataactatctattttcttaaatttgattaatctaagaagaagaatcaaggaatctgtccaagcttatcaagtcaattattgtgctcccctcaaataaaagacattttctttttccaatacttcttcggtttattccattatctttcttccactcactctttttgtttttttctgcatttctctgcgtgaaatctatagttgggtaacaacttcgtgacttaaca

SEQ ID NO: 70542 - DNA, 2615 bp, Cannabis sativa
gctctttgatgaaacctctttcccattctccaccactcccaaacacagtactgattcttactcatactctgatttttacacttctgctattattcctacaatcactcaaccccaatctgttgcatccaactccagacctgtaccatctgaccataatgtgccaaatatggcaagttgttctgtgcctatgcaggttccagtttcaccaacaagaatcccagagattccagaaattccagccgcaacttcatcacctacaacaacagaacctgaggctactggctctgctgatcttcctaatgatcaaaccaactctcctgcaactcatattggatccactggtgtaattaatcctgctggtacgccacacacagctacaatacttcttattcctcatcttcctgagcaatctgtcaccaccagctctcaaaatgctgctgctactcagaatccattggccaattctcaccccatgcagactagggcaaagtcaggcatacacaaaccaaagagttacatggcaattaaaattcctaaaacagttaaagaagcattacaagatgagcagtggaacaacgcaatgtctgatgaaatgcttgccttaattcgaaatgcaacttatacattagttcccttgcctcctggtcgagaacccattggctgcaaatggatatttcgacacaaagagaactctgatggtactcacaacaagttcaaagcccgacttgtagcaaagggatttcatcagcaaccggggttcgacttcacagagacttttagtcccgtggtaaaactagtcaccatacgcatagtcattacattagcattgtcccaaggctggtgcatcaagcaattagacgtcaacaatgcgtttctaaatggtgatcttaaagaagaagtgtacatggtacaacctcctggttttgaaattcaagcttctcctccacttgtttgcaagcttcacaaagcattgtacggactcaagcaagctcctcgggcatggttcgataaattgcatcactgtcttcttcaattggggttctttccttccaaatcaaatcactccttgttcattcagcacacatccacatacacaacattgattcttgtctatgtggatgacatacttataactggcagtgacccgaaagttgtctccaccatcattactgctctcaacaacaagttctccttaaaagatcttggtgatcttcactactttctgggtattgaagcccattctacaccatctggtttacacctctctcaagccaaatacgctcgagacttactagtcaaagcacagatgcaagaagaaaagccatctcccactccaatgaccactggtgtaagactttcagctcatggcagtgaaccaatgtccgatcctcatctctatagatcaattgtaggtgcactacaatatttgctcatcacaaggcctaacctatcctttagtgtgaataaggtgtgtcaatttatgcacaatcccttactcactcactggttagctgttaaacgcatcctacgatatctaagtggcacagtctcctacggtttgcatctaaaaaggcctacagatcatgatgttgtaccattctgtgatgctgattgggctacagaccttgatgatcttcggtccacctctggtttcgccatcttttttggtcaaaatctcattgcttggcagtgcaaaaagcagcaaacgatttcccgttccagcactgaagctgaataccgcagcttggcaagcacggtagctgaacttacttggatacactctcccttcacagagctccacattcagcttccaagaccaccaactgtgtggtgtgacaactcaagcaccatccttctcacggcaaaccctgtccttcacgcaagaactaaacacatagaacttgacctctattttgttcgtgaaaaagttctgcagaatcaagttcatgtcaaacatgttccctctgtagatcaacttgctaatggcttgactaaagcaatctccagtcaacgatttccccactttcgatccaagcttacaattcaagctcttgcctctgccacagaagactcgaattgtaatcttgaggggccgtgttaggggtatacggttatatctgttatgcaacagtgtgcatcagttagttagttacagtcttagctgtcattctgttttcggttgtaaccaacttatgtctgttgctctaattctatcactatataaccatgtactcttgacactgaatcaatgagattgctctttcattcatcaatccctctttgctttctttctgctctttctttcagtctttccttttcagtcttgttaccttgttcatattctgtttcactcttcagctatggccaagagattcaacaaatatgaactctaaaaatcaacataaaatggagaaaaaggagacgagttcgtttttttatatcaggctacgtactttaattacctgcaaaattattgccttgaacaactttccataaacattttatttcatttaaattttttttttggtacaaataaaataacacacatatttaagataaaataagaagtcataattcttatgacggattatattataatataattacaacataca

SEQ ID NO: 70543 - DNA, 1508 bp, Cannabis sativa
tatttgttttatatttattaaaaaaaagttatcaaaaattaaactcaaaatagtatttaccctataatttcacctttttctccatctttttccttccactcttcttttcaccttactaaacatagttaaaatttcaaatttatgcatttttatgttacaaaagattttattcagatattcttttatttcattttccaaaccctaaagtgatttctgaaaatctaacaattttatttggaaagcattattcaacttggtatttagtttaatttatttattttattaaaaattagctgtgtttgatgagagaatttattgttaaagtagtaaagcttagctagacatccactgtctgagatatcaaagtcccttttgaccacccaatcacttcacaattcaaattcccaaagcccacgttacctttttcacacgttgcatttaatttaattaattaaacacaaaattatatcaatttttctcttaattaattcttcaaatcctaaaatcaaaagaagaacaaaaacaaacaattcaattagagagtttaatttaatcaaaactcagtttagttcacacatattcctttactctttctgtgtgagcagtctttatctatttattttaaccaacaaaaacaaagcaataaattcttattggtttgggcaatatatatacatgtgctccctgtgacataacatgttgttcactaaaaccagttgtgacccatatgaatacaaaaactagtgaaagtttcttctgtcatcattattattattatcattatttcataaccaattggtgaaaactgtcgacagatactgatgatggacacagacagagacacaaaagcccaccctctcatctcagttgcttattttagataagaatatatttaagcttgagcaattacaataaaaataaaaatagaagattaaagtagaaattaatagtaacactccttaaataggattgtactttagataagtttttaaatcaaaaccccttttaattgtggaataaattatgaatatttcttttattatatataattaaaacttacttatttttgtgagttaattgtgtaatatactctcacattaagtagcacaaaataacttaaagagtataataagaatatcatctataaaagtaaatatattttgaagaatataaaaataaaaataaaaattaaagcaggtaaaataaaatagatatacaatattttctctttatattttgcagccccatatgaaaaaaaaaatagtaaaatatattaatgtattgagaattgctaaagtgcactatcggtatctagcaccttttttttagtgtcaaaccgttattggtgtaattaagtaacgggttacatataacttaagaaaataaattttaaaaaaaatcgttaactaatcataaaatgatacttataaaaaaatactgagcactactagtgtttaataatagtagaatttacgtggagtatgggttttttaaaccttttatgataa

SEQ ID NO: 70544 - DNA, 1964 bp, Cannabis sativa
attcggttattccattttaatataccagagttattctctctctaaaatataaaagtcatctagctaaataccccgtcatagtacaagaaataggataacaagttaattattgttttctttaaaaaaattcaaaatgattttgcattgtggagcctaataccatcactattaggaatgacaatccatcattcctgatatcattgttcctaaaagcctttatttattgaagtgaatgtagaatgcatgatgaaatcgtcatgttttaacattggaaataggtaagtacctttcattaacttgtgttttcactacaaaaaattactatttttagtcaaaatatatttttttgtgactaaatataatttttagtcacaaaaaaatgttaattgtgactaaaatatagtatttagtaaaaagttttcactaatttagttttagtcacaacatgtattgtgactgaaaatacatttagtgacaataaattttatttttgtgaccaatatttttagtcatggaccttttagctacaacataagaatcatgatttataattagtcacaaatttttcacttttagtcacaaattttgttgtgattaaaagtaaaaattttttgtagtatttgtaaatattaccgattggatcctctattttgtttaaatatcaaattggactctacattctctaaaatagtacctttttagataattttttatcaaaataaaatataataataaattaatgtagatgcactatgacaaaactaagtacaataatttttgtcttcaagttagttttattaaaatatatatatatcaaaaattaagtttaatatactatttttaccatgtttaaaaatatagtatccaactgattatttaacaaaactataagtatctatttaaacccatatgtaaatttaatcactaaacaacataaaaatctcactatgttcatcatcaatatttaatccggccggtactaaacaattcaaagttttcgttacttttataatttgacaaaaaaccatgtaaacaaataataatacatataattagtaattaattaacagtactatatatttcattctcctctgttggtttcataaaattaagtatgcaataaaattatttaggaaaaaaaaagtagggcatgtgctagtttttttttacaatttatattatgagtgctaatgcatataataattaagtaaacaattttagttataattttttcgtgtccaccaaccaagtaatattagttgtttcataaacaaacctatgcctatataccctaaaatcccgtcaatttttaattaaggctataagcaatgttagggttttgatttccacatgggaaaacaagggttccttcgcagaaatattttttccttttcaagtgcttcatttcgaggcgacacgagcactttcccggcgtttcctcccacctcttggaaacttgcaattttttgtgtggattctcgtgacctctttcaccccaaactaaccctactacttccacttttttactatttaattattaataattaataatatgcctccgccctttatttttcaacttattaatcgatttgaataacttgcattttttataatacgtatatatgcattatatatatatctataatatatatgcaattgtgttgttactatatgttgacgtgtataaaatggaatgtacatgcaatacaaatgcaaatgaagaaagaaaaataaccatagattttttcaaatccatatatgggataataaaataaaatttaattattatatatcaatgtttttataaactttcaactcgggatttgttgtccaattatatagacacctgtatgagttatcccttatcgattggcgtttgtcattctgtaatttatgaacttgaaaaacttctaatgttttccaaaaataatccctaaaaccaaagaagggaatgggataaacta

SEQ ID NO: 70545 - DNA, 1560 bp, Cannabis sativa
aatgttgtttccagcgtggcacagtataaatgtaataaaatgggaaaaatcagagtataaatttccctattaaaaactcatcataccgtatctcgtcaaatatatatttatagttttatagtttaaagtgctaaactataaaccaataacttatattgactacaaaatattaaaactctaattattcaaaaaaaaaaaaaaactctaattattccgtctaatttaattagtacaatattttagattctaccgtaattaaataaaaggactacgtgttagttggtaaaaaatatatatagatgattttttgtagaataaatagtttagtggattattaaaaaataattaaatttatatttagatgataaatatattaagatatttttggataaatatcaatttatattattattaaaaaattaattataaatatatatatatattagattttaaatataaattaaaatatttagaatttgaatttgaattgaaatatttcataataataattacagattgaagattgaattattattattataactattagaaaattagttattaataataacttatataaatgataaaaaatagaataaaaaaaaagaaaaaagaataaaatagttagagttatagattggaaagctaaaatagttatagaatgattttttttttttcatggatggttaaagaataggacttgaaaatcaatatttacccttctacgtaatgcacatctttttaatcttattcaaaaatgttgtagttatcattattaatttgtggtggtcattattattctccccatgagatatttattttataagttatatatgcatggaagggagatgaagtaaattttaagaaggaaggaaacaaataaaataataattaaaatctgagtaaagctccaaagaaatattgtaccataattattataattggctaaaatattatttggtgagttaaaaataacatagaaatattaattaataaagatttctatttattaataaaacacaaatcaatgaaaatttatgagaatatacatataataatgaaaaatctcaatataactaccttgtgaaagcaataataataatgaaaaatctcaatataactaccttgtggaagcaataatcttgtttacttttcatataattcgtttgattggtgcactctttgctttgcttggtgagaaaaatatgttatgatcgaaaaaaattatatcattgatgaacaaatggtagttgcatagaaaaatgtgcccggtttgggtctgttgcagttatagcattttaactacttttttgattttttaactgttttttcaaactttttccctccccctttttttttctgctatatatcagtttttctatggttttcctttaactgctgcttctggtcctggtttttctgcgtttttcgtgatggatcctctcttgcattccatgaattcaacattaaatctcactaaagaggaaagttcagttgcacttctgcctgctgatgttgcttctgcctcaactaacgaccctaaacacatccttattgcac

SEQ ID NO: 70546 - DNA, 2207 bp, Cannabis sativa
agtcagtgacatacacatagccaatctcttcatatttccattactaacaaacctataacacaagtggaatctaagagatagcatgatgctttaggttacagcaataagctctaagcaaatgacatcccggctctcacacattaaacccattagaactaatctcccagcgaatctagtttgtaattattccttctacagtgaaattagataggggtggttctctctcttttcttatcacaacattatgctgagattcttttcattatgggggaatccttttgttcaatttctcatcagattatgtgatagtatcttgcttcaaataaatacaaaattaatatctttttcttcataaaattactgtaatttattttatatcttgactgattagatcttgatagttgatactaacgaaggcaagcttaaaagttaaagcactggtcaaagaaatgatctgatcaaatttaattaaaatcccccaattttatccgataactaaatgtatgaccctgaaattaacataaaaatttcagctttcatgcaaacccaacggtaaaaaatcgtccatggtaagatgaatgtatatgtatattaatcaggttcaaaatgcttaattaaaagatatggagacagaaagaatataaaattagaaggccaccttcgtgggaagatgtgacttatcgtccacagagagcttgtccagagtggttgaggctttaactgtaagcgattttgagaagtatgcagtctgagtgaaaatgggtttgtgggttttactggaaaaggctaatgatggtgatgaagaagggtagaatgtcgcagaaaatgccatgagagagagagagagagagataggagcctagtattaaggttctctgccgaacggtctagtgagagaagaagaagctgaccacgtccttgtgaagctgagatttttctgtatttgtcatatggtttgtgaagtttatgtgctttcccacaaacgacgtagattttggtgacgttttaaagttgttgtcgtttttcaagctcaccagttacttggcagtttaaacagtttcctactaggacttcagttgaaagtccttccatcctttaccagagagagtgaaacgtgaaattggttcagagactcacatatcgctctcgacatagctatgcctaagtccaaccaacgtcgcatcgtcaagactccaggtataatgcttcccttttcgctcgagatacactaccctgcttcagatctactgcttccagcaacttttgtgctagttctttaagacctcattttcattactcctactacataaaattattctgtacaaatatgggatctaatgttgctttgttgttgtttcgcttgcctctctccaccctcttgccttgcatttaaatttcccccaataacaaaacgcacttcaaattatgtatatattcttgtggattcatagtatattgtgaattggaaacggaatagtcatagacccaaaagttctgattttggattcatttcagaaataaatgtttggtctattttattccttcaaatggtgtggttagttttcttggacgtaatcgttgaatcctgtattaatggattccagacattttaatattttgttattagtctaattcttttttaattttagctgttcaggtttgtgttcaatgggattttgaattgctatgcccccttttgttcttttttactcactgtttcttgaaatgtaggtgggaagcttgtttactagaccactaagagaatccaaggggttagtgcctactacctagtactagtattataagcttattttgccttaagttccttaaacatgatagtctcatgtattgcaatgacatatttggtatatacgttggtgtattgcactattgcagcatgtgtcaagtatagttataaactgatatgtgacttggtttgtagtaactactgagccttaacttgtaccttcaacttgattattaggatttatacaccaagaatatgtcttctcttgtatcttttgggcccttacacaccataatgatacaaaatcttctgttttagttacagttctaatatttgtaaattatgttttaatttttaattgtaagtagcccggtagaagattggttttgggatattcagcacatgattatatttttaatttagagagttgcctttcgtttaagtgttgtttgctggtatt

SEQ ID NO: 70547 - DNA, 2603 bp, Cannabis sativa
atgataatgacaatgatagtgacggagatggtgattatgaagataatgattgttacacataatattaaaccattagatgcttggactgctttaagagagcaatgacaagaaaatcagcgttgatcaatcctatttttataagttttattactttaattaaatttttttcaaatgcttctaatttttttttaaagagttgtaattgataagttattatttatggtgaaatatttttaattgatcaatatatatgttaatatttgttaaatattttttttatttttaattcatgtttataattaattaacttgtaaaagacatcatgaaagctacttctcaatcgacaccagttgatggaaaaaacatcaatggacttccatagaggatttaaagtggaggaaatatttggtagaaatgtgtaacagtggaaaatgaagagctgctaaagatacattccaacctggatatctataacaacttgaaaaaataatgaatgataaaattctaaattatagaattaaagcacaactacacattgactctcatctcaagatattcatgagacaatatacaacaatttctgatatatatatatatatatatgttgggaccttttgctagatgtttgaactcaagtgtgtggtagttgataatttgtgtttgatgaatggattaaggttagttactataaaagaatttactttattaattgtttattaaattttttaactttaatgttatataattttgccgagtcacccaactgtaaaaggattattaaacaagacatttctttattataatgaattgccaattatatatggaaaagatcatgctactggagatgatgcaaaacttgatgaaattgcataagagataaataatagttagaataatgattatgatccttttgatccacttgatgagatgaatgctaatgcaagcatgcagagcaatatacaatcaagtcaaatagctcgaaatgctaagagaaagtcaaataagtgggatctattggttgaactactttctaagtcagagcaagaatttagtgctatgcaagcttctgcgagtaattctattagaaaacttgctgattatttttaacatgaagttgatggtgttgctaggaggatgaaactatatgatgagatcaaaaaaattgatggactcataaattcccaacgacttaaaattgaaaaacttctagtttcaaatcaaccccacatcgattacttcttcactttagaagaagaatttaaaattgatttccttctaaaattgttagagtttgattttacctttacttttttaataaaaaatttattattcatattttagattatatttttatacgtacataaataaaaagaaattttgatttcattttagcatttttttaaaatttatttaagtataatatttatttttgtttattcacactataataattttacataaataaatttaaaaatattgtataaaaaaatatatgtgaacaattattcaatttaattaaacacaaatacaatgaaattaaatttatttgtttaataaatatatttttttttacaaataataattttattttatttataattaacttaaaagaggtattataataattattattttattttattttactatatatctaattaaatattagcatagataaccaaacacaataataagtttacaatataaccataccggccgatctcaccataaggtattagagatcatgcagttattagttttttcatacttaatcaagtacgcttagattgctcgtggggatgtcctaaaatcaataatccgaaaagtagaaagaaattatttgttgacttttattggatttgtttaaagtacaaacctaacttcttcaagcaaatataaataagttaattaattttaatagcaacaaatcatgattacatcaaaatatatatatattcctttattacagaaagagatatataggagggattaatttaatgaatacattaaactgcagttatgttaagtctaactccaaaagtgcaatggttaggataagtgcaaatgaagtagttttgtccctttacaagcttgatgttgtcatttccacttgaataaactcgagcaccttctggagccgtgcaattcaggtaaccagcttttgtaacacgtaccacattgtgatgttgtgggctgtacttgaacactacatatcatcaaataaatattatgagtagattatgaataaagtgttaaggcttacatttttatttactagacatagcatctagatccgtgggagaacaagaaaggctcatttaataaagcatttgtcattataaagttataaacaagtaaaaacataaagcattactttctcatttatttttcgaaataaactttttcagcaacatattttatctagctctactaatttcaaaagatttggaaaaaatatatattgaactgtttgttaattaacttatgtgcagatcaacgaccaaccaaaaaaggtcatgagacttgtcttgctcgtcttcattggtttattttaattttaattttcattttcgaaagagatcgacttatattaatttgtgaaa

SEQ ID NO: 70548 - DNA, 1900 bp, Cannabis sativa
ataggatttatttggatgaaaaatgaaagtgaaacttaagaaaataagaaaataaaacaaaacaaacgcaaacttggtcaaaaaaatcgtgtgcatggtgcacaagcgtccatgagtgcacaggtgcccacacacacaccaactgcacaagcaacaaaaacttagtcaaaaaaaaatctcgtgcatggtgcgtaggtgcccatggtgcacagggtcatgtcatccaccaagtgcacaagcaatggaacctgtggtttgtaagaccatataggatttatttggatgaaaaccaaaagtgaaacttaagaaataagaaagaaaaaaaaagacaaaggcaaaattggttgaaaaaattcttgtgcatggtatgtaggcatgcgtgggtgcacaggtgcccacgcacacaccaagtgcacaagcaacagaaacacgtggtttataaggccatataggatttattcagataaaagcattattaaattgtactttaattcatttgttttcctttccaatagattttaaactccttatttcaattattattgttgccacatagaatttaagaatttaattgtttagtaattaactacagtccttgtggatatcgacctcactcttgtgagtctattacttgaatcgactacgtttacttgcgtactagaaaatccataacaacaaggttcaatctacaaaataggaatgacataaaggtgaaataccgaactgcacgaaaagtgcttcctcaagaaaacacttccaacatgctgaccagataaaagtggagatctagccacaaggttttcgcatttttggtggaattttgaaaaaaaaaaaaaacaagggtttcttgaatttaaaggaaacccaaaatctgaaaaacgctaacattcaacttagggagataaaacaggcgatctttgcagaattaccttaaaatttctcatcgtgaagagctctaatttcagacaagtaataacaaagtccttacacacatgtcccaacaagcaaaagaaacacaaaatacaagaatcaaaattattaaaaatccatgccaaaaaaagataagaagacttactcattgttcaaattaaagtgtgaagaagaaagctaataaacctcttggattccttgcaagaaaatttggagctatcctggaagtttaaaggctatagaatgggaagttttttcttgctttggaaaagttagaattgctaagaataaatggaatataaggggggatatttatagtggaaaggggtgaagggaaaagagtttttaggaaaccaaatttaaatgattgctttttccctccaaaaatccaaagccttcacttttcattaacattgtctcggaaactgtgtaatcgttgagtagttttctccacacatgattttttgtacaagtagtgaggacgactaaagatttacaaagatgcgaggagatccattggacgcagatacggacccttagggtttagatcacatggtttgggacacttgttatatggttgcctaacgaaggaactgagaagtccatgtacgaccagtacgatcctacgaggactgagggggcaaatattatcctaaaattgcctatgtaacatggaacgagacaagataacacgtggcagagaaagaaaatttggtcagcacatggcagatccatgaagtcaaatgctgagcagaatactgagagataatgaagcataatgtgctacatcaaccaaatctctgaccaatggacttgaccgatcagaaggagttacttgattcttaccgagcgacggaggggctacatgttggccgaaacatacgaccagaattatcacgaagacttattctagatccacattaactttcctattcgtgaagattaggtcattatgggtacctagaattgt

SEQ ID NO: 70549 - DNA, 1530 bp, Cannabis sativa
acctataccaacctataattctaatcactgcaacgtaaaccaacatataatttaaatctccagataggttggtataggttgctgcataatgaaaaggattgacaattcctttcttggcttggttgggagattggaaattttattgtgtaatgttttggctttcttttttaagcaatggaaagggaaaaaaattgctcgttgttctttgtattaggaatcatgaatgattaaattgttcattgttgcatgtcatgagagcttacctttattagtaaaaatcgagagataactgtgtaactttatacacatggtagagtgatgtttatctttaatgttctcatttatattgtttgcagcccgactctcaagttcatgtacactggaaaggagctgctgaaatagtgttggcttcatgtacgcagtatattgatgagagcaatcaggcagtagccatggatgaagaaaaggtttaagaatttggttgcattttaaagctttaattatttgtatatgtttgcatttatgtatcactagtatatggtaggggttgggctttcgtttgcttccaatgtgactagtaaaaaggttggagtattgctattaaattttagatccttccacactctcaaaatctcatttcattcatctattataatttgtaattcttgtagacatgacgtttaattgtttataagtttccaagtagttggcaagatctttttcagagttttctctcaaccttccactttttttcttcttgtttaaatatatctgcttcttttctaaaattctttttaccatgttctgatggtttggtttcaattctcaagacattttttcccttttaaataacttttttattaacaatttgtctttgtttgcaggctctttatttcaggaaagccatcgaagaaatggctgcaaaagctttacgttgtgttgctattgcatacagaacatgcgagctagaaacagttccaactgatgaagaacaactttctcgctgggcattgcctgagaatgatcttgttctcattgctatagttggtattaaggtatttggtcctaggaagcaaaattggataatgtttcatgtccttgctgcttttggcaatttttctgagattcgtcatggaacctacataggaatatgctagattttcctgccccccaaaatattgtcaccactctattttgacaccatataatcaatatgccctccttaactgctggctaatcagtgtttcctacatgtctagctgattgtattatgcctattattttacttaacttcctgattcttgtaactttaaatgtcagcaaatacactggtacttttcacattggatttcttgttcatttgcattgttattttccctttttctgttgtatgttatgtgttagcttcttcttatcgcatatgtacattgcaatgcaggacccttgtcggccgggggttagaaatgcagttgaactatgccaaaatgcaggcgtcaaggtattaatcactgatccagtttctaggcataa

SEQ ID NO: 70550 - DNA, 1531 bp, Cannabis sativa
  modified_base (425)..(444): a, c, t, g, unknown or other
gcctattattttcgtttctttggaaaggtcttgtaattatgagcaggattttttaacatagcacaaaatcgacacgagtttagaaagtacgagcacgatcaagtacaaaaaaatataaacttaaacacgacacaatatttgtaatataaatataagcacacgacacgataaaaaaaaatataaatttaaagatgacaagtacgacaaacttagaaaagtaagtacgaattaaaaattattaacatgtgttatatatgctcaaatggtatgtattaatcatgcaatataacacgtaatgaattaagaaaaagaaaagcatacagatttttattacgtagtactagcttctgtttttatttattttattttagttttttttttcttggctataaaatattacatgttacaataataataataataannnnnnnnnnnnnnnnnnnnataataataataatatttttttttaaatgtaaactctaatatataattccttaatcctaatattatagcctataagagataacgtatttttaccgttgttcatcaaaccatccacaactttccgaaccgcaccatactaaacaaaaaaaataggcttacaaactttcatagtacgattttggtttgtattttagttgaattgtgtatatgttgtgtgatttaccgttttacatttaataattgtgattcaaatcaaaccgcaatctcatgtgtataaattatctctttattaggtactaagttgaattgcaatttatgtagttacttatgttcttaattttttaagaaagtctctttattacattgatttgtctaatttgtgacatattattcatatacataatatcataaaatcttatttagaagaaaataagtgtggtcacaataaaaaatacaaataaaaccttcaaaaaaataagaccttaatttgtttaaaattttacaatacacttccttgaaatgaatacactaatgcagttttatctgtttctatttatacgttatagatatttaagacatctgacaaaattttaagaaattttaaaaaatttaacaacgtcaaaaataaggttcaatgaacttgttgcacgcatgattttttaattttatttagaataaacttttcggttggaagtcaaagctctttttttctaggggtcgggaggtcgtgttgaaatcagttattcagaccatccctatgtatggtatgagtctgttttggctaccagttgacattgttaatgagattcatcgtatgtatgctgctttctggtgggacagtgatgatgacaaaaagaagatgcattggtgtacgtgatctcagttatgttggcataagaatgatggtggtatgggtttcctgaacatgtgtctctttaatcaatctcttcttgctaagcaagcggtccggttgtataatattcctgattcattggctgctaaagttatgaaagggttttattacagcaagtgctctttcttggacgttgaagaaactatgcaggcctctctcctttggaagagcatt

SEQ ID NO: 70551 - DNA, 956 bp, Cannabis sativa
ttttttacaagtaaattacaagtaaattaataattaaggggttttgccgcaaattactcttgtttttttatatgttcaactcgagatatgttgttcgaatttagattgagttactctcttgggctaattatgtagaatttcatgatctatatatttatatcataacataaatcaatacagtctattaaatatattatgtctatttatctatagatgattaattaaaaataacaaaaataatttcagacattttttgtaaatattataatgtaagctaatacggactatttgttgttagaattttatactctaaataagctcatttcaatataatcttatattgctgtcaatagaagattagaagtcatttaagtttacatgtagttttcatgtttatagttttaatatgcaatttctgtaaaatccagaacatatagttattcacaattacagagatgccatcacagtggaaagtaattgtgattgtatgcttcaaaatttaagtacctttttattgctcacagtgcggagaagaatctgaaactccggaacatgctttatttttctactatatatggtttgattccaatgtgatatcggttgggggtatggtcggtgcttcgttgttgtgtacatggaccaatgccgaaaattctcctctttctcaatttgaaaagttattcatgagtcttttgaattgataatgattaccttatggtggctttggtatgatcgaaactcagtattttttggtaataaacagtcaagattagatgttgttccagagttagctcataatcacctgtcaaaattcaaagagcatatttgacggggtcttcatttcggtttttttgacatggcggtcgaatttcggtttttgaaataaaaaaatagttcaaccaaaaaactgtcaaaaccgccaaaccgaaaatcgccaaaaatcgtacggtcggttt

SEQ ID NO: 70552 - DNA, 1676 bp, Cannabis sativa
tctcatctgcatgggattatttatcctaccctactggatgggaaaaataatctcagatagatgagattagctggattagttattcagacttgccatacttaaatactggattggacaaattaacctgtctaatccaatccaatcatgggtaccaaatgggccataaagtaattataaatatgcacgcactaaattattaacacttttttttatcatattggtgtatatatttagtaataatttatatatatttataaatatacaaaatatatatctgcactaaaagtaaaacattacatccattgagtaggtgacttttttaaattattggcagatgctagagcctaaggtgatgaatcttgctaactgatctcgagtgagaagcttctcattaacagcttgctaaagaataaatcggtgtttcggaaccttcaatttgtgccaaattgtcttgtgataagacactttctcagctgaatgagcgagagataaaacattttagctttgaatttcccagaatatccagctgctattaacgcatctttatcaattgtattcctcagtatcatgagttttttaaaataccagctagtgtcagctgggttgaatgtccataagtctcggttctttatatagatgcaattaatccatttgacccaaagggaatcctgtttagcagctatggcccatacgtacttagccatgagagcaacattccactttttaccttccctataaccaatacctccatagtccttaggcaagcagacttgactccaagaggtaaagtgcatcttacttctattacatgtctcactccacagaaaatcccgacataacttgtcaatttcagaagtaattttttgtggaaggataaagatgcccatccagtaattcctgattcgcagtaaaactgattggaccaacagagctcaatctgcaaaggagaggtggcgactcatccatccatgaatcttcttaccaatcttctccactatacctccataatccgagtctttccatttagtaggcctcaagttaactccaatgtacgttagcggaaaagaaccttcagtcaacttcgaggtatcaaacatcagcttcttacaattatttttactaatattaatttgtaatgtaaaataattacatgatgaatgagtgtaatgcattaaacagaatgtgaaagaggccgggtaaaaaaatatcgataaagattcgtttgacatgcggcagtgttagatagtattatataattgtatttatattatattttaatataaattatatgtagtattaatttttataagtatatacatatataatattttactataaataaaaattaaacattcaactatataaaaatatcacatataatttaatttaatataatataatgggatttaataccatgtcccgaacaaattctaaatctttatttacatttattcaattacctttaacagtttttttttttttgagagagaaaatcttcaatctagcatattttattcaatatcagtttttaattaacgtcgctagtatattggcatcaactaattaaacatgcattatctataactatataaaaatgagaatgtgggtttgggcttcctacaataaattaccaaattgtccttattttttttgttaattactattaaatcctcaca

SEQ ID NO: 70553 - DNA, 1152 bp, Cannabis sativa
atattttttaacttatttaaattggatctaattatatagtagatattaaattttacaatttgacatgttctaattactttcaattttctaatcgatacaacgtccattgaatattggattgaattagttttattcatcaaatatatttcatatatatctattaattttaattcgtgtttattaaatattttttagattgaatcgaattcattcaatattagatccattctattaaaaaaaaattagagtaaaattttaatattaattttaatatatacatatatactttatgtataacaacataaaatttaattactcatctaaactaaataaaaatattaagtttgattggatacgatcatctaaactaaatttaattactttatgtattaaatttttgaacacctcatctaacattcgatacgatccaattgaatattaaaaaataacatccaatctgattggatcacaattggatatccaatgtgtagtgatcgattataattagatcagttaatttttattagattgaatccatttatgcacacctctatttacgacctccttagttttgtatcaaggttgcttaccatccaaaaaaaaaaaagctacttaggtattacatataaagggaggtgattttgtcccgttatgccaaatgagggaatacaatccctgattgtactgtagccgttggattaaattggggcatgatctaaggcctggggttaaagtagcggtagttagggtggaaaaaatggcaacctgttggtattttaaattaaaataattattttttaaaaactgacaacgattgatgattgatgtactgacagctaccatttttcaaaatacactaaatatttgtctttccttcttcttcgtgggttcgtgggttcatttgttttagggcagagtcatttccttcttcttcttcacgtttccttcttcttcttcttcacatttccttcttctttttcacattttcttcttcttcttcacattttcttttagtaaataaaattattttaagagttggggtaggaaactgcagtactttcagagttactgtacttcgtattttgtgtctccggctctgtctccgacctcggtgggtttgtacaagttagtgtctccgaatgtaccaatttt

SEQ ID NO: 70554 - DNA, 2523 bp, Cannabis sativa
gttatttctgatcttttttaataactaaatctgattatattgaaatgagttttatttagggaacaaaacccagtagtaagaaccgacaagggtcacgaaaaggaaacaactctggtgcttcgacaagttagatttaaagattgaaggaaggaaacttcatccaaatgatgagattcctagtttgaagatgttcaagagcacgagatgaacccagaattctacaaaaatgtcgagcacataatttttgagtatttatcagtaaaaaatagtgcaatttgcaagaaatcatagattatggtctgagaatcaaattataactcttgatctctaaaaagaaagaacaactcatttcataaacccaaaatgttcacaaaaagaaattaaaagaaaaatacataaagagtttagggacttactattgaagattgctgagaaggtaactcaagtagaaatctaaaaatgatcttagaatcccttgaagcttcgaataaatctgatgatttgagagaaatggatttttgttctgaagtttttgagtttcaaaattactagaagaatagaaatgaattcaaaaacccttcttataggttactaaagaggtattttggtaattccacatattaaattttattgttttccccccaaaaggtagaatcagtacactgaggggagtataattgtaaccatgcggtccaggatgtgtttttttgaggtaaagcattaaatgctcaaatataccaaggagcaattttgttcacatgcttcacagtccagcatgtgtcagccattcacttaacacgtgggcttatcaattccacatacgaacagaaagttcccatgcggacttggggggaaattgtatcccaatttttgcacagggtgacagggcattcatcttggtgaaacatgtagaacgtttaacacctgggcaagtagtatggtcctcgttatgtttttcatactaattaaaatatctagacacaacttatctgaagattaagctagaacatccagacaaggtaaatgacaatgtcaaactagcgtcaatctcgtagcaagcccgcatacactggccaaggtaaatgtggttgaaatatatttagagatattttctttttttaattgaatccaaattcagtgggatttccacgcattattgttttaaaataggaaaccttcctagtcttcttttttttaataattatttgttttgggaaaccaaattgatgtaatttttttcctataaatattggagccattcaatttttcaaggatccaaattatgattttcaagagagctctgatgttgttaaaatatttgtaagctttcgagagagatcaagaaagttaattgcttcttttctcacaagcaatactactaaaatgagagtaggctattaccactatcacgaggccaaacttctataaatctctatgttcttattgcttaatataatttaattattattcactcttattgatttaattgactcatcgttgtttgctaaaagcaaggtcaacatagtggttacaaaatctaaaaattgtattgtagcctaaggttaacatttgattatacgtaattaagtgagttattacacatgaaagttatgatatgaacgggataagtttttagcttttagaagctgttacaatactcatttatattatttaaataggtgttgggatgttggagaaagatttggcttagagaggagttacaaaactcagtattgagttttgtggaaataattgctatatggttgatgacatgttatattatggttgttctccttcatcttgagcaagcataaataatgtggattaatgtacgtgactttttttgagtacattttcatctctcttgtccagtattttatcccaataaacaccagttaaagtgctcgtatctgccatgtggtgaaggaattttaattttcatatgtgatccctaaaacactataaatagaggtcttttgttcagtcatgaatacacatgtttctatcaagagagcacattgctagaaactctatttaggctaagggtgttcatctgatctaatctgcactatttttctcatagtgcatccgatctacactaactagagattgaatattttggatccaattcaatccacatagtatctcaaatccaatttgtaaaagtgtggatttgatcagttattttgcattggttactttttaatattgaattatttaacatttattaatgttttttttacataaataaaaacaaaataaaacaaattattgttgttttatgtatccaaaaacaaattaaatttaataaaataacaaataacaaattcaaagtaagaaaaaaaaattgtatgtgttgagaaatatttaatttttttttagattatgttttcttacaaataagaatagcatatacatttaatctactatgttttgaaatatatttgtatcatatgtattatatttttaaattactattttttacattataaaattaggtgtatacataattttttaaaaaat

SEQ ID NO: 70555 - DNA, 1334 bp, Cannabis sativa
taaacggactactagctagttagctagtgtgatgtgacgtctcgggaaatcggggcgttacatatatcctaagaaatcaagttttaggcacccaagttgacgtttaatgtcaacgtgagtgcctaatggtcaacttgacctcgtagtcactttttgtagtgcacaccgctcagtaaaatagccataactcactcaatttttatccaagtaatgtgattcaagttgcatatgaaagctcttttcaatacctaagtgtatcagacccttgcaaacgtttatttttaattcgagcccaaatttgactcacatgctagtgcaaaaattttcagcaaattttgtgcaattctttttattattttattgtaatttaattggacctccttccctataaaaggagagctctcctacctcattttacacattcctcattctctctaaaaggttaaagcttctatctcttcacattttctttcttaaaattgtaaagtgaaaggagacttattcattttttctcgagttttcttcttaggcaattagcttttgtgataataaaagcttcaagtaaacataatttcattaccgttgtgtcaaggggagttaacttttataatctttgtgatctcctttatttttcagttcataaatttattggccgctaccacttattagatggtatggagttgatcgcttttcaacgtcaatatatactataatattaagaaagcatgagcgttggtagctttatttgggtatgatttcaagttttgtatttttctactttggccaaattattgtataagtttatattttttttattttttattttttgctaaatttttagttaaatataattgataatgtcattagaatattgtattgtctttttataattatgtatacactagtaaaaaattacgtgcgaggcacgtatactaaattttatgctacatatttttaattttatttaaaagtgatacaattaataattgaagaaaaaatattattaagtggtgcttaatgcacgtattcttagttatatgtttaatttatttaagtatatttattaaattatttttatcatatactttaatggttatatcaatttaattaaattaatattttaatattaagaaggaaaaatatttaaaagttagaagtatgtatcataataattcaacaccaaacaagtgtcatcataattcaacaccaaacatcagtgtacacttgtaaaatatattccaattcaatataagttctgcagcgctttcaaattaagtaactgaagaagaatacaataataccaaaataccaaaaatcaatcaataagattacaa

SEQ ID NO: 70556 - DNA, 2511 bp, Cannabis sativa
ctagacaagcctccttagatgcattctccttataaaataagcaacaattatattcacagacatggatagactcataacccaaccctaatttcttcaatctctcttttgcctcgtaatatgttgttggaatattgttttcctttgaaaataaaaacttttacatcctcaacaattcatcaaagatgttgttagggatttttcccctaacttttaaatgcaatagctttgctaaaaagttaagagacgaaatgcgatcacaaccgggatagaattcagcttcaatttcctcaaatgagtcatcaaaattttagtttatagttggttattcttttgctccttgtacatcctttgttgtcgaaggaaagaagtcttctagaataggtatcatttcatcctctaattcaatattgacaaccgctacctcatcaacaacatcctctggctcctcgtgataggtccacttctcatatcctttcataaaacctcgatcaaatacgtgtgctctaaccctatctattttttcaaacctattatttaaacatctcgcacaaggcatctaattcttccatcagaatcgttatactatgatgccattgcttaaaaagcttgtagaccattccaaaattcatgacaaccacgatttctgatttcgatccaagattcatcgattgtcgccatctacaatgtagtcgacaaatgtagtattaaaagtttgaatcatttgtaaagtgttaagaaagttttataaaaaaaatttattgccatgtatatccatcggtattgtatattacaaataaaatgtagaacaattttgttctagactttatttataaatatacaaaagctacagtatatttttaaatataacaaagctatggtatatatttgtaagtatacaaaagctatgatatattcttttcaaccattttttattaactatatttgtaaaatattatgaattacacacatattatttcatcttttaagtataacaataatattaacaatttatttcataaaaacttaaataaacgttttattcatttaattacaatttatatttaaattaaaaaataaacaaattcctctttataaaatttttaatttttaatatttaagttatttattaatttatttaaaaaataacaaatgactatacttattttctaaaattaaataaatataaattaattatttttttcaaaaaattaatattattttaaatttataatatttattaaaatttaaactaattttttattttactcttaaaattaaaagtctatctttataaattaaatttataataaattatactatttttattttttcattattctaaattttttatgataataaaataccaatataaaataatattaacaaattatttcttaaaaatttaaataaaagttttattcatttaattacaatttcataataaaattaaaaaaaaaattattctatttaactttctaatttttaatatttaagttatttattaatttaattaaaaataacaaattactaaacttactttctaaaattatataaatacaaattaataaatttttttaaaaaagtattatttattaaaatataaactaattttttatttaattcccaaaattaaaaatttatctttataaaacaaatttatattagattatactttttttttcattattctcactttttgtatgacaataaaattataccaacataatataacatctttaacatactcaataaaattagttaaatcaaataaaaattaaaataaaacaaaaaaaaatatacattaataaaaatatacatttcacaaaagaaattttgtgtacaccttcttgaagctgctaaagatccttttgtttaatctgaaaataacaaaactaaatactttcaattacagaattaaattaaaaaaataaaaaaaaaaacatacaacaaaaaatatatatatataaataaactgtaaaacatatattctttttttactaaagaagaatttcattagtcaagaacaaaaaatacaaaataagcctcaccaaccgtctccaaccaaacaacccttctcatttcatcaatcgcttatacaaagcatttccttctaattcatatttaatcctaggcatgttatacaatctatactttacaatatttttaatctctttgactatatatcccaccatataacaagtgctattatgcacacaattgttcctatttttccacacaaagtaaactgtggcagcaagaatcatttgtaaaagatgaattgttttgcttgaagtcttgactgaaagcctattcatccatcccaccttatgcttagcccaagcttcaaaccaaatccacctaaaaatctcattcagcacagcagtagataactcacaactaaaaaataactgttcatgactctccaatttagcacaagaaatcgggcaatttatgttctctaaagcaatgtgaaacttgtaaaatatatctcttgtgagcaagttactatgc

SEQ ID NO: 70557 - DNA, 539 bp, Cannabis sativa
aagcttggtgcacacacgcaccaggagcttcggacaagaccctcttacgcgcgcggataggggacaaatcccgtgtctaaagctcggtccttgcccacgttcagacacgatgcacgtagttgaccgtgcaagatgccgagaaatctcggctgatgaacctgctgcctccttcgtgcgcgcgcgggcaaggctgcattcagcctatccttcggcaacaagggtgctttgcacctaaaatcttatttttcgataatttttcacctaatttcaaattttttcaattttcaaaccctaatttcaaaatcaaaaataatttttaatatattgatttaaacttaaatatcaattttgcaaatttataatattcatttttaatagattattattaatttttgatattttgaggtttaaatttagaaattaatcattatattttttaaattatggttagattttaaaaattgcggcataaatactcattttgttagttttgttactaataaatacccaaatcttaaaaatagtagcataaatactca

SEQ ID NO: 70558 - DNA, 1313 bp, Cannabis sativa
taaaattatataagtattcccaatgttatgagaacaagtatctataacaaatcaattatccttctaatttggaaaaaaggcttcacttatatattttgtgctctattttgaaacatatcataattttatgataacaaataagtgaaacttgatgaggtttatgtcccggtggatggcatcttatgtggcactcttagaatttgaatgaagcttttacatatctttttggcatcttatttgaccttcttagtgttgaaacacagaaagtgaataacttgatcaaacttgttacagaataaagaatgagtagtctcacaccaagaatggcaataccacttttctttgattgtagcagacactttcagattagtgcaccatgatagtttatataatttaaacatgcgttaagagtgagaaagtcacactaaagaaacactatcactgtatattatttttgtctcatctgcctaagtttgtaggcaagatggtttcttattaatttgtgctaattgggcagagcctttcactcgtccatttttacaatttgttcatcaaatttttgcccagctatttggcaagagatttgtatcggccatttcttaactccactctttcttgtgcttttgttctggcgatattccttggttttgtgtgttattgattattcccattttgtgttctatcgtgtgttttagtgtaatgattaagcaattgttttagttctattgctcttctcactgttttgttaattttgttgttagttgttgttgtattgtttgtgttttttatatggttaatcgcaaatttggttcattgtttgaattattttcgtgttgtgttgtattgtgtattttttttatgtagtagtttacttagttttgtattattgttttggtgtcttatgaagaaagtagtttgcttagtgtgtttattgtgctcaatgattaaccatattgaaaaaaataaaataaaaaaataacacgtccatatcttttcattcctttcttgcattttgttgtgtaattgagtaataatttttagaatgttattgaagtgataaaattacgatgaatatatcttttttcaatcacgtatgcataattttactaacataatatatattatatattttttttttcaaatataacttgttactaagtaattgtttgttgtatatttttactcatttggttgtaaaactagttctatataatttatgcttccttattgttgaaaccgattctctcattttttttttttaattagaacaaatttttgagttattgtttgttatttatttttactcattttgt

SEQ ID NO: 70559 - DNA, 977 bp, Cannabis sativa
  modified_base (913)..(941): a, c, t, g, unknown or other
aggcgtcctgcttggcctatcgttccgagcagatgctccaagtggactccacgtgtcactattctcgtgatgccacgtcagagtaccaaatttgggataacagaaagaatatgagaatttaggagggagttttatcctaagtcgaatggtgctatagtttcaggtggtaacagagtggtcgatatccttacaaattatggggattgggatattcagaaattaaattacctctttgacaaagaatatgtttcgaccatcttgaaagagggtagaccctccggttaaggtaaggataggtagattcggaccaaggagagtattgggcatttctcgtgtaaattggcttatctcattcaagctttagaaatggctcctcattatgaagttgcaccatctttctagaataaactgtgaaatagtatcatattggaatgccataagatactgtggtggtgtatcctctctaaggccctcccagttcgtgttattctttctaagagactccatttagaggatgtgacctaccccttggcggggtggtgagaaaacgttggagcacttatttctcacttgtgattggacttttcatttgtagcgttcttcccagtggggtatgtttcctatttttgggtttggcattcgcttgtgggactggatcaaattcatctaaggactaggaaaacaaggcattaatacagatgaattattatttctatatgcttcgattgttgttgatacaatttggcagactcggaatgacaaggtacacaatagaagtctggctaatgttaatcagtctattgactatattcattactcttatgcagattacagtgcttgttttttccctactccttcttcgtatctggtagttggatggatatcttcaaatccgtaaatctgtctatattgnnnnnnnnnnnnnnnnnnnnnnnnnnnnntttatttaagccattcaaaatatctttcttgatata

SEQ ID NO: 70560 - DNA, 1381 bp, Cannabis sativa
tttttttatatataattgacatttgcaaaaatacggtttttcaaatactgagttgtttctttttgttggtgtaagtattcctgtaatttcttattattacttagcgactttcatattatttattaaaataaactatgcaagactcgatattaatatgcaccaataactttttgatacctcttgtggtattgcttgataccttaaggtacctcttagcattttttctatatttatgtatagataaatacattaaactaacataattattaacctttagctctctatcatttatcattaaaatagtatttttaaaaaaaaaagtaatgaaaaaaagagtacaatagttttctaaaaagaaaaataagtatgcaattccagtgctgttgttgcattaatcaaatgattaagagaattaatccctataaattaatattgtgatgatgtttataaactatgtaagtttacttataaaccaaagttttagggtgttgtcggtggcttctgaggaccctggttagtctttagtagctaggctatgatggagcttgttgttttgaactttcactgtcttacattttgttccaaaaggctattgtttcttgtccttctttgcttattttaaaattccacttttaactcttggccactagaaactatagcctccacaatcaagtgcttaatgtgtgttttttattattcttcttttaataaaacttaattattactacactaatgtaatgtcattacaatatcttactttttacctgtttcctactaaaactttggacagctttagttctttctttattttatgaggccatttatataaaatactacacatatccatgtaaatatatagaaagtttgttgtattatttttgcttctacaagcaagtgtacgtatcatctagatggataaagatcctatagcacaattttataattatttattaatatttttaaaagaatgtgtaatcattataattatagtatgcatatttgattatttttcttcaaaatttttaattaataattgagtaatttgtgacataaatatttaagtttaactttcgattatagataattaaaatttaatttttgacggtaatattacttaagttatatttttgaaatttctatagtacttgaccattaagtgttaagtcaatggtcacttgactgtcctgatctaagtcattaaatttttattatttaaaaaattaatttaaatatactaatagataatgacttgacacttaacagttagcacttactgaagttacataaatataatttaagtattattatcataaaaaattaaaatttattcttaaatatttattgacgtaaattagtgttaattaatttagtgtttaaatta

SEQ ID NO: 70561 - DNA, 1944 bp, Cannabis sativa
  modified_base (499)..(504): a, c, t, g, unknown or other
tttgacagtgatgaaatggatagtgaactgtgggaagagatgttcttgacaagggggaagagatctgggaaggtggtggtggtggtatgttcgatggaggtttgggaaaggggtggtggtggtgtcgtgcgaagagatctgggcaagggagaatcggcgtgaattgggtgaggaaaactgatatagggaaagctggtggtggtttgggcaagggagaacgatgatggtagatgtggtctgaggcagtgagggttgagttgagtgaacaacgaaaaagaaggaagaaagaagaaaaaggaaaaaaaaaagaaaaaaaagaaaaaatttattttttctgattttaattttttttatatatttataaattagggtttttttatttttttaaaattgttttttttttattttaaaatttttaatttttaaagaaaaataatttttttatttattattttttaaaataattattttttcatttttttaaatatttatttacgtnnnnnnataaaattgtgctacgtgtacactgtgtacacgtagacattccaacccgacacttaacacttaaaaatggatggaaatgggtaactgctaaaaaaacttaggtttagaaagttttaccaccaaaattttaaaattgaaggttagttacaaaaacctaatcacttaaagaggttatgccgcaaataacttttaaaaaaaaataaccaattaatgagagggaaaggtgactcacttgctagatatgaaaatgagaccagattttcaaagttgaaggtacccaaattaatcagtccgcgcgtgacgtctcgctcttgccaatttacgtaccccatgacattgcatgatgtttacgtaatcctaaccattactttgtatttgattaattactattaaaatctgaatcaataattatttatctataattatatgcttaattcttccgttctacattatgattacttttttttttcctttcatctttgaagtcactatggacgtttctagtagtatcgtaataacttcaattttttgataaaaataacagccacaataataatacttatatatatatatatatatatatgcttatattgggtattacttaagtgcaagtatcacttttgtactcacaaatgaggatattttgtaatatatgtagagttacttgttatatactatatgtgatctctaatggttattatgtaaaatggtgttacactcttaatttgaatttcttaatactatagaagttatggtgtgtgaatgagttatgatcataaataatatatacaaaggtttagggagctcatattgaaatgatgaagtttctttcaaaaaagtattttgctagaaactctaggcttgataattctcaaaaatatttcttaaaaaattccttagtacttagagatagggagaaataagtttttcgacaaaagtataataccttgtacaagtcatgatgattcccactaatctacactcaaagttgtgaagactcattgaattcgaaaaaaaaaattgaaataaaacaaatagagtggaaacactccatgtattaattaacccttttacctttctttctcccccaacactctcagcaactccctctctttctttctatctttctttctctctctttaaaaaaccaaagaacccataactaccaccacaactattacaaaactcacctatagaggcaatcattgtaggtgaataattagaaaggagaagctaaagcatagatagtgagaagagacatatgacgtcggttatttggtaataactgacgctatagatatacacacacttatggtgataattattaccaaataactgacgtcataatgttatatagccctaattgaaggctcatttcttcatcttcctcatttttcttctcagaccaaaacctttaggggccgtttggtatgcaggttt

SEQ ID NO: 70562 - DNA, 1470 bp, Cannabis sativa
tttttttttttttttaacttctttagtcttgatcaatatttgaagttagtattttattttgaaattgtatgtgtttcatttattatttgataggtagaaattaggcttgtgactggattttagtagaggaaggatatttcatatattatattaaataggttttgcatctagtgaaaactatattttttattttcttactcggagaaaaaatcaccttgtagtagaaatggtggtaaaataatttattcctctatccggaacccttatggtttaggatgatgctcttatcctcctttcactctattctcgttgttccaaatctaactgtccagagtgattactccttgagagttttgactcaggaggtaaggtttaaggggaacctttccaagaagttataggggaggattctttcgatctctgctatcttgagtaattaactgcttagtattttctgtcttattatttttaaaatctgctatggccaaaggttatcatcatgaagaggtggcagttgatgaggaagacaccgctatggaggagattgctgctccaaaaatcgtattgaattcatttcaatgggagatggaacaataccaaaataaattcaaaattatgccaacctccggaagtatgagacccaaaggggtcttcagagtgttccaggcttattctggaatagactctccattcggggagagcttccaggtcaatgcgcggaaggaggcttcgacatttggagctggggccatattgagatggaagcgcatctgtcgctgaggagctaatttgtggagttctgtgcgatagccagagtggcaccattctaattcatcccgtaagtttacaaattacttgtcgaatggtacattctgtgtaagtagcagaatgtggttgtcattactctagaagagatcttgtatttttacaggattaagcctcaaaatatgcacaagcataaggataagattggcttctacatgctagataaacattccaaggccttgatctgcctagtaagcacaatgaagcacacatatgacattcaggaatactggttctacacttctgatttcaatattacgactaagagcagtcttttgctaagctttttcctttatattatatatttttaattttctttccatttcagaaatttgattgagtctattctattttgttctgttagactcccttccttgttcactcatgagtgcagatctctcatgtttataggtctacgaatactgatgctcataaataaattaaatatgctctctttgtggacacataatatttggttggaggatacttcttttcccctattaagtgttgtatcttgacattgttatttattatgatattttctttctaaaaaatgtaataataaaaaaatatatatgttatgaaatttttatttgatattaatgtttaagaatactttctttcaattagtgcatgcatgtcaag

SEQ ID NO: 70563 - DNA, 1654 bp, Cannabis sativa
ggtgtaggttaaattagtaaaatcttacatcatataattatattagttattttttttgcaagatatcccttatgtgccattaataagtatttttttttttttttgcaaaatatcaaaagaataattaataaaaaaaatgctgatatcttaagaagttaaacatcatgtgttaaatcgatattagtgcaatttaatatcgagtttcacactttttgattaaatcaataatataggaaaacgcaaactactcacaatgtgatacattagtataatattaggcaacttagagtgcctaatagcaattctcaattaataatagtttaattttaagtctatccaattatttgagacataatatggccctagttaagaacgatgttatgttattatgttgagaagttttatttatttttagatgaaagaattgtgtaattaattatgtggcagccaataatttcaactaaaattagatcaaacgattacaatttaaattacacatttttttaatcaaatacatataattgtgtctgtaactatatcttttagtaaactacacaatagttttgacctatatatttatgtatgtaattttagtgaatgctttcctctttggttgatgtgattaaagaaaggaggacattaatccaagcttcttaaaaagtttgatcaaatatagaataaagctattagagtgctttctttgcaacttgcataaaagaaaactcataatgaaaggccaagaagaaaaaattaaaaaatctaaatataaagttgagaattatgtcatataccaattaaaaaaagttaaaaaggataatgatattgctcctgtatgaaacttttaatgcccaaatgcgtggtatagaaaatgatatgtgcaaagtgacatgagtgcactaaactttacatagtaattgcagcagcaacatttgtggtcgtaaaacccacaaagccaacctaaaagagatcaacaaacacagtagtagacacatgaagaaacatgaattgtatttgtttatttatattaacttgttcttttgtcatttatatatacctgcctacctttgagatagtgatcttcataaaccccattctttatatacatgaggccccatgtggtcatttaactatatatccttttcattttcttttctgtaattgatatttatcaaataaattatacaccttatatggagatgaacttttccattacagtctgaatttcaaacatcagatcatatcaacttttaccctcattaatcatttcagtgattttgtatatttttactacacaacagaccacttgggacaattatttcttttgcattaaagtggaactttaaggccattacttctaatctttggcactaagtgagtcaaaatcattatgaaaaaaaaacccattgcaaccttcaaaggtcgagtgtaatcaatatatactggttacataagctataaaagcttgaatcttaagttcaaagaaaatatattcacaataaagcatgatgctctaccccaatgagaggcaatagtatatgccaccatgaagcagaaaacagcagtgagaaaagctagacttggacttggatttggtaaagagtgtcaaagaagtaaacaaatgattactaaaaatgtattttattttattttttct

SEQ ID NO: 70564 - DNA, 901 bp, Cannabis sativa
atctcttaaatggtcaacttctatcaaattaagacgaggtaagaaaactcatgtataggataccaagatacactattaaagaaggaaagctataccaaagaggaaattcaatgcctctactatgtgtgtattacaaacaaaagttgagaacattataaagaaaatccatgagggtttttgtggttgctggttggtaatgtatgttaaataacataatatgacaaggctattattgccaaccatcaacaaagacacacatgagtttgttaagaaatacgataattggcaaagattctcacaaataccaagaattccttcaatagaagttcacatgatggccttgccctatccatttgaaatttgggagatagatataattgggtcattaccaacagggtgaggaggtgaaaatatgcatttgttgcagttgacttcttcactaaatggactgaagttgaacccttagtttcaattacatcaaagaaagtcttggactctgtgattaaaaacattatatgatagttcagtatacccatcaagttagtgccagataatggaactcagtctgatagcgatttgttcattgattttgcgagcggaataaaaccataaaaaaaaaattcacctgtctcgtgaccacaggaaaatggactagttaaagcagtcaataaaacctaaaaggcgctagtaataagaagctcgacgcgttgaaaggaagatgagttgataaattgccacaagtactttaggctcatcgaacaactaaaaagattgtaacgggacatactcctttctcgctggtatttggcttagaagcaatgtttcctatgaaattcaatatctctccccatagaggagagttttacgatcaggataaaattaggaattacttagagattct

SEQ ID NO: 70565 - DNA, 1501 bp, Cannabis sativa
aaaaaaagtataggtaggtaataataatggtgatgagttaacttgtcactgatattatctgatatgagcagtgttagtgtagtgggtagtactagtagtagtagtagtactctgctctcatttctcatctgtcataatcttttaacttctcattcacgtaaatataccaaagaataagaagcacagggaggggctcactccttttactcctatgattaagagattgttattccatactagtcgtgtccaacacattttataaacactctacgattttggttatcaatattttttgctacttaattatactgataataatataacatcaaaaaaaagttactaggcactaataatttattttaacaattttttacaaataattattaattcattaatttctttcttttttttttttcctttttcaaaagaaaagagagaaaaataatgaatactatttgatgaaaagagagaaagactgttcaaatatagactactacttacttcaaatagtagctaggtgggttggttcttcaactatgaaaaatatacatctcccaatatttttttatcaacttattctcttatttaaggggagtgtttcttatccttacaacataatttttataaatttttaaaaaaattgtgcatagctttcgtgctaaaaatacatttaagttttttgaactcgcgtagtaaattaaaatatcataaactttattttttgtattataaactacttagaattttttaaaaatttataaagatgatactataactattatgattacattcataaaaaaaatttgagaaagaatattccaatatatgatttcatatgtgaaaattgactaagaaattacaattagcacttatcttattcttaataaataagaaaactaatattcaactttctataagtctaataataaccctttctattaatctcgctataaaaaaaattgaataagtaataagcacaagtagtttctagtatcttatatcgttattattatataatttaatgtaataagttttataaaatatcattaattaattgtaaagtgctacctcaaagtagtattataaagagcatctccaatgaaaattgacttttaatagttaagtactccaaaaatataaactatgtattattttattaagtatttagaataaaattgtgtaaggaccaataagacaactattttttagatgccctctagcaatgcttaatttgaatttgaaaactgatctagtttcaattgtgggcccacatacaatttattaaaaaatattttttttactatttatatgaacacaaaaatttggtgaaggccatatggtctcatctcctcatccatcacttttattattcgtatgtaaaatttcccctttcactctttttttttcttttttccctataaatccaagtgaatgatgtgaagtactactatcttttcagacaaaattcccaaataaacatgtttactaattaattaataag

SEQ ID NO: 70566 - DNA, 1529 bp, Cannabis sativa
tgaattagaaaacttgctagctgaccaagaagcgttagctaagcaaatgtgcctcattaaagagtgacgaagaagcactatttagtagagataaaaaaggacaacccgaccaaatgctagtaaaaattctagaaaacatgatgacaaggatggtcatcgtgggcgaatgtgtattgttgagtttttaaaggcttatagctgtgctatggaacttattactgagttagcacttatgagagaatataagctcttttcaaagggtaagtcttttcaccacaaagttaaatatgattcattgactaatacaacaatacgtatagttgcaagaagtctaggtttgcaaaaatattgtgctcacatattcttaaagtcttttcctttcataatattgtgaaatactttctcaatacattttaaagaggtggacaaagtatttgaagataggagttacacataatacctttaaaattaaaaagagagatgatcctaaagcatgtttggcattattaataaaaatttgttagaaattagatttttttttccaaaaaaactaaataaatgcgttgcttaataaaaattttattatgcatataggcctagaagatattggattttttttttttttgtttttttttgaaaagagaagatattgaatttgaaggtagccaatcttttaagaatatctaaaattttggcttggtttggtggcaaaagtaagagtatttttgtattctttgatttttaatttaatggtagtaattaatttggttataatgatgtatctcctacaagattaataatttttttttaagaaaaaaaaaaccacccacgtctagtaatacagttctattttttttttttttgaactgtagcaatcatcccacattttccaactgcatttttaaaataataaatataaattaatacactttttttttttttttgagaaaaggatccactattataaattagagaaagtcatttacaacagtagaaaaaatagttgaagggatctcttcaaaccacatacaatcactatccaacactaatgcttgcttagccaagccatgagcagcttggttcgcatctctacgaacatgagacacgcaaacagaagggagagaggatataagattgttaatgtcaatcgccaatcatgaaaaggagataaagatggtgaaggacaattaatagcatttgccaaaattaacgaatctgtttcaatgaaattcaaggcaatgttatgattatgagcccatcgtagtccgaaaatcaaggctttagcttccatctcttggggccgaaactttcccataaggggcatagaaagcgcaacaagaacttgaccctgagaattccttacaatagtaccaacaccaatcttatggttcaaagcatcataggcagcatcaatatttaatttagtagtctgcaatggtgggggctgccaacgggtaggagaagcaacagtcagggcagccatgacagatgaatttttccgagcaaggtgctgctggaaattgcagcag

SEQ ID NO: 70567 - DNA, 1760 bp, Cannabis sativa
gattggattggatcggatactttgtgaacacccctacgtgatataataaaaaataataaaagatttgctcaacaaaatgatttataaaaaaattgaaagaattttattcctaaactcaatcagtaatacttttacagtccacttctttaccatgttatgagtgaaaggaaaaatgtaaagactactattaaagtagcttaagcaagacttactattatctatgaaaattatgtcctcgatgtttaaaaaagaattattcaattattgttcactaataatagtagaattactgctgcagtatctattttaaaggatatagtattgctctaaagaaaatgaattaattggttaattttttttgaaaggttaataaaattttcattaatatgtaaattagacataattctattatttgcagattttgcttatcaagctatttaagagaaggaaaaaaaaccccaacatcttcaattaaatgacctacgagtactaccaatgatatgttgcacctttagattgatgcagtttaattagaaaacataaaaatcattattaaattgcattatatttcataacaccataaaagtatccttagcaatattctatttcttagtcaacaactcaagaagataggttctattttttttattaaaaaaaatccttatcttttgatttgaatttagagtgcatgtatagtcaataacaagataatatttaaatgtggcctttgataatgagtagtttccctataaataccaaccaaattaagacaatttcattaatccaaaaggggttaagaaatggaagaagtgaagctacttggagcttggcctagcccattttgttacagaattatatgggctctaaaactaaagggtattgattatgaatatgtagaagaagatctcttcaacaagagtgatcttcttttacattataacccaattcacaagaagattccagtgttagttcataatggaaaaccaatatcagaatcaactgttatacttgagtacattgaagagacttggccacacaatccattgatttctagtgatgatccttatgagaaggctaaggctcggttttggacaaagttcatagacgaaaaggtaacaaaagattataattagtgtaatattttggtgcataatagtttataataatttccatatcgggttatgtaggaaccaatcttttttgccttctttcaaagtgtgggagaagaacaagagaaggcgacgaaagaagcgaaaaaagtgttgaaagtgattgaagattatggtgttggggagagtagaaaattcttaggaggtgagaaagtagggatggcagatttggccttgggatggatatctggttggcttgaagggatggaagaagcacttggtgtgaagctcttagagcctcaaagctttcctatgttaatggcttggatcaagaattttagagatgttccacaaatcagagacaactttcctgatagagatcagttgttaatctattttaaaggcctaagagaaaggtttattgttcaagcaactatgtgaaaaacagctctaataatagatgcaatttggattgatgtaatgtaaaatgaaaaaattgaagaattggtatggaagaaagacaattagagagatagtgagtatatttccttcatagttgtttggaatgtaagttatagttgtaccctcaagttaataatataaattttgtgtaagaaatgacaactcttttctcttctttcctatttcctt

SEQ ID NO: 70568 - DNA, 1081 bp, Cannabis sativa
gcggaagaagtgagaaaacttagttgggttcatttcatttctttgtggaaattagaagcccttttggggaaaggaaagtatgaaatgaacgtaatctacaaagaaagtggcccgaaagtttttgtagcaacgagtcttgtgactaatcttcaaaaactcgtttcttttacgagacttgtacgaattgatttaacagaaaaattaccctcttttcaaagaacaaaaaaatctatgattctaacttacaagcacaaacagaacaaagttttgtcaactgagacgtttattaattggtaactgaacttaattcgagaaaaaatagtaattaaacttgtaaaacaaatcaagcttgagattgtgtacataacgcaaaataagaatcaaagctagtactcagtgatcgctaagggtcatatcgaaataaaaggtaagaaaaacaatgataagattgaaaattggtggaaggtgtcgcacaaaaattctcagaaaaaacagtaacactgagtaaattaccaaacaaaattatagttaagtgcacaataaaccaaaacacataaatgagccacaaaatcttttactgcctaagagaatatgtttacttaaaaaagacaaataatctaatcatcttcttcaatgaccttggtgcccaatcccttcaatccttcagctgggatctcagcaacagtaactagtgagtaaagctcttccttggcatcttcatcatcattcctcttgcgggctatgcgaaccctaatccttcttgggacactcctgatacctctgctccaaatctgcttgttcagcttaacgtcaacccttacatcattggttcccatagccttctgtgcaaacttcctaatctccttaatggcattgggagccttcttcttgaaggtgctatagtttcatttaagcaaaaatgaaagttagtgccactattttgacaaggattcaaagtatgaaaatcttggtctcatctatcagtctttcacaacaacaaacatagttttcaaaagttatactgacccacctaatgatattattccaaatcaagtctcaaatgttaaaataaagaaatggg

SEQ ID NO: 70569 - DNA, 1843 bp, Cannabis sativa
atatgatatttattagaataatcaaacaccttaaaatatatttttttttggttaatttttttttttttgatgaatcagaatatttgtattgctcacaatcaattttttacaacctaaaggcaccaatcaaggtccataatcttctatacaccagcaatgtagcaccccaagagaacaaaaagaaaaataaaattctataccttatactctgttgtacaatccgccctccttccttcttccttttctttctttttttttacaattgattataccattgcagatcagtgtgtgttaccttcttcggccagcaaagtgaaatcctctgtttgacatttcctctggtttgttgcagcaggatatcaacatccacctgcttttcttcccatatttttagattccgagccctccaaagagagtacactaaaccaacaacagaagcagccaacacttgcttcctaaattcacttattttggccctcccaatccacctaagcagacagggcaaagctacagcagcagcatgccattgcagccatttttttagagcttgcaagcaggatttcgcaactgtacagtcaaaaaataaatgtgcacatgtttcagcatcttgaccgcaaagagtacaagtatcttcatttacaattcccattcgctccagcctatctcttgtttttaatctatcttgaacagcaatccaagagataaaactgtgtttcggtgtgtttaagcgtccccaaacttgtttactccaattcaccttatcccgttgtgtttgaagaattttataacctgctgcaacactataaggggatatatctttaacctcaacaagctctttaaactggtttttgagtgtgacaagtctcctccaataccagcttccttgagtaggcggctggtattgccaccaatcttcattttgaatatagacacaatgaatccattttaaccaaaggctatcttccttgtttgagatggcccatatgtactttcccatagctgccttgttccactcatgaaccttcttaaaaccgagtcctccattagctttaggatgacatagtgaatcccacgcaattgaccccggaccagctggaatagcatgccccttccacaagaagttcctgcatattccctcaatatcattgactatcttttttgggaggatcataacatgtgaccagtaggcatgaatagccaatagtactgagttaatcaagacagttcgggcagcaaacgacagattcctcgagctccaagtacgtattcttgctgttattttttcaacaagtgttgaacactcattcttcgaaatcttctttgcacatatacgcacacctaaataatgaaaaggcaattcttgtaaggaaaaaccagaggcatctagtattctacttacttcagatttctccatgttgctgcaatagatggccgatttctgtgggttcagatggaggcctgaagtttgtgaaaaaagcttcaaaccttgcaagagatagtatatacttctaaattcccctttgcaaaataaaagtacatcatcagcaaaagcaagatgattgagcttgatatcagagcacctctcatgaaaagagaaattttcttttttccccaccactttcagcacccttgaaagatactccattccgattacaaataagaggggagacattggatctccttgtctcagccctctacttgttccaaagaatccatgcgtagatccattgaacatgatagagaaacgaggagttctcacacaattcataaccattctcacaaaggcctgagggaattgaagagctagcagcatctttttcacaaaatcccattcaatagtatc

SEQ ID NO: 70570 - DNA, 2176 bp, Cannabis sativa
  modified_base (545)..(548): a, c, t, g, unknown or other
  modified_base (1633)..(1639): a, c, t, g, unknown or other
aaaagttatagaaaactttacatttatggcagcaaaataatatgactcgttccgtttagatctctaacccttgatcctttctgttgcatagtatgatcatgatctaaatcgggattctccttcagttgacagtttgaactatactgagtattgctttgaattatgtgggcaatctctcaatacgaaggaccatgatttttatgaagaaaaactctgagaattttcaaaataatagatagaaaataataggttttcttttttattcaatttgtcagacaagagagagtcttgggtcatcatcaaaatcaaaaactattatattctatttatagggattcactaggtttaggtttaaaactaaatgggttgttttgaaagatccaatgacttaaaataaaccctcatggccgaacccctttatgaaagcccatgagttagatttttgtcattattttacttccttaatgaaccaaacttgtctttctttagtaatgtcatttttctgctctagttatttaaatactaattctatctatttaataatnnnnattaattatcaaataaaattactatttaaatatatttattaattagaccttccaatgtctcttaattaataaataaaccttaaattctcttttcttctcaattatgcccttccttgtaggagtgtacgtcgctcggtttggtcgatttacgttacaatttattcaactcaacgtaaagatcgagttacaaaaatctaagtgcaacccgcccaattaaaaaaaatattcaacccgcctaatgaaaattggtcagcttagtcgagttaacccgcccaaaccaagcactaatatttactttttttttacattcaattgttatattttagttaattgtgataatgagagaaatatatagattgaattcaaagttcaaatcaaccaccataaaagaaatatagtagtttgaaatttttatctttataaatatataatatagagattatatataataaaactatatatatataaaaaaaatcctcttagtcgggttggccagatcagtttgggttgattgggcaggttgatattatttttaacccgcccaatataaagattggacgagttatattattgttaggtttttcagtttgtattttttgtcgggttatctcgatttggtttagacgggttgttcgggttggcagtttacaaaaatttacgtacagccctacttctttcgtaaaatttacatataagatatagtctttatttagaatcctattaaataaaccaattaattaagactacaaaataatattatcccagttaatgtaaggatcatgggcctatgtaaccaagttcttaataagtagttctagaatttacctaaattttctatctttttaatttctcctgactccactatagaatatgagtgcaagtttttggcacaggctcgcctgattaggtgatacagtgatgcgatatatgggagccaggctatggcacgggcttgtctgattaggcaatgcaaaataggattatcagattaaagcatcgacttgcctgattaggcaacgtgatgtaatgaagatagttactttatgaggtaacatatatctataatttatatgattaaatgaatnnnnnnnctattattggtataatggttttgtattaccaaatatctgtatattgatgtttattcatggcagatgccaatagtgatttggatttcatcttacgaagaatgcgtgatggtttgcttctgattgtgtataaatgataatattcgaataataaactatttgattattattattactttctttttgagtccttgtgactcacgggtgctatgtggtgcaggtaaaaacaaagaaaagttagatcaatcatgtggtgacaatcttctccagcaatgttcatattgatctcgtcggcctgcgtgtcaggttacccagagttgttttgggctgtatctatcgtgtattttggttttatgtttttgaggcattatcgtatgtagttttttttgtaaaactttttataccagggatccccggaacacgctttttatgccgttataatatccgtttttagtgttttgttttagccaagtttttaatattatcacggtgtttaataattaatcaatttattagtattaaactagtttataaaatcac

SEQ ID NO: 70571 - DNA, 1495 bp, Cannabis sativa
tctagaagtgttatgacaaaactagttttgtattaagaattgttttcaagttggttatattaaaaaaaaaatgttaaaaactgagttcaaagtctaatttttacagttttggaaaatataggatctattttattatttaacaaaacagagattccaatcagtaacttttataaaatacagagccaaaaataatattcacccttattattatttaaaaagaagtgtttaaaaggttaggccacaatgtctcaacaaagaatgtgatctcagagcgaacttcactcaacaaaattagatacgtcatgggctaatgctcactgagccactaaaaggttagaccacaacattatctctacagagaatgtgatctcagaatgaacttcactcaacaaaattagatacgtcatgggctaatgctcactgaaccacgatattggcagtggtattaaaacatctctaatcatagcattgtttaaagttgcttaaaatttttacatcatctaaaaatataatattttattgtatctctattttacattatttttagcaaccttacttctaatggttcatttggtaagcatgattggactgaattaaattgtataatttgttcaatcttatgtttagacatgttggaaatctgaataactaattcaattaattctagttgtctgaaattatttatctcatttaacactgagcgataaacaaataattccatgcatgtatgattttttttatttaaaattttataaatatattttaaatttaaaaagaatttaaatgaaatggcttacaaatttattaattaaaaatggtagaaatatataattttatatttaaccccacataatattttgaaatttaaaatgatattaattaaaaaatatatactcaatggattctaagaaaagcaaaatagtaatagaattatatattctcattgaattattaaaattataaatatgatccactttttaattattgaaattatttatatcaaaattttaaaaaaataatatttgtattaaattaaataatttgtttaaattgatatttaacataaataattttttattattcaaatacttttattatatataatcataataaattattctattacgaaggttgttataagcgtgataaatatacacatatttaatcatattatgatatatattatttttcaaaaatgtattttattattacttcttataaagaattattattttatattgtgattccatatttttttattatttaaatttaaatttttattcatttatcattagaatatattttaattggactgaatttatatctatatattttaaatgatagtccaatctattctaaaatcaaacacaaaattacattcagcataaccctaattgtcgtaagaataagagacgggtcacgacactcacttgtagtgttgcggcccgtgccttcaatgcacgagatctccttttaaattttccatagcgggtcg

SEQ ID NO: 70572 - DNA, 1351 bp, Cannabis sativa
tgaattcgaaacagcccctgttttgattgattctggttgtcttctcaggtgaagtcaccgaaattaatggtggttctctttctggttgaattttcgtttcacttgcgcgggttactgcgtggctgcgcgatcattgcgcaggaagcacggatcctgagatgaaggtgtgtgtaagtgatatttgtataattttttttatttgggttgtatatttatttatttggtcagctgaaagtatttttataatattgttattttttttagttaaaactgaaaaaaaaccatttattaaaggggtatttacaaaactatgggaaaaaaatgagaaagtttagataaatatggcatgaaaacttaatgccataatatatggcatttcttaaaaaaacaaactaaaaatatgggtttattaataagaaaaagccatacaaaacattaaaaaataattattttttgaaacggctctctctcattcgataccacaatcttttttttttctctgttctttgattgtttctctctcttgcaattgcttcgacaaccctctttctcttattccaattaattctactattgttcttttcccgtgattccaaattcttcaaggaccatgtctatctctagcaacaacaaagtccggcaaggaaaatgcccatccctggcagcaacaaactcatcatcttaaagctccaattattcaacataaaacatgtgattatacaatttcagtccttcgataataccatcagcaaacacaacaaaaacttccaattatcatctataaaaaaacctccaatcattgcagttattattggagaaaaaaataagtaaatttatatacagggagaaaaacagaatatattataataatataaatctgtatataatataatataatataatataatagtaaataacattacgtgaaagttttatatgattgactgaaaaaaaatttgttaatgcaataaataaatacaaatataatacaaattatataatgtatattaatttaacatacaagtataagaaacaataattattaatatactttatttttaaaattttgggagtctttcatatattttagatattaataaatccaatgcagttacttttatgtaataaagttgcaatgaaatataattaactttacctaataagtaactggttatgtgataacacaagtagaaattaaattcaaaaaccaacttacctaccaatatcaaataatacaatggtcatttaaatatcaccaaaaaaactgctttcaatacaattaacctacaaaaaaataattaaactcaattaagtatactttcaataataatatgaatagtttttataataa

SEQ ID NO: 70573 - DNA, 1656 bp, Cannabis sativa
aggccctaatgaccaacacccctaaaaatatatatgtatatatatatatgcgtgttaatagatatatattaattatatgttatttactttaataattagatttttaatcgagaaaataacataaagataaaaatatgagatattttagttatgtgtattatcctttttaattggttaaaataaatccttttctaaaaattaattattattattttggggtatatattttatttgtcaaattatattttattatataaaagaaaaatatattctatataaaataatattatttttgaaaagtggttagtgatatgttttttcaaattatattaaaataataattttaaaaatttattataaacctatagtttttttaattaattatttatattaaatgaatatgataattatttataaatatattaatatgtataaatattttcttaaaaacaagttataggttgttataatttatttttaaaatagtattataatattactttaaattaatctaattgcatatttatcttatctaattgtttgtaaattaaaataattttaaaatctaactgtatgttatatattgtatataataactaatatcataaattaattaatgattaattgtttaggacatattttaaactatttctagtttaaagaattagattaatttctaattatttaactatttaatacaattaaataaagacaagataagggatttaaattaataaaattaattagcaattaataaggtgcttctaattataagatggtagataaatggtgaatggaggtggtgtgaaattcttaaagctacatcaaggaacaacaacgaagagttcttaaagagagagattgttcgtagtgtagtttatttcttttatttcaatggttataattttaaaaaaatactcaatatttactcggtgttaacatttcatttttaatatttgatgattaattgttgtttgctaattgttaggacattcatatttaatttccatacataaaatcctacctagtttgttttttaataatcatgcatcttatattagaaacataattatttaggattgtcctatatgttttatgtgcattgtatttagtgaaatcaattacataaaatactatattgaattaaatagttaataacctgataatctacaccatgtaaatttctccaaaagttagtcacataattaactaatatttttcaaaataaggtatttttaaaaataacataataatatgaaattaattaaattaatttcaggcctatataatagtaatataattaatgtattacaactggttaatttaataattaaaattcattgttcaacatagttttaattaacgacaaacatattttaaaaaatgagtgggagaggattgtcatctaatatgaaactcatggtagccattattagtcgaacaccgagggtatggggatggtctcgagatgactttatttttgtccctctaaggaaagtgttgaaccatacattgtgaaggtggacttccttttaggatagaataaagtaatgtattttaggcgataccaaccctaaaggggacactactaagttaagtcatggaatttgaaataatgaattacactcacaaagtcatgtccctgtcattgaaact

SEQ ID NO: 70574 - DNA, 1574 bp, Cannabis sativa
caggtagtatatgcaataatgcacaggcaagaggttttccagcctttcaaaactcaccctcgcttcaatgagctccttgaaaacatctataccgtatgtctctcgtatattctacacattataatttgtcagttgaaatgctaatttgacatacctgtctaagttctcttttggtgtcataatgaaaggctatagttcttaccacccttttctatttgtaggtattggactttttcaatagtcgcatggatgcccagtcagtggatggagaattgtcagtagaaaaagtcctccaagttattattgtgaactgtcgatcttggcgtggtgaagggatgaaggtaagaaaggagtgtaccataagtgttctagtctatcttgcaatgcttgctttgctttctattcttttttgttaaaatcttgaccatccgattaatcagatgttcactcaacttcgcttcacgtatgaacaagagagtcgcccagaagagttctttatcccctatgtgtggcagctagttctatctcgcgggtattctttataatccttcttccaaaaatgataattaaaaagttatagttgcattaacttttcatcaaaattatattcgcacaaaattttaggtctatagtttcacttttattaatcttattttatctcattgtatgtccttccagtgcactcagttttaatcatgaagtcataaacttgtttctagctgatccacctgaggatgtaagtacctgggaaagacattaaaatcaccaatcatggaagctctcttatttgttaatttcattgatcataactcataaggaagttctaatcacttgcagagacaaagcaactatgggatggctctagacaatgatgtcaacggtgagtcggagcgagccgttttcttagatgcctaggcatctctgtagaataaaagaaagatgtttcatggtgaaacgtgaatatgtatataaatatattaaaaaaaaaaggaaaaaaaggtagtagaaagttatattcttatcattcttttctgttcatatatgatatgcctctctcaatcttaaagatatatcttgaatgtattaaataagagacgagcgcaaattcccaaattccattgttataatatagtttcttagagagaaatcaagttttgcaacctcaattttcggcactatttgcaagtgcttcagtatctgtgtgttcaaataagtaagcattcgaagaaagcatctacatgctatgagaaagcagcaagagtggcaggttagaagaattcaataaaagttttatgtatgcaactttctaaactattgaagggttctgtggacttcattgtatctattttctaaaaggtgaagtgtgttacgtgtgtacttgttttcaactgttgtcatagattcccacttttaaaaaaaaaaaaaaaaagttagagcacctttaatgataatttaatgttatattgctaatttataaaatacacaaaatgctttacatcattcttctgtgttgtacaaaagctttgaagccaaaatcgagaagcgaaaagcgcttagataagggtcccgccctt

SEQ ID NO: 70575 - DNA, 742 bp, Cannabis sativa
ttatatatgtagattgagcatgaattaagtcttccatggatggcccgattggaccacctcgaacataggttttggatagaagaaactaaaaaccatgttctatggcttggaaagaatcattttcgaaggtacgtaatatgtatatatatttttatttatatatatatattcttgatttcttttaataatagttaaagggtttatacaatttttaacattatacttcgtaaattatttgtttggaaaattaatttatgaatcttgtatgtttagtaggtattaatgttaatataaaatcactcttacatgatatcggtgaaaatattattagatctaatgagctagtaaaaaaaagttgagaaagctctaaatttaataataataacaaaaaaaattagcaattatattcataaattaatataatgtcaaaaattaggtccaattatagggtggttattaattttattaatatttttatttaatattaataattttcaaacaaaatataacaattgattttgataagtgaaaacaggttgttaagcattcataatgacaaattaattcgtctagccatcttaaattaccacttcaaacaatctatcttcaaggctgaactcgaacacttaacaaggtatttattcattcaaaataaatatttacttatttattttatatgtataaatatattatagttttgttttgattttttataatgtgataaattaatatatatatatat

SEQ ID NO: 70576 - DNA, 3807 bp, Cannabis sativa
cccagccactaagccaggcaggacaataaccaagcctacatatttgtaggactacagttgtgccatcaaaactcaatccaccaccacaacatatccaataacagattacctttcttataaaaagctcttacgtaccacgattcagagcagttgctcttgccatcactcacttacttgaacctacttcctatgcacaagcctgcaaagataaaatgtgaaatcaagtaatggacacaaaaatcgattcatcagaagaaaatgagacttggatagttgttccacttcctccaagacaagataccattagcaacatatgagtttatagaatttaatacaacccagatggctctgtaaagtgatttaaagctcgattactagcaaaagactacacacaacaacaaggtgtttattattttgaaatctatgcccatgtggccaaatttaacaaacttaaactcttacttgctcttattgtcatcaagtaatgctacaccacatggatataaataatgcatttatccatgatgatttacatgaagatatctacataaaagtttcacaaagttacacccctaaaggcattgttccccaaaaatgcagtctataaattgaagaaaatcctatatggcctcaaacaatcctccaggcagtggtatgtgaaactaagcaacaccatattgcaacagggatttattcaatcaaagagcgatgattcccttttcataaaacaaacaacatatactttccttatcttattaatgtttgttgatgatatcatagttgccaccaatattaacttggctcttcaacaatttacatcacatcttgatgctcattttaaactcaaagaccttggtcctctcctcttctttcaaggtcttgaaatagcttgttggaataaaggaatattagtaactcaaagaccctttactttacagctcctgctgcccaccggccaccttggcacgaaatcagtttccacaccaatggagcctaaagttaaataataaagttggactactgctaactaatcctactcaatgtcgcaacccaattgggaagctaatctatctcacaatcacacgacccgacatctcgtttgttatcaacaaactaagccaatatctccaagaatcgcaggaatctcatcttaaagcaaccaactgcatccttcactatttgaaaggcactccaggacaagggtttttcttttatgccacaacttctgaaccactacacctccaagcctttacagatgcgaattggggagcttgcttagacacaagacgttcaatatcaggttattgcatcttccttggacagtcactcatctcctaaaaattaaagaaacaacaaatgatgtcacgatcctcagctgaagcctaatacagggccatggcaaatgcaacatgtgaactaacttggcttccctccatccttcccaatttcaacatcaatattagacttccatctactctattttacgacaatagtgttgcactcgacatatcaaaaaattcagttttccatgaacacacaaaatacatcgaaatcaattatcacctcattcaagagaaaataaataatgataccatcgaaacaaaccacgttccatctaaatccaacaccgcgcggacattctcacaaagcctctcttccgtgctcattttcatgaactcatttccaagatgagtgtcaaaaatttctacattacatcttgaagggagctattaaagatcattatgtctgttattttctgttacaagtttgctagttagttgtaatgtaatcattctctatataagaattagttcattgtcattgtaaattgaattatttttttgataataataaaaatagtatatatttttgtttttcaactaattctaagaatgcacatatacatttttatagtttatgagagattgcaatttatgtatttatttttaatctagactcttaaatttggttaaattaacgtcacattagtgttatatcagtaaattgtttaaagaaataaacataatgtaactacatgaaatatttgcaatgatttttatagttcaaaggaaatatttttaatagagaaaaaattatgagacaaagcatcacaagtttggtaaacgcacaagttgcatatattattttaaaaattaatgtaaaatttagtaatatgtgttatctattgtattatgaatgatgagtatgtttagaattatttttgaaaaggatttaagataccctaataatcttatttctataataataatttttggcatttagaagtacaaaaatctcataataacaatcatagaaaattaaaagattcaatttctatactatcattacattatactaaacaatccagagtatatttaaataacaatcagggccggccctgaggtgagacgaaggaggcggccgccttaggtcacccaccgctcaggccctattttgaaaaagaaaattaaaatatagttaataataaaatagataataatactttgtatgttaaatatgtattgtaacctagtggtaatttgattagtttaacaattaagaggttgaaagtttaaattccaataacctcactttttcattgggctccaatttttatttttgcttaaggcccaaattaatataggaccgaccttgataacaatgcttattttacattattatactaaacaatgttaagtattttaaggtgtttaataacaatgctaaataataattaaaaaaataaataatgttaaagtgtctaatataattggaatcatatttcgttattggtattacactttaattatcttataagtgagagagagtaataccattttattaattggagttctttattttgttaaataataattcaaatcatgtgtttttattaaaatagtataaaataaacacgaaacttaataaattttatcaaattgaactttagtaacaaccaaatttaaatgtgttatgacaagaatagctatatatatatttgcatttgctctgttggaaacaagcttcaacttaattatttaaaaaaataataaaacttaaatccatgtctaaatattatcatctaacaaaagggattatctcgtcacaaaatataaaatttaacattgtatttatcaggagaaatggaaccctgcataaaggatgtcaggaaccacattacattttttttaattaaagattaatccaatttaattatccaatcattaatcatgaaccagctccaaaataacattctctttaataaatttacatgttttctcaaagcatgtgagcagagatcgttttcacgtgataacttgcggtctgcttggtcttcatcgcatacataacgtatgtataatattggctattaattaatatggttttcttcacaaaattgcttttttgttgcggaattttgtattaaaggaaaatatatattatgcgtgtctgcgttttccctgtcgaaaataatagatgaatgatagaaaaacaaaataagtcagtcattttttctttatagatttcaatcacacatgcataacatttatcaaattattaaaactatattaaaagattaagagtttgtaatttggccaatattgcctgcatgtatatactaaatcatatatgtggctgatattaaattgcagctcattgtgttagacattagtgccctttatcaattttctttatatagtcacattatttttcttacccattgttgtcatctgaactaaacttgctcttacatatgtcacattaattaataaatagagctagatctatgctagttgttgtagtgat

SEQ ID NO: 70577 - DNA, 1417 bp, Cannabis sativa
gcatgcatgcatgcacacggttccaacttccactacactacacacactagttatatcaatttatgctaatattcatcacctatgttcaattaggtatattcttctctacaaaatggcaatattaatgtgtacacacatctctcttatataaatatacatatattattatgtaattagagacttaccatgccttattctttaaagggttgttgtttgtaatggtttttgaagtaatacaaaacttctggttcttaaaatatatatatattaattgtataaattttaattttaattgattaataaatatgcttggattcctaatcaagttggttatcattgtaactgtaattgagcccctgtattaagtatctagccagccatatataatatatagaatggaatttccaccaaagaagtaatatcctatatcgacattattttggcgaatatttctagaaaatcactataataaaatcatattattacaagttattagccgagtatgtatagaaggtgacatatattcagggccggccctgaaatttagtgggtcatagaaaaaaaaattattttgggcccttatttagaaaaaaaaatatggtattttttaaaattaataaaaaaattgtataattttaaaagggaaatattttgtttttgggcccctgggctaggtgggccctaggcacaggcctagtctgcctatgcccagggccgggcccacatatattcatatatatgtttatatgtttatatatatacggaacatttttaaatagatattagctgttgatagttattaacaaaatttaattataaatattaattttaaaaatattaaagggtttttataaaaatactaaattttggataaaaatttataattttattgttatacggatttttttttacaataatactttctttttataaaacaatcgtaaaacaacaaaataaaacaattaaaacaagagttgaataactaaacaaccatagtgaaacaaaagtgaaaacttaacacagtatacagtataaaacttacatagtatttttgaaaaaaaaaacacagtatttttgaaaaaaattccacctcacagtaagaaagtaaaaatgttagaaatttcagtatgtggtataaaaatatgtttatataaaaatatctaagtcaaactcaattttttttatcttattttttgccaaataacataaaatttcgtattttaatattaccaggttattatttaattaaactcgtaattaaatgcgcaataacaaaactggtactaaaacagtttttctgtagctacagaagacaactctgtaacttcagaataaattagaaaaataaacaatgcaaaaaagcaaaaacacacacaatttttgtacgtggtttcaacaatcctttcagattgttact

SEQ ID NO: 70578 - DNA, 2651 bp, Cannabis sativa
  modified_base (30)..(34): a, c, t, g, unknown or other
aaaagaggtatgtttcaaataaatataaannnnnaggtaaatttgattaattgatgaataaaagaggcatttttcaactaaacccctaataaaattctatctagaaatttaaccatgtacacaactagaaaaagggcttttatataagtttatatataggtctattcgacttttaatatttagattaaatagtttatttttctttttatctttattttttattaaaaaaattaaaaataaatgtctaaattgtagttgtagtaattactattgttttaaattactgtactatccagttattgagtattgagttttttgacacactgttagtttttatcttacgtgacaaacaaaaaaagattttaaaactcatttggcactacatagcatatattataattgctattagatcattttcatgtgtatatatatgaataaaataaaaattattttaaattaaaatatctatattttcgtacactattattagccttaatcttattattgcgcccacttgaagatataaaaatctaaaaaaatcaaattatagtagtttatacatatatactcatcgatgtaatgtgtacgaatatatcatatttaattactacttcaaatatatacattatcattgaggtatgtacgatatgtagtgctcatcaaataaaatctcaatcatatgaattatatatgcatatatagtggccgtcctatatatatagtagttctattatattagagagtacttaattataacaccaactctactaactaatttaccacttgtatctgatggtagttataagttctctattatagtttttacatttggtgtatttcatagcctatatatatgactttatttcaagcatttgaaataaagttgaaaatcagaacagtatttgttgttacaggtcatgattctttcctttttgcatatcatcataaaggtagtctgtgtacgtagttgcattttagtgttatatatgttttgatttcatattttgttttacaacactcaaaccttagttaaattaattaaaaagaacacacaaatataaataatcaagtatatacactataatgcttaggccatctccaccacgtaaattattttttctcgtcttttttttttttttttattttttttaattttgacggttttctttttcttttactcgttttaattaattttaattacaaacaacaacaacaacaacggtaaaaaaactagtaagtaaattatgacctgtcactcagattttaacaatacaaaaaagtaataataataagttttcttcgtcaatatctcctaattcattttctaaatataaattccatttaaaaaaattattttcttaaattaagcacttttatttattttctaaacatttttgtaaacatagaagaataaaaaaacccaaaaaaaaagtcatttccttttagatattttgaatttattaatagactatgaataaaattagtacagataaatagttgatttggggctgacgtttttggatctatgggtaacgctaagaatggatttgcttgaaattaatagttgatttgattctgtaaatccaccattatagctaaactaatgttgtacctaatttttgccataaatctaaaaaacttgctgtctcaaaattgatgtgctcttcttgttcttattaattgttttagaacacattatttatatctatttttcatgtcataatttagtttatagtttgttaacgaatttattatatatcaaattgatataaataatatgtactaaaataattgacagaacagatagaacacactaatttggagataacataataagatatattgaaatctaacataaaagtacatatatgggtaatatatatgtatgtactattatacatagcacatgttgtggagaagataactaagacaaaagcaaaacgacagtacataaatattaatttatataaagggattattgtgaatcactggatgagattgagagaccacaataggagtgaagatcgtttgggcctgttcgagtagccatattggaataaaaaaagtcaaggaatcggtaatagtcaaagggtttgaacaacaaaggatggtcttcatcaacaagctcttctggggcttttaccatgtaacctgcttttggcatcgaaaacaatcctgctgagtaccttgcctcatttcctttcatcattactctgtgagttgcacagtgtaatctaccatttgcccatgcctaatataatattaattaatttattatatcaatttcaaaatatacatatatgattttcttttgaggtatacatatttatatattttatataaagtaattaagtacttacgtaaagagaatttccgatcacgacgatgaaagaggtggaagatgagggtttgacagtaaaccattggccatctttggtttggatctctaacccctcaacttggttctgattcaaaatagtgacaatgtttttatctgtgtgagcactcaaacccaacttggtctcattgctttcaggccccttatatttcatcaattgaagaacgtagttggaagagtccatgtgttcctccaaatatttttcaacacccaaactctccaaaatcatccttcttatcattccatccaactc

SEQ ID NO: 70579 - DNA, 3132 bp, Cannabis sativa
gagtatctttatagaaaaaaaaaaagaatattaatgagtaattacagttacatattctatttcattaaaaacaaataaattagatatttgttgaaagaaaaagaaaaaagaaaaggaaaaaaaaaaacattaagaaaaaaacataatactccaaacggtggcgttttgactgtaaaagcaattttcacaaaaaatgaagggcaatttgggaaaaatgaagaagatgatcgtttcattcgtttgacacatgacaacaactgtcgcatatttgagactgagtcagtagtcacctcagctcagctggacacgaaccaaagcaatctatcgccgtggtcggaaccggagaaaaaaccagtaaccgccacatggcggcggccactcgacctcttccgacgtcgcgcactacacccgcgtgttcccatgcgctcaaatctctgaaaccttcttcaccaccagcttcctctttctctcttcctcttccttcgaaatcgtcactctccaatggcttcttctccaaccagaagaggctcgtagtacaggtccggagcgagatcaagagctttgaaaactctcagaattggacaattgaaaccgattcttttcgattcgttcccaactcttcgtctcattcctcctcatcactttccatggcggcttccacctccgctgccaagacctctaagaaggtctgtcttttctattgtgctgagactaaagcactcgccgaaagagttgcttccgagtctgactccattgagcttcgttccattacatggaggtagcaattcgattatctttgctaattttacaagaaattgtgtctcattatatcgcattttgtgatttttactttttgattctacaatttggtgccgatacttgccttcaattgtaaggtttttattttttattttttgctatggtttttggtgttgaaggttgatcatgatctaattatgctcaattacatgatttttttcttatatgggtccgatagggtcgttatgaatgtgattgaactggtctatctaagatactaacatgtttttaatggcttctttaaagttttagcaatggagtaagactcaaatttgacattctttttgaatttgtaaatgttaggaaatttgatgatggattccccaatattttcatccccaatgcacatggcattcgtgggcaacatgtggcgttcttggcatcatttagttccccaggagttatctttgagcagctctctgtaatctatgctttgcccaaattgttcatctcctcattcacattggtccttccatttttccccacgggaacttctgagcgtatggaggatgaaggagatgttgcaacagccttcactctcgctaggaccttatctaatataccaatttcaagaggagggcctactagtatagtgacatttgatatccatgctttgcaggtttgtgccaaatatttgtaagcttttaaggtgcaagctttcttcttcttgctactctaggaaaagtaaggcttttatgggaaaattgtctcaccactttgctttcctgcattcttgatcctaggagaggttctactttggggacaatattttaccatgtttcgagagtgggatacctttgctcaaaaataggcttcaagagctccctgattcgcataatgtaagtattgtttaatggaatggatagtacaagtcttcaaatttttctgagcttcaacttcaacgcttattcttcttagtgttatgattttttgatttatgggataattattttggttgtttgcaactcttccttgatatgcctagttaaggatgtgatacttgagacaaatttatgaatttcggcaatggaatgcatttgttttgggccttaggcaactgtaaactggcaatatttatgccttgaaacaatatttgttactttttccttgaagtaaaaccagctttagatcttccaaacattttttcattaagtgatctggagacataagcagataagctgagaattatttaaaccatagtgcctttaatctgttgacgctctgtgctggttctttcttacaagatatccattgcttttcccgatgatggagcttggaaaagatttcataagcagctgcagcatttcccaacggtatttaaatgtcatttatatgaaatatttatttggctaaattaataatagatggggtcatctgagtattttctagcaacaccaattgtgtatgctctcataagtatgcttgttaataatatgtgccttccaacctgcttctaacatcttacaattgatattcagattgtttgtgctaaagttcgggaaggtgaccaacgaattgtgcgtatcaaagagggagacccaagcgggcggcatgttgtgatagttgatgatttggtccaatcaggtggtaccctgattgaatgccaggtatgcatacctgctcactacttattacatttgttgtattgaaattcaagtttataattttttaaagcaagcatggtttctggggttggagagtgaaatctatagtgaggcttataccttttatcttggaaaaactctgttatttttttcctttttcttttcttaaatctcatgagaaggttggaacaagtttttgacttgcctatctgtggtgttttgccttttgatgtaaaacaaagtggatttactttcttgcatctctctctctattttagaagacagcacaaattatagtttagcattctagggagaagactcaaaaggaatcctaatttctaggagggtactaaagcatttaaatgaaatcattcaagtattctgcctttaattttttgcggttttgtgtgtatgtgtaattctattccatgttcaacaaagggaataaattgcttgcttttcttactctcaatattatttagaaagtattagcggcccatggagcagcaaaaatcagcgcttatgttactcatgggatctttcctaacagatcatgggaacgctttgaacatgataatcaaggtaattcattatcatcttagctcattttttttaatcttgtttgtttttttgcatgaatgagcacattttttcatttggttcatctttcacctcatttttatgatgaataaacatttcattacgcaaa

SEQ ID NO: 70580 - DNA, 3205 bp, Cannabis sativa
ataatctaataattaaaacatactaaaccatgagtcaaacgagtcttcgcagccaatgtacatatcaaaccagtcttcaggatctttaaaacttggtcgctctgatacaatgttgtaatgccttgttctatagggacgccacatgtgtgcttttcaaaagaattacttttctatttaattgtataagtatatgaaaagtgtgggtaattaaaattttgtaattaaattaacacataattttataaaagataaatattaacattcactgggaccccttgttaccaaaatatttatattcagaaagattggtgcttttaaaaaataagtttatagttcaaaatacaatcaagatgggacatcctgtccaccgggccgtggcaccgcgactcatatgtacactactgtagcgacctcaacctcatgcctgctcaactttgccctattctttacctacaccatgtaaaactggtgagtcacagagactcaacaagaaaagtgattaattccttaagcattataaaatccatttagttacattataacaaaaatgtactcaattacaacatatcaaataataacaagcttaatctatttcacaacatcaaaatcacacaatcttggtgcttcattaagcgcccttaccactcatcaaccataagttacgtatgtcactatcgttgtcgatacaacgaacgacaagtaagaaacctatctacgctttcaacagtaatgaccgtttctaaccctcagtcataatcgaggaataacaaactcataactaggatctccatcatagagactataacaaacacaatcgttgatcactgaatcctaagtgatgtgtaacacttttcttacctctgtccaaaaatcagttgtgcaggctgacttgagtgaaaacaaagttgggcgatcccggtcctatgtcacgataaccaaaactcaataaatgccttaaaccaaaactccaaaataaaatccaaatctgaaaccgaacaagaacctaacttccaacaactccaaaatagttcatacaacacagaaacaacataaaatagatactatgcaccaccccgagccaagaaaaaacttgaagaaaatctaggaatttcccctatagtgtaaccggtcgactggttttggtgcatcagatgcaaccggtagaccggttctggtgtaccagaacaaaccagtggactgattctggcagaccagaaattcaaggattttctcccccaaactcaaaccaacaccttcccaaacctgataaacaactctagaataactcaatatcacacaaataacatatccaaatcattagttcaccacagttcatcaaattatacaaatcattatacaaaagccaagattaagcttttaaacctaaatttgcaaactccaattctaacatccacacaatacatctaaaagaacctaatcaaacccttaaaacatcctctaaacatagcttaacaccacaattcagaaaccctaaaactttcaccaaaatcattttaaaacttatgataaattaaggaaaagacactgaaaacttaccttaatctagctcgcatctggtgctatgaaattctggcaagaattgcttaaaatgggttgaagtctttctagggttcagttttttcccttgagccgaaagatgaaagagagaaaaaatgatgggctccaataatacaaaattaaattctaaaatcaacctagtacatttaccatttttccctcattcatattcttaaaccaaaacataacctagggtaacttaggtaatttttaactaatcccccgaaccaacatcttaaaattctaaactagcctggaatacttccaatatagcccaccctctattgtcgtgacatttctgaccactctgctaggttcccacagtcgccgggcccaaaaacatattattccagaaatggtatccatgatacccacatatttcaataaaatatctgtaattaataaattacgctttatttaattatttattaaatttacactaattaacctaagtaagatcgtaatctaacttcattaccagaataattacatattcaataaaatatgtctaattaaataccatattattttctagaatattacaattatttacagtaaacttcctagtagagagaaatgagaaacgtgatataattctcaaactagtataaataccccatgaatcttaaggattatgggttgaactctcttacaaactttgttcagacaaactcgagaacatacattgttattattcccaaaggcattttcaagtaatacacttacgaaataatactgactcttggactaaggctagttaacgccccaaccacgtaaaaaattgtttgtctattttcactctttctcttttgattatttattcttcagttcttattatttatattctgttttcaaaaatctcaataaataataataataataataacaataaaaaagtgatacaattagcttaatcatcatactcattaattaatgggctaagatgcaaaatagtcttaaatttaaaaattaagttagtaaatatctcctttttataaaaattaagaaaatttccaaatataataaattagttaataaaaattataaaaatattgttaacgaaaattttcgttgaccaaaattaataagcctttacgtaataaatactttacaaaaataatattaaataatatagaaattaataactccagatagttttacatggtttcacagttaaaatctacatactccactagtcttttttattaatggtatttttttgagtgctaaatacaatatcagaatgatagtatttttctcacaattttctcgtcccttttttttgtgtaatctgctcctatttataggaatataagttgacagttattttcttgggattcgtttaaatgtaactattcatgtaacgtggacaaaattcccacgtttcatttaatcgcaagtcggataatatctgatatttgataactgctaaagtgcttttgtttttatccccttgatgattattgctgacttggaaggttgtatcacgcttaacgtgagttattgatgagaatactaaggctaaagttacaagtaaagttccaattggcgcggtgacaagggtgcaagccaagagattcaaagaagaactcaacaacttagtcaacagaattttaaaacaagagga

SEQ ID NO: 70581 - DNA, 3266 bp, Cannabis sativa
agtgcattgtagaattttccttaaatctctaaccataattgttatatttattagacggttgtaattaatttaaaatttattaaaaataattatttaattatttgtaactttatattaacttaattttatttatttacttaaaataaaaaaaaaaaattataaattttgatttctaaaaaggttttagttaatattttaattaaaagattaatttattttaaatatataattattaatttaagtctaaaactcaaaatttgatccgttggtgatatgttatagtaagtcataaaataatttaaccatcatagttatatttttattgtaactattaaatacacaaccctccatatactaatacatggatatataatagttgtatagcatgaccgacaataatggtatgcaaagtgggttactgcagagggtccaaaaaaaataaaaggtccaatatatatttttttaatgcgtaataatttttattaataaacctaaattttgaagggctaacaatttgtcattagtcacttccatcccaattcccaaagttcattttcagttctattaatgcttttaagtaaaaaaaataaaatatattactgctatatatttattatttttttcaaactttttatattttttttcttatcattttttttttgttctattagaatgaataatcactactacaaaaatgggtttttccgacatttttaaatagtcgtttaaggtattcccgtcggtttctataaccatcgcctatacgaccgtcgtaaaacgggcataataggcgattattcaaaaccgtcgctagtgtgggtttcccgacggtttaaaactgtcgcctataactgggtataggcgacggtttataactgtgccttataagtatatggcaagttagttggttagtaagtggacggatatttgagtgtagtaattaggtgtagattatgtggcataggagtgtgtgaaaatgacgtgaaaaaattggtaagagttgcaacctaaagtggaagagaacctaactctccaattccaaagtatccaatacaaaatattttctctatgttttttttttttggactctattgctcttaatgttcttttagataattgataggaatttcctatcataatggtgtgatatttgtatgccacttttacccccacaacactataaaattacattcattgaaaacaatttagaaacaagttttttttaaaattttattttatttaaaattattactgatttaatagtagtatatatcataggaagcttgtacggtgcacctaggagggtgcaccaatgtaccttatactgtttttcgacatatttaaaaaaaattaatctaatttttttacggttgtgtatacgttgtagttatttaagacatcttacaacattttgagaaattcagaattatttacaatataaaaagtagtgttaataaaagtctatataatgttctatttaaaggtttgtcctatataataataaataggtatttataatttgcactataattaaaatgtaaaatttaaattatataaaattttgttaaattatttttgaaataaaaattaatgaaacaaaagtacaaataaattaaaacaaagagaactaggcacgtgcataatctagttttttataaaaatatcatattttgcatatacaacaccaatcaaatttcaagcggtatatttaaaagtacagtattagagagtttcatattgctaatgtgtgaaaagatagcataatatataagattcatgagttactcctttcatgttggatttttcgccaattagttccgagatggaaccccggcctaacgactatctgatccaaaataaaataagaaaagtcgatccaaaaagtagagccgaaagtaaaaaagaatcacttataattcggggatagtgagccaaaaagagccaccaacaatccaaaaaaaaaaaaaaacgatccaaaaattagagccaagagagctacttgtgattcagggatattgagccaaaaaacaaaaaatcgcttgtgatcgagctgtccacgatattggtgagcaaaaaataactaccatcttgagaaaattagagagtcacgtacattactgatgtgtaaaaatgtaatagaatatataagattcataaataactcctctcattgtcaattcatttttttttaaccaattattagttttgagatgaaaccacatacatcttacaattctaacattcagctcaatagtctgttgagaaaaatacaaattattaaaataacactactacaaaaaaaggtatttttgtcagttttcaagtgactaaacccaattttatgagaataataattgcttaagtttttatataggagaccacattactagtctaatatatagattttggtgtagaatactacaccaatacaagaaaacaattcaattaatacagtcaagagaatgagaatgaccaaactaaacaataaactaaaattaatatcagaacttcagaagagagcaagagagacatgatctaataaaacaacctttaacaatggttggtttctttattgaatctccaaagagattttacaattcgagacaagagagattagcctagcatcattacaatttagctcacatgagaggcattgatcaaatacacaatgtactctttaacacccctcccactctctcataatacacttttaagttcagtacaaaaatcaatagtggtgataggcctcagactaacactaagaaacataaaagaaaactaacttttaagatgcaattactaactgcctagacatgtcagcaagacatgtggacaaatctatctgagtagctgaatcacacaacaaattcaccttgatttagtttggagtagttgtgacagctgttcttatgaattttcaacaactcttatcaatatttgggagttttagataatgtctaaacttctgtaagatcacattcttggtcagtatatcatcagcatttaatgctgaactcactactttaaaaatcagaagtcgcaacggccctaaaaaagctttttttaggggaccgttgctaaaaaaattaagtaactgtttaaaatcgtcgggaaaaattagtattcccgacggtttataatagtaattacaggaatagatgacggttttgattggaattcataaatttattgggcccttatacctgacgttttaaaaaactgttgcctatactataggcgacggttttcaaccgttgggtataagg

SEQ ID NO: 70582 - DNA, 2318 bp, Cannabis sativa
ggaatcccccctcccgccccgtttacatccctacttgagactctctagcaaatgagaaatcaacttggtctcagacaaaaaaaaaaaaaataatcagatcatcggacaagcgaagaaagtgtgttgaatgtctaacagttccccaacctttcaacattccaatatagagttttcatggctctcggcgaccctgaatgccagagtctgccgcttcaaaatcaacgccaaaagtagaatccataaatgaagagaataccctttgtatcactccctctcctttatcaactaaaaacaactaatcgataaaaagtgtaaaaaagaaaaataaaaaaacaatcaagaaaatttcaaaacagacattttctcaacaaaaaaaaagataaaaaaaaaagtgtaaaagaagtaaagaacaatgaaaaatcgccatctgtaaaacaacaaaataataacgagaaaacaaatataaataaattatataaaacaacgaaaaatgaatatgaagtagttattatttttactgaaaaatgtatatttgtagataaaaaattcaccgtacataaaattgatttttttttagtgttaatgtatttttgtttttgtcttgttttgtttttgaattttagtggattaaattaaaattagagtatttgtttaggtcggagcttggatatatgggatgcaattcaattatttttctctattctttcgtctggttgtagagtaataattaataatattttcaaagtaattttagaaataatattacattgataattaattatattatattgctccagaatatgtatagcagaacatataatacatataattatataatgtcagcacgtcttatacattaatcatttattatatttgtttatcatattagttccgtggatcggagccatttcttattatttatatatattttttttttttttgaatagatcaatccatttattagccaaatacttaattagtgtatattttatctgttcattttttaagtcaccttctatatattattcttttcttccatacatgtaactatttatttatggtcaaaattaaggacatcaaggttattgaactttttatgtataatgtaacatgcacaaggaatatattaatttatgtcaaattgaagaaagaaaaatggaacccatgatatatatacatctacagtattatatgttgagacagataaaaagaaaaatatatgtatgtatcttatattattacaagataatatatattttattattagacaataaaatatggtatcgcattaatatattttcacggcacatcacatgtgtacgggtatgctttgagcggtcagattagggtataacttagttcgcattgagacggatttttctgttattagcttttagataaattgtcttaattctattattatgtttttaaatcaattgttatctcttactgctgttggtggtggtttttgtcgtgccatctcgcgtgttgcgaatggtgtagcctatgcactagcaaaatctgttactagtttggtacgagtttatttgtcgacagatacttatcttagatttattagcactcctatcagctgattttatttaattgaatacatgattttcttaaaaaaaaaatgattttataaagtgaagcaaaaattatacgacagacctaggattgtattggtgccctcaattttgctagtacgtatcagtaagcataaaccagaagaagagaaaacagaggaagaagaagcaaagtctttattactgagattgagaatgaatacaatctaatgaaaatacaagaaataaaggctatatatacagctaagcaatcaaaggaaaacagttacagttgtaacaactataacagaaaaaataacaaacaaaccaactatgacagctaataccaactaacattaactaactaattcttgatagtacgtgcgtactgctagcttatttaatccaaaatgtgtagcttaatttgcttcgatttttaaacgtaaaataaaaattaaacgctgtatacaaagtgcaatatcactagtagtgagtgaaaatatataagacatttaaaagggtagatgaaaattcttcatatatatatatactagtttgaagctacaactttgtaaagaaataaaaaaatgtattagcataaattttgttaaatagtatataatatatcgcaataaaaatgaacacaatgatgtatttatagtgttagattaaatgtatagtttacctttcattaattaaatgtatctcttgaattgtatgtagtccatagggagtgttgacttcttttggtgg

SEQ ID NO: 70583 - DNA, 713 bp, Cannabis sativa
ttctcgaaaagatatgaatctagtcggccagcccccaaggatgcaaaaggccacctatgctttcgagcccagaggctcttttgatcctagaggcaaaattgtgcgacggggacaaagtgtaaagatacctaagcctaaaaggcaaaggaaccaccttagtgatttagtcaattaggacagaaggacaaccctgggacattttgaggaactggtccactaccgaccttcgatggcgattagatgccaagtacgagaagtacaaaagtaagcaaggctatgtgggggtgacctcagaaaccacttgagtaataagatgatgggttgtgatctcccaagagtgacacaaagcgattggaggagtagatagctgctctgaccaagttggtcaagaaacagagtagagctctctcgaatttgaaagatgaagatctgaaaccttgtgtgaggaggatcgcagtgatcccactttcgaaaaacttcaaaatgcaccacattgagttgtatgagggaagaattgatctgcgagcgcatttagcgaagtattacaagatgatgcaagttgcccgggttagtgacgatgccaaatgcttatgtttttccttgaccttgattaagtccgcaaaagattggtggaaacgattagctccaggatcaatggatgttggaaagatttatagtcgactttctacaaatagttcattgctacacgtgac

SEQ ID NO: 70584 - DNA, 1492 bp, Cannabis sativa
cctgaatgcaattgcaatgtcgttgccgaatttctcaagggctttatccataatttcaagaggggaagcattttcgagatctttagccaatttctcaaaatcctcagtctcaattctttctttgtgtacctctgcaattttaacaatcctctcagtcaggcgaccacggatgaaaaaccccaaacaaaacttagaaagtaaaaatttagaataaatttatttaccaggagcagatacggttgctgctgaaggaacaatggaatcgtttcttctaggctcggcattaataggcttcacagcgctttttctttgtgaaagattcaaagatgaactctgaccttgtccttgtccccgttccaatattctaaatgaaccaatctgcggaactgcaaaatattaaccaaaaaaaaaaagttaatgtcatgttttcaggtagatcatttttctttcattttgaccaaaattagataaaaaaaaaatatatgtaacgatgcgccggaccataagtccacctctcgtattttccggtaaagattttcacaggaaacaaacagaataaaaaaaaaaattaaaaatatacatacctttaagctcagaggaggcagttgaacgagaaaatgaagaaccagaaattgcagcagatgacgatgaagtaacagcaagagccattatagcctaatgaattgaaattcttctctaaatttttcttaattattttttttttttttcagtttgagggagattgttcttccactccttaagattaaaaggattaaatagatgtcctaataaaagggcggcctaacagattcattgaacctggacgtaataacgttttgtagagacccaaattgttttgctaacgtggcacattttaattggtggaagcgctaattctgtcagcacattcgtcacgtggcccgcccagccgaagccatgaggactcttctgggtgtcttcgtttttttttttttttttgacatgtcttcattaggagaaccttaaaaaaatgcataattaattataatcaaattaaaatgtagcattaaaagattaatattaatattgtaataataattaaattacacatagtgctggtgtgggacatacttattcttaactacactatctataaaatataaacgaaataataattaattaatagtgtattaatataaaaaaaatatacttgactgatttcaaaagaaaaaaaaaaaaaacttacatgactaattgttctctagtattttaatcattttcaatcaaacgttaaatattgaataatataataatattaagtccaggcaaataaaataatatatttaaatttatattatatatttttaatcattttcttcttgagaaatatatattatatataatatattgtttcaaatttacatatatacagtattactataacatatatataattcttaataattacatcatacaatatgttaattataaattaagcatgcagccacacttt

SEQ ID NO: 70585 - DNA, 4538 bp, Cannabis sativa
  modified_base (4221)..(4255): a, c, t, g, unknown or other
aatccatagttagaagataacactggatggattatcgagtaatgagtactaaatatataatatataatatatgtgttttttttttcctaatattatcatattattattaaatatttgtcaatacctaattgttattgatgatcattttactaaatattttttaattcacggtaaaaaaaaatctctttaaattacagactaggagtctgtttggctgtatcagttttcagtttttaaaattatgttttcaaaagtgagaatagaaaatagttttttgtcattttaaaaaatttaatagtgtttggtacaaattttttaaaactgtttttagattttttttttctaactaaaaaaaatcaatattttaatatcatatcatgagcccattcggatctgggttcgggtttggttccgggtctagaatccgagtatgtgagtaaaaatgtaaaatataatatgttagacaaaataaaattatttttcaaaattaaaaacaatattttgatgttttctgttttttaattttttaaaattcaatttttaaaaaattcaatttttaaaaaattccttttaaaaaattttgccaaataaaaactgtttcagttttaaaaaacagaaaataatttttaagttatgaagacaaacaagctgtagtattttgagtgacatcatacattacagcataatgctaggattagaatatatgtcaatataattttttttggggggtcaaatttaatattagttaagaaaaaaaaattaatattaaacttaacacatgcattacagttagagttggagataatttagtaagattggctgttgatgctatttcaattcccattttaagatgacaaagtaacttgaacttggaccataacattattttctgacaaatattaataagtatcttaacaaaataaaaaataaataaataaccaaaagagatcattgtcacttgggcaaccgagagggccaatgaagttttttctcttttcatatttctcctttccatttattaaggaaagagtagtattaacaagatatatacatattctccggtgctcgagacaaaaaaggtacagtatttaacttaattctagccacaaacaattacaatatgagtaattatgtacaaaaatatgtaccaaatcttttattagtatatcctataaaagttcgagatctggtatatattttatttactttggtattgaaaaaaaaaaattaatagtgcatgtggtagaattgtagttacgtaatatcaatcacttataaatttttaaaaaattcttaataatactaaaaataagattcaaaatatttatttatctatgacaaaaaataattaagcatgtacttttaaatttttttaaaaatttacaattaatcataaataactacaaaacaatacacaattaagaagaaaaaaaaaataactaaaaggggcatatatatttttttagtattattatttttatatattttaatatttgccccacataataaaaaatttcatttttttcatcatatattgtcatttttgttcttatattagagttagttaattttctcttaagttttaccaccaactgtatttcaactctataaaaatattgctcttgtaccattttacacatagttcaatcaatacaaaattattttacaaaattatttttgttttactttgtttttcgtttctttcctcctaatacggtatcagattttacaatccaagaaccatagaatccacaagcttccactgcctacaacaatggtgggtcagagagccaattcctttgctacctccactgatctcaataccaaatctagtggacgatgctctttcgaattctgctcctccagcatctcaaaactcgacagagattcctcctcgagtccctgttccggctgttgctattcaccgtgtccatggagatcaaccaacttatgaggatgtaagaagtccctactacctcaacactgtagatcatccaggactagttcttgttactccagtcttgacagatcgaaactttcaaccatggactcgagacttcaagctttccataggtgcgcgtagcaaccttttcttgatggtacacttcctaaacctcctcccaatgatcctttatttagttcttggattcgttgtaatcaaatggtccaatcttggatccttcactcggtttctcccgagatcaaaagcagtatcatgtatctagatactgctggagacatgtggacagaactcaacaataggttcaaccaaggtaatggtccacagattttcaaacttaatgaaaatcttacttttcttcatcaaggtgatgattctgtcaatacttattttactaaactgactgctatttgggatgagattacccaacttcttccaagagtaccctgtacttgtgttgctgctcccataagttaataataccacaaccatgatcaagtgctacaacttctcaaaggtctcaatgagtcctatcatgttatacgagatcaggtattacttcttgacccatgtccccctctgaataaagtgttttccatgattgtacatcaagaatgccaaagaacgcttggcaatcaaaacattaaccccattgcagcagctacatcttcttctgcactcaattgcatgtattaaaaaattaatctacatataattttttttttttcagaaagagacatagttaatatgaactaatataatttatcaaaataaattattaactaatatgttaaaaatatcaaaattccaaacttattacgtttatcaccctctcttccctcacataagcacttaccgatcattgttttacttattttatgtacaaaactagcttattagaaataatattaattatgattataagtgagatacgatgatgacatcaactataaatatagtggtgactacaaataaaatacggtgatgatagttgttttaaaattatataatgaattttccatagatttattatcttcattcagtttcaaatttctattttgtgttagaaatatttagtttgtaatttttttcactataaagtatatttaaaaaaaaattacttaattttttatttatataaaaaattatatgatgattttttttaattccttaaagttttttatatagatttatacataaaaataaatttaaaattatttaatactaattttatttttcaattcatatttacataattatttaacaacccggtcatacttatcaaaaaggataaaagttgaattggtaaatttattaaatatagggtcccaatcatgaacttctagaagatggaaagcatgttattagaccaggctaaccaatttatgggttgggtaggcagaaaaaaatcccaagttaacttatcaactcaaccttgcttatatagattctccacagtctttgcccaacacatggggctgggaccatttgactatgtagcatcaatgagtaatatacttcttttttaatagcttatcagaaaattcagtcttaccccttcaaagttcaaagagtaattttttgtattgtactcaaagttaggcgagtctttcttttgttttattttatttaaatttcttttactgtctcctcagaatttttaccactttctaagtctaccgactgtttatacatatataaatattttatagaaaattatatggtcctacttctatattgcatgccaccatgctatttgagtatggccctacttgttataaatttaagagaaatgggtacccacactaccaattatgctaggctcatcatcatcaacaatgttttcgtggctgatatcatttttctccattgatataaaaaaaaaatatcactgtttttatgtaattttttttttaaaaaaaaagtttggctcaaatttttgagtcctcaagaagtggataataagtcactctactacttaatttactgacaaacccacatggttgttggtttcctttggtattgacatatggaacttaggtggcgtttggttgaaggtaatgaaatggaatggaagagaaatgaaacaattttcattcaattcttttgtttggttacattttaaagtattagaatggcattccaatggaatgaactttccactattttggtggaatggctattccattttaaaaaggaaggaatgatcattctaatgtaacaagaaaaaaaaaaattaattatttttttatcaatttttnnnnnnnnnnnnnnnnnnnnnnnnnnnnnnnnnnnattcctattcccattcccatttctatttctatattttcattcctcccaaccaaacggctcctagagttttaaaggctaccagtaatatttagcactctcttatattttaacatcgttattggtttaattaagtactgaattttatataacttaatgtaataatttttaataaatatcactagccaatcttaaagtaccacttttaaaaaatactaaacaccgctcttattcaataacaatacttctttacttactatttattagtaaattatggctacaatta

SEQ ID NO: 70586 - DNA, 995 bp, Cannabis sativa
acaataaaaatgtaaccattgaaacctcttccaatataatgaaacataagtaaaaaggaaattaaatagcatttgcctatttggtgtttggtttggctttggcggagaactccaagcccccttctcctctctctctctctattttattctttaaaaccccccaaaatcaccacttctctttctctctcttcttccttgttatcatcgtccccaactctctctctctctctctctcttctctctccaccatgcagtcactgcaagcttccactctcagaccatctccaccactcgacccacatcgccaccgtggaacccaattcctccgcaatgccaccaccaaggcttggcccagacccaccagacccaccaaagtctctttcatctcagcatcttcgtcttctgtggctcctaagcgagagaaggacccgaagaaacgagttgtaattactggcatgggacttgtctctgtatttggtaacgatgttgatgcttattatgataagcttctttccggtgagagtgggattggtcttattgatcgttttgatgcttctaagtttcctactagatttggtggtcagatccgtggatttaattctgaagggtatattgatgggaagaatgaccgaaggcttgatgattgtcttcgttattgcattgttgctgggaagaaagctcttgaggatgctgatcttggtggtgaaaagctctccaaggtacaattttttttctcgaaattatcgatctggggaatccttctttttatgcatttatatatatgaattgttaaagttatgttttttatggaatggtatttgatttttgtttcacatttgggtcttttgataatggaattcataaatatttatttgttagtttttgtagtgatatgaatatgtaagagctaagacccttctataaatacatttgaactctatatattttgatattgaaagtagaatttttgagattgacaatgacacttcttttct

SEQ ID NO: 70587 - DNA, 2540 bp, Cannabis sativa
ctcataaatcggacttaagttcggatcctcctcctcccttcacgacattatgaaaggccagtcgaccaccacgcgatggtctcaggaccaatcggtcctcatggtgcttgttgtccaaacctgaaccctctcgagtttctcctccattgtttcatgtgtgcatggccatgcatggcttcatgcacacttgaaaaactatgtgttatgtccttttgagctcacgacttgaagttgcatcccttcgagctttgtggcttgtcatgcgagattcaaaatgtcgtcatctcgatgaggttggagtttactccttaaacccaagctcactcatcaaaatagagaaatatgtgaattttgatattacattattaaaccaaaatttacagagaagagatggaatcttttttggacattaaactggaatcttttttggaaaatagaaagttttggcttgaaaattcaaaaatggaaagtttgaaagtctgaggtgatgacaaaaaagaaatgagttgggtaaatccatttatacctcaggtaggatccttgcgatttgagatggacaaccccgatttcttcttccaaaaaagcacacttcaatccgatggatgggacgttgaaaaaacagcctttaaatttcaccgcttgaatttatcattcttcattacacgcctcgagtaacgtacgcattaaaagagaggtcatttaaattgtcttgccatcattgcaacttctcttaaggaatgcgcccccagcacgcttatgtcatcaataactacattaaagaggccgcatgcttgccacattaatggtacatgcagttaatgaccccttactcaatgacagctcacgggacacatccgcgatcttgcaatcaccacgtgtcaagaacatatctctaagaaatggaagagtactacaagctcccagatctcagagagtctcgaaagctcaaggggtaaatattatccgtgtctctgagcatgtgacacgtggaaattaaaggaaggaattagcctcataatttccctatttaaaatccctcactacagtattttcgcagagaagcttcatggagccaagaataagtcaagactgggaagacacatggaagcccgcttggccctgtcttagcttcccagacagagaaggtgtgttgcctcccctagacctggaagggtccaaatatggaatcctacccagctaatacctagacgggtactcgaagggcctaatacggatgtcgaccgccgtagagtgtcgcgaacgtctacctttgatataagctaggttacaaagtgacaattatattttattttacaagatcaaatcttgtcccctgtgtctaagcatggtagtgcgcatacctccaccacgtttttgatatacgaatattgctgacctctgttttaaaggtgaaagttttgggcgagacgtggcctttacttttaaaggttaaagctttaggtgacacgtacccacatggcacaaatggtctctaattgtccagctgcagcacgcacaggcaaaattatttcatagggacccaatagtcaactgtcttttgcatataatttaccttattaatgggctttgagcaggaaaccgtagacaggtcatgggcatgaccatacccgccacacaacctatatatacctttctatttctatacgaagggatatgacaacctacatagccaaaactctgccaatattacattcgcttcttcttcaatagaaactgagaatgtaaagttagggtttcttgcatatatattgtaaacacatcaaatacatccttaaaggctaatagactggctcgtggactaaggttaatgtacacctgaaccacgtaaaaaattgccatctctttagttttgtattttattatttctttaattcttaaaaaattagttttcaaaaatattattaaataaaatttattataaatgatttaataaaggctcattgttcctaataacttttgtaagtgaatctgttacaaagtaacttatgtataatcaagttactaatattattatcaatagtatgggacaataaaatagaaagaaaaaacatgtaaaattttattaaagaaaccacaaaatagaaaatatagattactcaagtgctaagttaccaaattatcaccctaaatacatactaaacattagaatcatattggtatacatatatagatagattgatatagatagttagtaaataattcgcactttccaagggttgcttaaaaataattatttacatgaaataaattattttttatttaatgataactatgtcttaaaattgtataagattttaacttattaattttacctacaattattttttgaataatatgagaaatgaagtgtacaaatgactggacctgacttgtatttacaaaatttattttttataacagaagcatgacatgatctgtataattaatgttggaaatttataggtgcttcaatagaaaaaccaatataattaatgttggaaatttataggtgcttcaatagaaaaaccaatgtcaaaata

SEQ ID NO: 70588 - DNA, 2678 bp, Cannabis sativa
tcatataacttaagaatataaatttaaagttgctcttatacaaccacacatcactatgaatttatgactgtccacatattctcatgtacgtagcatcattttcgaaagaaaattattaaaagatattattagtacttaatattttcttatgtgtcatattgttattgatgtaattaagtatcgactattgagtcctatataacttaataaaataacttttaagaaatatcgttaaccaatcataaaacgctacttataaaaggtgctgaatactattggtgttcaatatcaatgctcttttcaaaaagttaactcccaaaaagtgtagtgtgagaattaattaattaatttctttttgtaataaggaattaaataaaagaaatttttaaaaatatttttttatgttttagttacaattttacaacttaaagtattttatttacaaaaatatacttttaaaatttttaaattataaaaatacactttgcacaacaaaaaataaaaaaaaaacaactaaaaaacataagaaatcaacatcacgtgttcacgataactatatgaataaactataaaacaactaaaatacaatatcatcataacaaactataaacgattattgtaaggggtttttacaaaaatactggatttttgacaaaaatttacaattttaatgccacacaattttttttacaaaaatactctctttttgtaaaataacctaaaacaacgaaacaaaacaatataaaataacagtttaacaactaaaaaataacagtgaaaacttaacacagtatacagtatgaaacttacacaatatttataaaaaaaattccgccccacattaaaaaaataaaaaatgttaaaaatttaatatgtggtgtaaaaactcctgaattatttcagtgatgaaatttttttccaaatttttggtgtattttgtaaatttttcactaaaagataattaattaattaccctttgaaaaaacgataattaagtttctctttgctatattaatattctatatgtgtgtgtgtcatttcagctactccaacttgtgcatttattatggataataattaagagatatataatagtgaagggtatagtaatagtaatagtatagtattatgatgtagacttagccatagatgtctatatatagatagtttaagcccataatgatataatgttaataaaagtcatttaatttgtttttaatgtgctagcatatatatacatatataagtgatatgtcacttttcctttggctttgaatatatataaacatatatataatctacacaatttggcttatagcatatagcatgcaatggttggccataggtttttttttagtgtttgaatcttatccatataaattgtctaaaatatcagcaataattgatgatagttttttaatgcaatgtagatatttaccatcttttaataattatgatcatcattcatgcaccacatggtaaaagtcaaaagatcaattgtgaaatgacaaattttactattcgagcaaaaaagggaaaaataagacattcatcaaaatatatgtcaaattttaactacttcaatcattgaaaaactatctatttattatatagatataataagcaaaataaatttatatatagaatgatttacttttcctaattattgttatgttatgtacatctaataataatgataataaataggatttttgagtagtgttttaaggtcttacctattaatttgagtgctcagtttaaaattgtaagtgaaattgatgaatatacacaataatcatagttaattaaataattaaatagatatatataccatatttatatgtttcggaccactaataataatattaaatgaagaaattaatgagaaacatgtacattatttagaatgaaaacttaaccacaactccgttcactactgtaaaaataatatttaacaacacttaataaaaaaagtgttgctaaattatttgtttttgtaattagtcacacttaaatttaaagtgttgctaaagaactaatattcttaaatatctttaattttaaataaataataatgactgaagtactttcaaaaaagtgtattcattgatgatgaaaaaaaatttaagacaacactttctacataaatgttaccacataatctagatttaaactgatatttaattagtggagtgtaacttcctttatagatgagctatcaagaatgaaaaaactatcattttctcagtctaaaccaccattaatattaagaatttttccaagaaaattctacagtctcttaacttaatacaacatattgggtattaattaatttacaaatcttagttttttaaatatttacattccattacaaaagctttaagtacattaattattatatttcaatgattttttttccagacatgcttcagcatcgaaattcttataggattatactttcagctctaatatttggtaattttttaattttctttgtgtcatgaaactagctacttggaattcccataagaatttttttttttattgtatttgattttattttatttcatcaattatctttctctaattaatatgtgtagtatattctttatttttcaatctgtgtgtttgtattggaacacacaatcaataaaatgattatacagtagaacctctat

SEQ ID NO: 70589 - DNA, 1533 bp, Cannabis sativa
aattttatccatttactacttattttaattttaatattcatttcaacaacaaactaaagataaaaatagtaatcaattattgttaccattaccctattattatcattaaaattactattccattcaactaaatcaaacatcacttacatgataatatattttaaatatatttacattctattactattgaatgtttattagttttcggtacatatagcaattttatttaggattgataactacaaatattttaattgtattttattttatcaactacaaaattttatttgtattaaaatggtaagattgataactttatgtaatatttaacttaaatgtttgtaatttagtttttttttttttaaatatgctcaagttaatattaaaaattatattataagttgaaatctaattaaaattaatttagaatctaattactaattgaatttaaataatatttttaaaatctaattaaaaattaaattagatcggatcagtataaaaaatattagactgaattgtgaaaaaaaaatgaatcgggttaaaatataaaataatcggaaataatattttattttgttgtttactaaactgactggaaagtaaatcagaatcatttttattttgtttacataatcagaaaaggtaatcagaatgacttaatttgactaaattaccattattaaaacatgtaattatttttaatttatatgtttttgaagaatatatttgtctttttttatttttaattaataaaagtataattaatatttagtaagttaaggaaaaggaaagatattcccaataaaaatagggggagaacctttcattttattttctcattaatttatgtgagccctactagtttctcccattccaaaatttagtaaataaatgaatgggaatcaatcccatacaattaactctcattccccttgagtaaacatgccactataataattttcatgtataaaaggaaatttggattttttttttcttcaagtaagcagagagtttttagctaatgttttttaaaataagctttaaattaatttactttattttctcaaaataaaaatcttgaaaagaataattaatacatatatattttaaaataagctaatgtccttgcacccctaaattttttttgattacttataaaaataaataaatatatatttggaaagagaaaatattgtgaaagtttataattttttttaattaatttttaaaatggtagaagctcaaatactccattctaagaaaacaagatcaaatgctttgactattttcaaagaacgattagtttttgaagaacataaaagaattttttttagtatcaatgccaaacatactcttagaaagagcttgcctatgtagtgacaaaaatcaatattaatggtccatagctcaaagaatttgtcattttagtcaagcccatggctgaaagaatgaattctaagacaaatgtcataaaacttgatataggggttctcaatgctcatcaaatccaatcctcactaatttaattat

SEQ ID NO: 70590 - DNA, 1452 bp, Cannabis sativa
  modified_base (780)..(780): a, c, t, g, unknown or other
  modified_base (881)..(881): a, c, t, g, unknown or other
  modified_base (970)..(981): a, c, t, g, unknown or other
ctgtcaactcttgccaaaaaagtactttacaatatacaacaatttcaatcaaaatctattaaaattttacattataatatacctttttttttaattaaaattaaaaaagtgtgtgtagtgttatgattttggaataagagggagatcaaattttgatttttcagttttaaaaatatatttaaaacgtataaatttcaatatatatatatatttacttttcaattttaatatacaaaaatttataatgtcttatattaagattttaattttatattataaattttataaaaaataaattgtaatgacaacgaggatgactatatataagtgagagatacggtgattataataatgatgcatataagtgaaatacggtgatgataacattggtgattataagtgagatacggtgacaataataatgatgactataagcgagatacgatgataataattgttgagatacaataatgacaacgatggtaaatgataaaaatatatataaagatcatgcattatggaaaaacgtgtttacttaaataaaaaataggctaattaaatgcatgttcggtaacctttttgttttttatttttttaaatttcgcttaacaaaattttgtaatttgttcacggtttttgattaattaatcaaaaaattgattatataattgttaccgaacaatgcctaagatttttgccccctaaactttaacatataccaaatcatgtcccctgaatttttctggcctttaaaaaattccccctgaactattaaaattnttagatttaaggacttttttccaatttcatttaattttactattttagtgattgtttatgtactaaaccatgcttaccaagctttgatatctaccaaatcntgcccctcgaactttgatatgtactaaatcatgctccctaaacttccatccatgttagacattttctttactaaaattggacaaaagtnnnnnnnnnnnncaatctcaatagttcagggggtatctttaacgaccttaaaagtttagggggcataatttaatacatatcaaagttcggggggcaaaaattctaattagcctaaataataataacactctaacttttctagcaatttttttatattaataattttttaagaaatcaatttaaaataattggataaattttcaatttttaataaaaaataatataacttttcaatcatccaaataataataattaataatatgtttaatagtattaaaaaaagtattttactttttaataaatcaaattacattgtgtaattatttattattattagtaattagacaatgtaattataatattattatttattacaataatttgtttaaagttaattattattagaaaattctataatgtacccccttataaaatagatacactgatacatttctatctgttttagtattcgaaataattttt

SEQ ID NO: 70591 - DNA, 1249 bp, Cannabis sativa
aaaattaaatcccataaaaatgcataataaagaagttgaaaaaaaaaaaaaaagaagtatattttatgtaatttccactatttgtttcacctcttttataatattttttttgctacattgaaattccacaaggttggtgtagaatttggaggagcaattaatatttcctttttggcaaaagaattaatgttaccaattaagtgttaagaaaagcacttgtttatgtacttataaaaggccatatatttttggcttcaagctccaacaaatgtgcatgttcttttactctatttggctttaagttggtgaaagtttttgaagggttttgatatgcaaaaatctgtcacattgttattgctccttttcttcacttgtgttttcttaagttgtactctatttgctttcaaaataaataaaaatggttgtactctatttgtagtagaccatgtcaagatataactttcatgattattttcttatcacaaatttatagacaattttttggacaagttctcgaaaccctcatacttttattgatcctatatatgctttgttgtccgtttagttattaaaaacctccaaatcctatatagctttaaaattattacaaaattttaaggtctatcttttgattgttttaatggatatttactcaaagacagtaaattttgtaaccttggcactccacatatacacaagtttagccttatttggaatctgcttgggacaaagttttcctgctaactttatttttggtgattctctggttgacactggaaacaacaactatattgtttccttatcaaaggctaactatgttccgaatggaatcgatttcggttcaccaactgggagattcacaaatggaagaacagtcattgacattataggcaacattcttcttttaagattttgtttgtttgtttgtttctcctcctcataagtgctacaactaagattttgattttattttaacaggtcaagaattgggtttcaaacatttcgctccaccttacttagctcccacaacttcaggaccaatagttcttgatggtgtaaattacgcttctggtggaagtggaatatttaatgaaactggaataatatttgtaagctctactaagtacttgttattgattgttgaacaatctagtttggtgttgtttagtaagttttacaagttttattattattagagtaaataatattttgaaccctgtgtttaacaaaagttaccaattagactctc

SEQ ID NO: 70592 - DNA, 7157 bp, Cannabis sativa
ggtgataggtactatcactgacgatattcaaaaaaaaaaaaaattgccaatgactttgtcattggcaataatatgcatcttttttatttttttttattccgaaaatatattaatgatgacttttttttcattgataatgttatcaatgacgaaaaaattgccatttatatatttatttttttaaaaaaaaatgataaataaaaaattatttatattaaatattaatttttttactaatcaatttatattaaatattttttaaattaaacaatatacaaaagaattaaattaaaagtaaaatgtaataacatactaaatatttttatatcaaatatcaaaaatcaaatataacaatatcgttaaacaaaaataatatttactaaaagtaaatgttcataaaacataaataaacataaaactaattgttcatataactacaataaaaatacgaaaagaaattcgtagtagcgtcatcagcattagcatctctcaaaatttgttattgaggaacatccgacatctgtgggtcgtatggagacatctgcgaactcatcagcatctgagaagtctgttgaccatgtggtgtcagcatatgtaatgtttgcttcccatattgttgcccttgtggtgacggcatcatctgaaaagtctacgacacctgtgatatttgttgtgtcagcatcctttgcggtatccgggattatgagacttgagacgtttgaggcgactacatcatcatcgttatcattacttgtgggctatttggcgacggcgactgttacatcatctgcatgaatgtctgaaacatctaaaattgttaaaattgatgaaccatttgttcagggagttgctaaggctactaaaacaattgctgaaatgaaagtggagcctattgcgactattgatgccgaaaacccattggctgaaaagatggaccagatccatctccaagcatgtaaaagtgttacggttgtggacgcattggttgcgttggttgcgttggagcagcctcagtcatcattgcttccatttgtgcacgttgttcaggtgtcattatttgtgtcatcacttgaagttgtctttgcatctgagttacggtttgccttaagtcaggttgtttagtagctgcagcaagttgtgagctccgttttgatgattgccctttcaatttgcaacccactcctcgctcgtggccagacctctctccaagagtctcacgaagtatctcaatctcaaaatcttgtgtacaattaggactagattgactgtcgtattttgtcttcatctgtacctattttatgaataagttagaaaccaaacaaacttacaattatttgaatatataaaaaattaattagtttacataatcttacatattgatttttggcatactcgttgacaaactcatatgtgcccttctttgtgtgacaaaccttccaattctcaatgcgacctatgttttgctgatatatataaattgtaagaaaattgcaattaaattaaacttcataaaataaatagtatatatattaacttatatttttatgaagggtctcagccagagttatcgacccttgtgttgaaggaaatttcattatctgtcgattaagagcattttgtttagaacgagtaataaacttaggagatgtgaagaacttacatagtagccgccattgttcttcattgagttcattagggggatcttaactgcaattttaaagtcttctaaatttttgtaaaattctaatttgaaatgtacgagtttaatgttctttctcgtcgtatattaatttttcggccattttagctaacgaaatagctagtaattttggatcactgtcaatttggtaataatactgcatttgacaaaaaatggtgtaataacatactaataatatcatttgttaatttagatataaattttaaaaaaaaattacccgaagtttggttaaaatgtggtgttcgtactgctccgggacatttccccaactaggaaaatgtctaggaacatgcaatgtatttctctccctaccaaatgagggaaggctttactctccaaccctacaattatgttagagacgttgtcaaatgctaatggcaacgacgtcccaactttttttcttctatcttccaagttagccaaaacattcctcccacgaccttttctcgattcactaaaggtctcgcacaaagtaggtacactagtagaatctaacgggtcatcccctccaccatatccaacatgataacctgccaacatttcatgctaaaaggaataacaaaatcatatgagctcttactttaagagaatcaaaacaactaatcaacttagattaaacaataatagtacaattagtcattcctcgaaacataataacattacaaaaattagtcatcaatacaaacaatattaaatacattaatcataatcatcatcactaatcgaatttgaatttgtcgggggcgcatcttcaatttcatcttcaagacgatctacaagcaatttatcatccacatcttttacaattttttcatcttcatcatatctaatatcatcaacatctggaaccatcttggaactttgagggacatcaacaatctttggcggttgattagattgttgcacaatcaattcctccaaatccacaaacaatgtaaaatttgatgagttatcatcatgtaaaatatcaacatcatcagtctcattagaaccttctgtaaaaatattttcctaaatttggtgatgatgtacattatgaacaattctctagttttgaactctaacaagatcatctggaaaaaaaaaaacttgcttagcttgattagcaagaatgtacaagtcatctttgtaccatacaccactgacatttatgatagtgatgttattttcggtaattaattttttctttctcgaatttgtgttgaactatttacactgaaataatactaccgaatatgcaccaataaaagacaaatacaatatttcttcaagtttcccataataatcaaaactttttgtccctgcaatagacaccccattgttttaagtattgcgaactttatctcgactatgtacaacaaattgaacaccattaactatacatgctagatatgaatacacaacgagattagacctagatgccaaagctagtaattgatctctatgttctaatgacccgagcttatacaaaaaaaatctaaaaaaagaaatataacacttagaatttgagagatttgatgattaggaataagtaaatattaggaaaagaaatttcacaccttcttatgaaatcacgaaggaaattttttttcatgtaaaaggttatggttagcgtttgggttccttcgtctaattatttcgaggtgctctctattaaacaaaaaagttattacaaatttagctaaaaagaataatataattttattcattaagcaccatgtaatcatttgattaacttacgtcatataaagagtcgatctcaatacaattccctaatacgtaccactcagctcttttgtgagtcttctcgtcaagagttgttattatttgctttctgagtgaaagacattgagatttgaaaactgttaagtatcaaaatagaagaggagcatattcattgcactcaagacagttaaattttgtatgcacgcctttgaagtacatagaacaaaatgtcagtgcctcatctataacatatccttcagcaatagattcttctgtgtgtgctttattcctaacataatttttcaactttttcatgtatctttcatatggatacatccatctcataaaaactggcccacgtaatatggcttcctcaggccaatgtagcaccaagtgtatcatgatatcaaaaaatgctagaggatagatcctcaaaagtttccacaaaatgtgaatgagatctccttgtgccttctacatatctttaacattcaatgtcctagaacataaaattattaaaaaaaaaaaattgcacaattctattatggtgcttgatacttccttcgacaaaaacttgtcaatacatactagaagtaacctctgcattatgacatgacagttatgggatttcaatccaacaatattgttattagttactctcttcttcaaagtcgaaaaaaacccatctagcaatttaacttccttcagaaatttacaaaatacttgcttatcttcagcagtcaacacacaaggggcatggggtttcagcaatctaaactgagtgtcttcgtaaatccataaggagtgacaaactcccatatttttcaaatcttgtattgcactagtggtgtctttagacttgtcattatctaagagggtgccaaggatactatcacaaacattcttttccacatgcataaaatctaagttgtgtttcaactcatttgtactcctatactcaagttcataaaacatgcttttctttcctccaattcatttagctagtctaccagtggcctcaaaaatacatccatgtccttaccaggtgaattagctccaagaataaggagagtcaacaagaaattattatccttcatacacatccattgtggtgaaatgtaatttgtcaacactacaggccacatactatacgattggctcatgtttctaaaaggattaaatccatcatcagctaaacctaatcaaacatttcgcggatctcttgcaaattcaggatgtctgctatcaaagttttccatgcagcagaatctccaggatgacgcataacactattttctttcacgcgcccactacgatgccataccacctctttggctgtatgtcttgaactatataatctttttaatcgaggagtcaacgaaaagtaatgcatcaccttatgcgctactttttttccccttgtgttcatattaatccatctattggtcccacacaccgggtagaaatctttcaatgcatgctaatagtaaaataagcaacaattattcttgcacacatgaattgattcgtaccctgggcgtaatttatctagtttcttctttgtctcatagtgtgttgtaggaattttcttatcctttggaaatgcaaattttagaaatttcaacaattaatcaaaaatataatttggtattttctccaaaattttcaagtgcattaactttgctataaagttgagggaggatatccaatctcaactagggtacaactctgtctcgatctcctcaaacatctcatcataaaattgacccttcttaatgccatcatcggtggctctttcttcatcgtttataggacggaagaaatcttcaattacatcaaccatctcatcgacatcaacattgttgttagcctcgactggttcattcgactccccatggtaaatccacccctcataactgctttttaaaaccctttgtaaagatatgtgtttgcacagtgttcaaaggatgcagtctggtcttcttacatctaacacaaggatagaacattcttctgtcataatatttgtgattagacgcaagtgcaataaatacttggagaccttcccaataagctggatccttacgatttttcatggtcacccaagtcttatcgattgtcatctaccaaaaatttacaataaataaattataattcaatttgtttgtgtgacacaaattttatgatttatgtacaagttgaaataatggtgcttttattttattttacgaaatttttaaacttttatttgaaatagtattttcataattctaaatgaaatatttagatatttaaatttataatatttatctttcttttaataaaacttagatattatataaatttcaaaaatttattacattaaaaaactaattattcaataatttttttagaaaaaaaaaacaaaattaaatattttttagttaaattacttagtttaaacattaaatggattgaattttaatatgtttatagtaaaacttagatattaaatatttttttttttaaaaaatcaaattaaaatctaattatttataaaaattaaaaaaaaaaacaaaattaaacttttttattacgttgttttaaaattaaatgcattcaattttaatatgtttataataaaacttaaatattaaatacattttaaaaaaatatatcaaattaaaatttaattattttaaaaaaaataaaaataataaaattaaacttttttttagataaatacttagttttataatgaaaaatctaattatacttggaatagattttctgtctaagtattcggcaagcattgactgcaaacataagatggtaacttttcagccagggcaaagatccatttatttatgtttgatcttttcaaggttcttgaatcccgatcatttcaatttcaaaggctaaaaatttgttacacagtggatgtgtaggatttttagcagttgtaattgactccagcagacctgaaacatttaggcatgaggatgtcagagttgtatgagaatttcttgatgtattttctgaggagttatcgtgattgccacaatagcaagagatagactttgtaattaatttggcacctggggtaaaacttgtttcgaaggcaccatgtaggatggctccaacagaacttaaggagccaaaaataaaacttcaagggatgctagatctagggtttactcgacccaatgtattgccctagagagccctggttttatttgtgagaaagaaggatggattcctccgcatgtgcattaaataccaggaattaaacaagctgacaatctagaacaaatatccattccccatgattgatgattttttcgatcagctctagggaaagattatattcttaaagattgacttgcattccagttatcatcatcttagaattcgtgaggaagatattctaaagaccgcatttccgacaaggtacggtcattatgagtttttggtgatatttttcgggttgacaaatgctccagcaacctctatggatcttatgaacagagtatccaaggatttccttggtaattgtgttataatgttcatcgacgacatccttgtgtactctcagacgaaagaggagcatgagcaacatctccgaatggttttacaaagactcagggatcataagttgtaagcaaattttaaaaagtgtgaattctggttgtcagaagtgtcccttttagggcatattattggaaaagatgga

SEQ ID NO: 70593 - DNA, 2316 bp, Cannabis sativa
  modified_base (43)..(67): a, c, t, g, unknown or other
  modified_base (810)..(816): a, c, t, g, unknown or other
  modified_base (895)..(895): a, c, t, g, unknown or other
  modified_base (1119)..(1125): a, c, t, g, unknown or other
  modified_base (2239)..(2281): a, c, t, g, unknown or other
aaccatgcaacataaaatgtaatttctgatctttattagtaannnnnnnnnnnnnnnnnnnnnnnnnatttagggcacaaaactcaacatacccctactgccttgcaacatagaaaattcttgcaagctaaccttgataccctcttgtttaaggaaaagacctattggaagcagagatctcgaatccactcgcttcattctagggataaaaaacacctattttttccataaatttttttgttacatttacgtaaactacgtaagtgttactctaaacactctcggggacttaaaattaaaactaatagtttctctatcaataaatagcatagaaatgccctaaatattgggaaatcaccaaaaatgagactttaaaatattccccaaaaaatagcaagctgtttttgtaaaaatggcaaaccatttttttgggtcactgccagtaaaaatggtagaccaattctgtaaaaatggtctgccattttctattgaagattttccaaacatctcatttctaactcaaaactatctcaaaatttatgaagctctccagaacacctaataacaccataataaacatattcctgctcataaatgtaacatcaaagtcttttgtcaaacttcaccattgatgagtcaagattgagcttcaaaactcaaacttaactcataccaagctagaaccagtaaaacctcatttacaacactccaaatagttctaattcaacttagaaaacagtaccaaaaccactctagctcaaacaaaccttagctcaaaaaattacggtggcgtttggtaacacttttttnnnnnnntttctatttttaaaattagaaaagtgaaaatatttttaaaaaaaacatgttctgtaaaactgttttcacttttcaattntttaattaagaatcaaaatttaaaaaaaacattttcaatatttttgtaaataatttttttaatcaatattttagactccgattagacccggacctaaatctcccccatcacggtcttggcgctgaacccagcctctgacccgaacccgaatccgacccagacctagacccgacctaaataaaatcaaaaaataaaaataaattttacagaacacacttttattnnnnnnntttaaaattaaaaaacaaaagtggttgcagaacgtatttttatttttcaaaaacaaaaattttactttcgttttgtgattataaaattagaaaagaaaagtgttaccaaacgacacctacatactcagacttaacctaaggcttaataaatttaagtagagaagagctagaacttacctttgattattcttagcaatcaacccttaaaatccttgccggaactacttgattctaggttagattgcagccaaaagttaaagttcccttttggttctatgaaggccaagagagagagaaagggacttttagtttcttaatagatatccatcaaatttcattggttttatctatattaacttcagataagatacttaggcaaaaagtctagaaattccaccaaaaagataagacaaaatccaaggagaatttaccaaactacctcgttaacttactacttaagcaactttaatgcttaggggtaaaatggtcaaaaattgttatcctgcataaatctaatattccatacataaaaaaaaatatttgatttgctaaataaaagttatgaaactgaatttacgtgactctaatagccaaactgttacattcccactgttactgagcataaaatatgaaataaagcatgttagacatatattatacacctagaatttaataaaatttccaaaattgagaaattataattcaaatgactatttatttaaaatagggcccacatacctaataaaaatatgcaatcatataatacaatttattaatgctaattgtctactatttctatattctaatatgtgatcattacaatgtcagtaatatgatttttagatattctaatgctctcaaaaataaatccctgagaatcatctcgaggcctccaaaatggtctccaattaccataacttttgactagaactttttcttctcaataaaatttggcggttcataaacccaaagataaaatctaggggttatgtccaaggtcagaataaacaatgctagtaatctaatttggagatattctaatgctctaaaaaataaatccatatttgtaagccaaaatgatacccctacacatgttggatattattttaccagnnnnnnnnnnnnnnnnnnnnnnnnnnnnnnnnnnnnnnnnnnnatgaacttctaaaacgattaaaaattaaacacata

SEQ ID NO: 70594 - DNA, 678 bp, Cannabis sativa
  modified_base (48)..(59): a, c, t, g, unknown or other
aaaaatatgatatataatccaagataatataatacaatacaatacaannnnnnnnnnnncggcgttccaaacgagccctaaacaagttaggcagtactgtccaatctatagaaacaaattttctccggtttccccaacctattaacaacatagcatcaaatattaatagcttttatgatttgaaatttcttattttttatttattcctagagcaaagatgtctcacaatagatagaagctaataaagttgcacgtaatttagctcgttaatcgttatgctatttgcttaaataaaattgtatttagttggatgccatttcattttaaattttttaccatgttggtgcaaatttgcaatgaattctgttcgtgaaaaatagccattactcttctttaaaaaaaatgttagtaaggtatataagcatagaggattttatttgtttatatatgttttgattttgacatctttttctatgtattcttttaagttttaacacatttaaaattaaatgaatatgaatatgcacttaatgtatatactgaacagaagtcatcacatgatcacaaaactcgaggtgcatgttttacaaatataggcacaaaatagagaaagaacatcaggtaactgctctacaaaatcatattcttgtgttccttttcagctaagtatattacatt

SEQ ID NO: 70595 - DNA, 1256 bp, Cannabis sativa
taataaaatcaaactcaaaatttcatgcaattgcaaacccatttaaagtactaaaaagaatacaaatcaaactcaaaatctgaaaaacaaaatccagtcggacccaagatatagtgagtcacatcaattactgtccacctttcccgtgagccacatccacaacgacagacacaacacagaaaagcagagaaaaaccagccgagacagcactgagcctcccatccgcatgacccctcaacagtgagatcatcccctgccaaacaaaataaacatagtttttgtgtgtgtgagagacagagcaataattaagagacagatcagagatcagagatcagagacgaacaggagaaagagcttcccatgcatggccggtctctaccccttgccacgtactgaatttctagagaacacttctagctcactaatatactaatattgaacacaaaaagaaaaaagaacacactcgcatatacgtttataattgattttgtataatatatatattaatctaggtcattcttaactaaggtaggaatacaactggagctcctagccagaactccagcacttttcctttgagaagaattaatccctttataatccctaggactgagagacctagccctaccacttattgaactcttcttcaaaatttgcttgacagcttcggcttggtagagaagaggatgagtcctgccaagcttgttgaacctggaacaagcgctcatgtgctctttcaacgcctcttctcttgtcactcctttcttctccatctcttcgttcaccgcctccgcgcaaatcccacacactagcttccccgagtacttgcggcgtaggcggcttatgtagtcagccgtgcactcttcggccatgccacagcattcgcatttggccagctcctcatcctccgttatggccgggaggtccttgttatttttgtgatgatcatcatcgtctttgtcggtaccttcaatgttagaggctagttctttggtcatgagctcgagtgagatgtcagatattgttctttgaagactttccattgagagctttgccggcgcctcacaactatttgtcaagttattttcttgcttattctctcttgaggatgagccaaccattattaggttttctctgttgggcgccataataatttttgtgatagtacatagatctctatctcttgcctgactagaaaattattattgaatgagtagtttaggagatgagaatatatactaagcactaatgcatat

SEQ ID NO: 70596 - DNA, 915 bp, Cannabis sativa
atggatgcaaattgatttaggaaaaaaaatatttagattatttgtatgatttttatgagttacttttcttaatgctttctttgtgattaaaatttaccagatgaatagaggaagttttcatatagattggatttgtaagttttaatcagattataaactacttaattcaacttgtcaattgaataggaagaagtgaaattgtgtaattgcattaagaagaaaaataaagcgcagttgggtattataataatccttgtgtttattattattatttctttaaattttaatcattgtcttgctttatttattttttttacaataatttttatttatcaagtagaactaatgaattaatagattggtaattgataatcaatcttcttagaaacgatactctactttatcattatattacttgatccgattgcgtatacttttgtactaaatttaccgaacaatgacttagaaggtgattgagagcttacgtttacagtgggcatgagttaagaaaattagattgttttgtgtgtgttaatatgtaaatttggattatttgtttattgaaatatgttgtatttaatttataacataaatgtattttgtaactaaatttcaggatccccatttattaatgttaatacaagtaaaattttaattattaatatttttattataaatgtattttaaattttaaaattctttgcaaacgttgacgcaataaaaaaaccactactacacccaattcactttttgaattttttattgtgagcttcccttatccaaaaatagttttactaaagcatttaaattaatttactatttagaaagcaggctgaaagtcttgtcttgtgacatgttgagtatgttcttttgtctctaagtttttgtctattgctgtcttggattgttgttctt

SEQ ID NO: 70597 - DNA, 943 bp, Cannabis sativa
  modified_base (654)..(656): a, c, t, g, unknown or other
tttagaagttcatatttaggttgataatcaacatacttgggagtagatctaagatcctggtaaaattaattccaacagcaacaacctgatacattttagtgccctgaattttttcgctccaaactgttaaaattatctatgaaagctaggatgggaggaccacatcctaaagtacttaaagggctttcttccacttaacaaagtcggatgagtagataccactgctggtgtgtgatcgaacaagccttctgtgaggaaaattgcttctgcagttggaaaaaactatatccaagcttcattagctaagaccctgtcaatcttggaataaattctatatgctgcacactgcttattactccaggtgaagtagcttcccgagtatttaatatctttaagttgactgcaagaaacacaattagcaaaggcattcgaattactaggccttactctttcacctaggtgctcatctttattaagaatatcattaaaatctcctagtactagccaaggatcagtactagaaagatcttgtagcccgtgccataattgctaccttccatgatcttcattaaataatttctaacacaaacagatacagaaaatgtaatcagttttgttataacatcactagatcagattattattaagttttannntgacaaaaaatcagttcaggatccgattgtataattttagaaaatacatggtcaattttgtcatttaacaaaacagacggtccgattagtaatttttacaaaatataggatccaaaatggcatttacccatatatttatataaaagaaagtactaaagaaaatgaggtgacatcctataatattttaatctattttaaaagaattttagtaaatttaattcattttacatatttgtagatgttgagatatatgacttggtaaattttttttattatttgtaaaaatc

SEQ ID NO: 70598 - DNA, 756 bp, Cannabis sativa
tttttttttttaatttaagttgaagaattagagtagtattatgtaagttttatattttattagttatgagatcttgatatatgtcacttcaaaaaattcaagtcttatattgacacctccatattcacacgcaccactaagatcagaagctgtcatacccaatcatagttcaaaaaaaaaatgatcttagaacaatcaatcgttcaagaagtagcatcagtgtttaatatttatagaggttcgactaaagggtgttctacctgcaggtatatgtcttggtttgaggttgattgtttgagtggtttatgattgtttagtcacgtattaatttaaaatcgtgttattataattaaggtgtagtttagaacttttcaagaaggcttagtgcaattattttcatcttcggtctgtttccatactaaccattaaggtaaggaacccctaatactcttttattggtctaaaactcataatctttgtttctatttttcttaaactgttgtcacataaaaattatctcatctctctgaataccgatttgtttttaacgatcttagcattgtttgaaagcttattcaaatatctatgtttcctatgaagaaatatttttttacaattcgatattattctatatcgaaaattatcatctttctgttgctattgtaattcattattcttcatattttcagaaaaaaaaagtactttcacttaaaatacaataactcactcaattctcatccatttttaatgatctat

SEQ ID NO: 70599 - DNA, 1031 bp, Cannabis sativa
aaaaaaaagtgttttcattagttatcatgacattttaattggtagtaattaagaaaaaattttcataaaaaataaagtgatttaagtgttgactaaatgatccagctccactggccaattaagcttagggttcattgatcaaagtatcatggaataaattaattttttatgagatgctaaataattatattggtgagactcctcttacttatattagttctcttcactaaattaagaaagaactcactttagatttaggatattgttcgatcctctttggcacccaagaaaagtaccaatcgtcctataccattaataataactaattatttttaaataaatatttgttgtgttggtatcgtgcttatgacaatcagtagtctcataaagtattgagtaagttgtgtaatcttacttagtttggggaaggtcaaatataatgattctgagactgtgtaagtataaatatacaatttaagagagtttgaatggattgatgagatactatttatatcaacaaggtgtatcttattttcggtagctcattacttaattataaactctaaatagcatatttaacttgaagtaattttaatatgtgtgacttactgtaaagatcaaatatatacatgtgagacttagtattaaatttataacccaataatcactgtatattgtatatatatgatcatgatgtatggtataaattgcaccaaacaccctatatatatatatacataacataacccacaacaacattactatatattctttaccaataatactgttcacccacatataatatttatatatgtatatacaaatacgtgtataccattctattttgtaaaaaaaggagaaagaaatagaagaataataggcatgcacgtacagtgattttgaaaagacaaaggaaagaaggagaggtatacctacctggcttttttccaaccgttagcagctgaaatcacctagattaatgacttattataatatatacattattgatcaattaatagtaatatatatat

SEQ ID NO: 70600 - DNA, 2640 bp, Cannabis sativa
ttaagccaagctcaaaagaaattaacatttcacttcaaatagttatagaagctatagattttatatttatggttagcgctctcactcaattgtactaccatgttcttaaggtgtatatatatgtgtgtgtgaatgtattatgagattttttctctttttattctgtatttattttttttaaagaaaacccctaagaccacctttcaagcaatgagcttgaagagaaaatggggataatgattcaattaattcatctcatgttgaatgagatcatggataccagaaggataacaaggctaccaaaccttgctaataacttccgacaaggcatatttatccaatgaatgggcaacagcattaatagatctagaacagaaagagagactagcgtagtgaaattcaaaaaatactatgtctaaaatctactaaaactaaacctaaaaaaatagccaaaatactcggtattaaacttcaaaaccatattcaaacaatcaaattcaaaaattacattctgaaaatctaataaacagcattggatgacaacattttttaaagctaaagcttctgccatttcaggagagaaggcacccaaaatatgtcaaacaacagaaaccataacctcacctctggagtcacgaaccaccatacccaaactacatctatcagtggaagcgttgagagtagcattaacattgctcttcattgtccccctactaggcggcacccaaacaaaactagaagaagcatttgtaggggacggaaagctcccaccgagtgagaagcactaggagaattgtctaatctctggtaattagcaaaaaaatcacgactccaagaaaccacaatatctggagcaatcgcactatcattatgaaccttcttattcctcctaaactagattctccacataatcacctaaatcaactcttaagaggccacagacaaaggatcaagaaacttatgaatgaaatcacacaaattgtgacaaataagaggatcccaaaataaaaaaattatgagattattttggtgttgaatgaaattttatcattttggtgttgaatgaaatttttatcattttggtgttgaatgaagttttatcattttggtgtgaattgttacaagtataatatcattgataaaaaatatttatcaatcacatatataattatttttgaatttatttatatatttttatgatttaatattaaaataaacaaataaaagaaataaatattttctatgaaagataattcaatcaatttaaaccattttcattaccttttctaaaatcatataaataaaataattttaattccgttctagtcaatttagtataatattataataaattaatgtgtccgtttatttagtactttattcccttttatttcacccattttattttagtaaaagaggtgattatcgaacattattatagattaatagtttagcacttgtaaagtcgatgtggtaattatcggactaaatttatggaggttaatctccaaatacaggccaaaacgaaagagagaagcttttacgagatttaatcaccattaaaaaagaaaaaaaaaaaaaaaaaaaaaaaaaaaaaaaaaaattaaacgtatatatgcctccaaagtaagcaaatagattccatcttattacttcaaaatgataaattaaagactctccagcatatatctataagatggtatgactttttctttaacatggtacaatattcagaacacaaaaattgggctcaagtctctgcatgattgtacctttaatttacattacatgacagggttagaaggaaagaaataaaaaaacctcaaaaagcattttaaacaccagctcccaaaaaaaaaaaatcaaaaccgggtctggcatcgtccctatatcctaaaacaaataaacatttttttgagttgaataattaccaaaccaatttaatccctaagttaactttgagttctatggaacttcatttttccctcatccaagacagccatgcctttcctcttcttggtaggattttgaaacccattctcctcgctgacgaaatgagccgctgttcgggctcgtaattcttcaaaggtttcaccctcttttgctctctctagtacctgtaaggttttaagggaaagccagtatagcagttaattataggatcaaaaggtggtttaactgatacagttattgatgacgtaccagatggcgaccatacaaatgggtgtttgaaagttcttcaagggcgttctgtgcttcttgctttgtgaaaaactccacaaacgcaaaacctctgtggttttcactacccatcctctctggcagtcttaggcttttaatctgagacataatatcaagatatttagacgattaactgttttctttttaaggtgattaaactcaatactttacaagggaaacaaaagttagttatcaacagtgtgagtctttaaacataagtcacattaacaaatagaaaatctcaatggagatttcgatccaatatttacttctttttttctccacaacactaagattttgtaaaatattaataccaatttacagagcaaattcagacattttctttgaccacaaggaattagcttaaatctcttttatagtaatcaaagttatcacctg

SEQ ID NO: 70601 - DNA, 3255 bp, Cannabis sativa
  modified_base (3048)..(3049): a, c, t, g, unknown or other
gtaaaataatttccaacagagcactccccgctaattccccgccccgtgtgcatccctaccgatgatacattctctaaatgaagatcttgattttctgtgggacctttaaattccacatcccattccaccaatgagcttggttacaagaaaaggagcctaacctttcacccatgacatcaagagccaccgcatacccacttttaatagtataagaaccattagaattataatgacagcaccaccgatcaccacaaaccccactccccaacggaataccaaggatgacatttatatccagctgtaggaaattttgagacaaagtttggagattccaagccccatccacaccaatcaactcatgaaccatcacatggcccgaaggaacgaccgtaatagggcaaaatgtcctcggccgaggaatccaaggatcacgaaacacatcaatagtatgaacatccccaaccaccttccgcatccccatccgcaacaactctaacccccacaccaaacttgaccacaaatggaatgaaccttggcgatccttagcctccaatgttgacgtctccgggaaatacttatgcttcaatacccgacctggcaacgagtctggtgaatggagtaaccgccacacttgcttagcaaccatagcttgattaaacaagatcagatccttaaatcctaatccccctttcactttcggctggcaaacatcatcccatttcacccaagcaatcttcttcttgtcactctttgtaacccaccaaaactggagaatgattgaacgcagcttatcacacgtcgcaacaggcaattgaaacatactcataagataattcgaaaccgcttacaaaactgccttaataagaatctcatggccccgagctgaaaagaaactccgcttccaaccccgcacccgtttttggaccttgtcacaaatactagtaaacgtacgcttcttagtcttcccaataacggttggcaatcccagatacttatcgtgagtggccactgaccccaagcctaatatacccagtacacttgtacgatctgctggctgaacattcgggctgaatgtgattgcagatttatctaaatcgacttgttgaccagaagccctctcataacactgaagaatccgacgaatagactccgcctccctaccattatctctaccaaagatcaagctatcatcagcaaaaaataggtgagacacccgtggaccagaacgagaacacctaaatcccatcaaatcaccatttagctcagcctgttgaagaagcgttgaaagcgcctcagcacagaatagaaataaataaggtgaaagaggacacccatgtcgtaaccctctcgtaggaaccacacaaccccgaagcctaccatttaccagaaaagcatactcagccaaagtaacacaatccataatcaagtccacccaacggcaaggaaacccaaacttggacatgatggcacgcaaaaagcaccactcaactctatcataggccttactcatatccaatttcaacaccataaacccccgaactccattattcttcttgaagagagaatgtagcaactcaaaccccaccataacattatcatgaatagctctaccaggcacaaaagcactctgaaacgatgaaatcaacggagacaaagtacctttcaaccgtaacgccactgccttagccacaatcttatacatcacactacaaagactaataggctggtattccttcacaaacgcaggcttactgactttcagaatcaacacaacatgtgacttattgaacttcttgacagattgctccccatttaaaatggcaaggcacacagcagtaacacgaggaccaacaatatcccagtacttatggaagaagattgcatggaacccatccggcccaggcgccttcgtggcacctatagctcttaccgcacatagcacatcatcagcagtaaaccgagcctcaagcaagtcacgctcagcatgagagattctggcctcaatattaccaataccctcttccacctgttgcaaagtaggagatgcagacgagaatattgtaccaaaataacactcaatctcacatacaatatcctcttcagtactcaacttgcgcccatccttagtcataatctccacaattgcgttcttcttttttctacccgtagccttattgtggaaatacttagtattatatccccaagagctagccaatccgcacgagatctcaatttccaataacactcctcgcgagataaaaggtcattcagtttaaactcaagacgcttcacctcctccatacggaccaaaggtgccgaaacactaagaaggtcatccagctgtttctgagtttctctaacctgcctaggaatcgacccatacttgctcttattccacgcccctaattgatcagcacacgagccaaaaatatcaataagagtatcttgattatataaaggataatccattgacagccatgtcctattaattatttcttgacattcaggatccttcaaccaatgagtttcaaatcgaaaacacctttttttttatcatacctctgcctcctagtaacattctcaagagttgccacaataggtctatgatccgagttaaggaagtttccatttataaccttaacaaatggaaacaattcatgccatctttggttgcaaaaataacgatcaaaacgttcctgcacatgcgcaccccctgccttttattcaaccatgtaaaacagtgcccttcgaaccccaaatccgccaaagagcacctatccagagcatgttggaattcagtcatagccgacatactacgatcggaaccaccctttttctcatttatcgaaagaatctcattaaaatcaccaccacaaatccatggaagatcaaataaatccttaagcctacataacaatctccaagagtcagaacgacaactcgccttttgggttaccataaaacccagtgaactaccataattccctaccaggacacttaaccaaagcatcaatatgaccagtagtgaacgacttgacactcacctcnnaatcatcattccataataataacagaccaccactcttcccaatgcaatcaacatgaaaactatttgcaaaattaatttttcgcctaattccttccgcccaaccacccataaagtttagtttccgacaaaaaaactaaacttggggagaacttacgaaccactgctcgcaaggcagtcaacgcaccagggttccccaagccccgggc

SEQ ID NO: 70602 - DNA, 1883 bp, Cannabis sativa
  modified_base (1557)..(1562): a, c, t, g, unknown or other
cttgtaaccaggctttaccattcttaccatttacagcttcaaaataacttgagggaactgaactgtcaatctcatctgcaacagtgagtgcaaaggctataatctcagcatatccaagtctatcaggtggccttatttctcttctatctctatctcttgccagctgatagttgttgagatcatcttgatcatcatcagatctatcttggctttctttagtctgcatatcttgtgtctggtctgaattgtaactttgtcttcacctcaagttgtaaactggctgaattaatgtcttttgctgagacaattttagtttgatttgttgtcactttaatggccatctcatcttccctgaacacaacatccctacatatgatacacttcttaaaccaggttcaagacaccacaacttgtaccccttgataccatcaggataacctagaaacagagacttaatggctaggttggagcttgtcgatcttgtcttatatgagcataggttgtgcatccaaataccttgagatgatcatacttagaatttgaccagtccacattattcttgaggggttttaaaatttatggtatgagatagcatgttatttttagtgcttctccccaaaactttctctccaaacgagcactattcagcatccatcttactctttcaagaagagttctattcattctttcagccaatccattatgttgtggattcttgacaactgtgttgtgccttctaatttcctctcttatgcaataactcttgaactcatctgaacaaaattcaaggccattatctgtcctcaaaactttgatgcaacatcctgattgtttctctatcataattctccagttgacaaaggtttcaaaagctagattcttatttttcaacaagaatacccatacttttcttgagtaatcatctatgatacttaagaaatagtttgcagccccaagtgtttaattcttggaaggaccccaaagatcagaatgaacaatattgcttaatttttctgtagtagtatgcattccctttgagaatttcactttacaactctttctcaatgcacaggattcacaaaattctaacttgtccttgagaccacctttgaatactccttgtttgccaagttctatcaaacctctttcactaacatgacctagcctaagatgcaacattttaatgctattctctagtgatttgtctattaatggtggagtagaaccagtgacagtgtgaccatcaagataatatatgccatttctaagttttcccttaataataacaagtgatcctctagtaactttgagggttccatcatctatcttgacagtgtagccatttttatcaaaggcaccaattgaaagcatatttattttaagtttaggtacataccttacctattacaagaccctgattccaccatcatgctttttcacctgaacagagccaattccttcaattttgcatgatttgttgttgcctaacaagacacttccaccttgctcttctgacactgaattgaaaagttttttgtttggtgtcatatgaaatgnnnnnncagaatccaagatccattcttcaccagaattcatactagaggcaacaagaacatcagctgattcatatccatcagcagctaaatcagcttctcccttagacttgattttcttgttttgttctctttttaacttggctatgagagcaagacagtcatctctaaaatgtccttctttcttgcggtaataacattgtttcccttgtgtcccccatttccatgatgattcttgtttcccttgtaatcttttttcatacttctgcctcttgtaaacagaccttcaccacttaattcaatcttgtcatctcccttcctttgaatctc

SEQ ID NO: 70603 - DNA, 1609 bp, Cannabis sativa
aattaaagctctgcagcagattctttatcagagacactttcttttactttcttggctgtcttgctcattgttttatccacaacttcagcagccgatttcgcagttccttcaactgtctctttgcttgtgtcgaaactcttctctactgcttgtgtcatcttaactccagcaccgcccttagcattcgcttcatctatgcctttaaagctgtaaacagacatcaaatggttgctcaaagtcaaaaatacatcaaatgaggaacaaacatgtatgtatgtattacaagaaaaagaagaaaaaacatactctaagtttggtgggaaatagtgaaattgaatatgttgcatgagactcttgactttcttccatgaattctgatgagaagtcttcagcaaggaaattgtgctttgtaatgtctttgtgaaagactttttgatactttcatgtttatgaataaaatctagactttctccttttgttagagtgatttgaatagaaattgttataaaccagaatataaacaagactcttcttttgctagttttgtccatgactttggatttggagtgaaaagataataataaaataaaacaagagatgaaaagagaaagagaaaggaataatgtattagcctttgaacaattattaatattttagttaacatgcaacgtgggcttaatttcttcattctaggaaatctaaattggaaattttcaaacatggttgagatattatagagcacttagttattgggtatatgccatattttgaccgttgatggttgatgtaataatcaatcaattgtaattttcaacccattgttttagagttacgactgaaaaaaaaaaaaaaagaaaaaaaagaaaaactaaaactaaaactctcctaatattgagaagaatattgggttagaaaagtttctctctcatcttcttattttattctcctaatgatttgtttgtttgaaaattatggctagattttttttaattctttctaattcatttttcaattatttttgtggtaaaacaaatgaaaaagaaaaaaaattggtaagttaaaaagtttttcaatcagaaaaagtcttttacactgcccttgggtttttagtttagatcatgtttccaacaatttgtgagggaaattacaccattaaaattataactacatcccataactaaatttatttcattaaatattaatttttttaccataccccattttatttacaagagcgtatttatttagtataccccaaattttttaaaaaaaaaaaaatctcaaagaataggaagacttcctgacttactggcttactgcattggattgttttatgaagaatgatacattacatatattgtgttatcaaaagaaataaaaagaaaaagaaaaatgacaaatggataaagatatagacaatatccagcatattatatattatgaattattaaatttttctaggcataataataagaatccaaagaacattttttcaaagatataatttttatatttgatgattattatgaaatttcaaaattatccattgatgaaagattttatggtttaaaagtttctaactaataaaaaaattataacaatcaatttt

SEQ ID NO: 70604 - DNA, 1180 bp, Cannabis sativa
aaaaaaaaaaaaaatacattaatatatcccttttaagatgtgtatatgaaagcacccaatcatacctcgtgtaaatgaattcgaattacacacaaattaagtacttatggtgactttctaataatactgtaactattgatataaagtcgatacaactaacgttcataattctttgattaaatttaaaaaataattatgttaatttcattttcccttcagtattatatattactttattatgtatttaatacaataattatccaatgtaataaactaaacattatccttatccacataataatccaaaattgcataatatttttttacatgcaaaacgtttttatattctatatacaaaaatatttgttgatgcttattatatctatggtcaacaaaagttgtaaacaaagactttatggttttttgtttataataaagaccttataatattgtttgtttctaaaatggtggttgcaaagtctttctatatcttttttttttcttctttttctttcttgataccaagtcagtctttccccgttttaattaaagaactgtaagtgcgactatatagctgccttgtctaccaaattgttaagatagttatgttatatatttattaaatgatataatatataaattaaacatgtaacaaataagctaattataaatatttactactacaaaaatagccttgaatggtagttttttcggtcttctacaagcagtttcgaagaaatttgcaactattcctgttctaagggttgctaaaggggtgtgagacaactaaaggcataaagacctttatagcgtgagttattatgaataattgatgccataagaaattccctaggtgttaaatcgcccttatcatgatgtagttattaatattttttttgtagaaaagcgtacttgattaataaatataaaggttagacgtcctggtcattacataaaatgtttaacggaatagtgcatagcggaatatcaccaaacaacttgtgggtaaaagcttacttagccacgttatggacgacaaaattataagtcctgctaatattagagaatatataactagaaaataaagaagagtgaatattacaaaaggagacatagttttcaatgacccaacgagactccttcacatttagagcaatgacaactaccctcgaatcgctct

SEQ ID NO: 70605 - DNA, 1357 bp, Cannabis sativa
cgcaagctcggtagcgaattttgcaaaaactgacgctgaaagggcttaaaaactgcctctaaagggggtttttgtagtagtggacgctgctcatactctacgtggtaacaactgtcttacctgttttctagcaatagaaagagattctgaatccccaggtgctcatgatcaggtgcctgtaatcctagtcacacaaatctgggataattcacacttacggttaacccctgactttcaactcataaaaattcaagcatggcatttataactcagataatcatacagagctcggaatgagctttccaacgatataaagaactcccaaatcagagttcgaaatcaaaagttatgcattttcgaaaattcaacagaaactgcccaaaaacacgagcgcgggccgcggcatgcccaaaccatgccacggcacctgggactaattcccaggtccactcagaggagcgggccgcggcatgctccagagcatgccgcgggatctgggtgcggaacccagaaaccagcacctccaacacgaattttcagcaagaactgtactattttcaccccaaaatcataaccaaactaacaatataacaattaggatcactagcaaattaatagatgcacaacaaacatatttcaagcatcaaaatcccatactaaaccaagaattcaggtcgcatgacacacaaacacatgcttcaaacatgcaaccctcaagctcaagaactttgagttgaaacccaatactcacacatattttccagcagcaaccaaccacaaatatcaaataaataatcaaattcaagcttgaaaacatccatgaattattctctaagctcaatccacacaagtcaagagattaacatacaaactaacaagattaagcatccctttcacaacacatgcataaccaaaatcaaataacctaaacatctttctaccacaatatttcagcaagcaaatccatttaaaattcagtaaggagtctacctcacttccaaattcaaagccaattcaagcaatcccaagcatcaagcctcaaaatccccaaaactcccaagcttttcctcaaaataccaagttgcaaatcaaaagagtaagagagggagagggagagggtgagggataaacacaaccagaaaattaatcccttttcccccaaaaaccacttttaatcaatgtaaatcaaatatggtcaaatgacctttttgccaccatggcttaaattcacacatacacccccacaaagggtaatttagtcatttcatgcataaataattcacaattaatttcagattatcactcatcaaataaaatgccaattaaatcaatccaatttgcattttgagcccgaacc

SEQ ID NO: 70606 - DNA, 1700 bp, Cannabis sativa
atcactttcaaataacataaaaaagactagcataaaatttagtatacgtgcctcgcacgtaactttttgctagtctaattataactctctaatcgtataatttgaatatcattatttaataattaaacaaaataaaaatcaacctaattaaaaaaaaaattctacctacaggtacaaatttattttatttatatttatgctttctctttttaataatctcaattttattatatttcaattccattatttttaactaaaagaaattatgctttcatatataaaagagatttagaatgctatagagaacatcatcaaaccagttttttcacctaaaaaatagtttctcttagtatattgtatatttgtgtattatgaatcatatgtgtatgactaaataaacaattataatgagtttaatataattattttatttgggacaggatgaaagtacaataatcatagttcgaaatcaaaaatctaatttattttaacattgttatgtaattaaaaaattgatttgagcaattatattgatttttttttattgatttttgtaatgtttggtcaagttttaatacagtaatacaagtattgaattttatggtgattacaagtgaaatgtagtggtgacaataactttgaatgtagtgacaaatacaattaaaaattagctacggtaatgataatgactttgagtgtagtagtgattacaagtaagatataacgatgataatgactttgaatatagtgacaatttacaagtgagatccgacaataacaactttaccacaaatcatgatttttaattaaaaatatatataattaaaatccataataaatattcattaaaaaaaaacatatataatttaaattcataataaatattaattaaaaatatctgaataatttatacattaatatagattgaatttaaatatttgatctattttatttttgtaataattactccaaatacttttaattattctctttttatttctcttattttttaaattttagtaagatttataaatattaatgaattaactattaagaaaaaatattaatatttaaccctagctaatcacgccgtatcttataatttttgtaatataaaattttgaaaaataaaataatatatgtaaacctaaatatacctctataaattatatataaaactaaaaataattatatctcactctcaaccgatctcttttaatggtcagagagtcagtcatatattttagtgatatatatatttgttactaatatattgtgagcaagatttatgcttttttttttcttcttttttggttcttgactattatatctcgataacatgtgtatgtgatactgtaaaaaaaataaaaacatttagtgataactttttagttacacataaaaatagtatttaggctaatattaagggcatattattagtttttttttttattaactaaattaattttattagttattgggcaatacttcatatgacatgtagctataaatttattaccatttttttagtttgaggattgatgcggtgacatacactctataattgctcaaatttatttatatattttctatttttttatttcaattctcatattgtttttttttttttcaattttctctaaaattcacccaaataagaatatattatgcacaaaaatatcttcttactaaacaaattc

SEQ ID NO: 70607 - DNA, 1824 bp, Cannabis sativa
  modified_base (427)..(434): a, c, t, g, unknown or other
taagaccaatatatttattattacgtaaaattagcttgtctatcctagttgttttccaaaatcctgacccaatcactagatttagtcttacatttttcttgtattattaatttcttttgcaaaaaaaatataccactctttatcttatattttgcaggacttaaactactaaaacagagtctaaatgtactcggcaacaaagaagaaaaacattgtttattttttttctactttcactttttacaaaggagaaagttattttcttttttaggcagaatttttttttttcggttttggcggtttgaaccgaccaaaccgcggttcacaatggtcggttttaagaaagttcctggattggtcggtcggttttcggattgcaccaatccaaaccgaaaaccgaaatttggatttttttatagaaaaaaannnnnnnnaccgaccgatgctcagccctagtagggaaaatacgaggctacaataacactcttcattacgatcagcaagatactagagcagctataaattttgcttttgaagaacaaagatgacagttcgaagagtggaggaatcgagagatgataaatcatgagagccaaacaagaagtgattggcaatcgttctagacaagtcgcgatactaatcaggagatcctatcaagtcattggccaacagccagtagtagatgcttacattctcattgggccacagcacaggctagaagggcgtctagttgaacacacattaatgggtcgtccaatctgaggccacatagttgaactgtggaccacacagtagacgagcaagtttttccaactcgttacttatgagggaatgatcaacatagcatctgtcctcagaccgaaatgctgggccaatcccttgctcacaatagccaagtacgatggcctctgggcgaatcagtctttaaccgattaggcagcgtgcccgatcacaagaatgatctgaatcgtagaagaagattagacagacaagaaattcctcctaccgttcagccaaataatacagattactatgtacctcactgaccaagttctaagagatcctcatgtgatacaggtcgacgaacagacaggtcaagttgatctattggtgcaaacacagatagatcaacttaagagcctcgttcaagacccgaccgacccaaaactcacagatctagaacttgaccggactagaggatcgtaaatttttttctagacattacactaaattatagtctttttgctcttactataactaagaacttttgatcatattcaaaaatttgttgacgttagggtcctaatacaaccttttacataacgcagcaaatgtaaagtttgatgtgataattagtcaaaatacataattcaaaattatataaacttgggctttctcttctccctctccctctccctcttacaaatcatggactaaggttgagttggaaacaaattaaaaatggttaattaagtcccacaagactgcccatgcaaaactttttctccgtaaaaataactaatgtacgtatttcatactaaaaaacctactagaagagaaagtctttctcttccactttttttatctttctctattgcttacatccacaaagatagaaaataatatccattctatttccttccacatcttgagcattattcaaaaaactcaaccactatgccaatattaacaaagttaaaagggagtaattacagaaatacacaaattaaagataattaattattctgaaacaacttttttaatgatgagatttggattcttaatgttgataaacctttaattaatggagagagagagagagag

SEQ ID NO: 70608 - DNA, 1046 bp, Cannabis sativa
tcatcatcatcatcaagtgacagcgaatgtgatgaggtggttgacatgaaccaactgaggaatgaacctatttctcagctagtccgagataatgacttgccaccaatgcctgaagactcactgaaactgctgttatccctttcgagttcagtaactacaaattcaaccgatgctttgattcgcaaaggcgtaagtgaacttggcaggccaagtactagtagctgtggcagtattgggaaggtggtggaggtttgcatggggaataagtgcaagaagtcaggaagtgcagctttagtcgaagaattcgagagagtgatgggcgctgagggagctgttgtggggtgcaaatgcatgggcaaatgcaaatctggtcctaatgttagagttgttaacagggctgctgatgaatctgttagaagtgtagccaatcctctctgtattggagttggtttggaggatgtaaatcatattgtggctaatttatttagagatgagaccaatgatttggggttggctgcatcagtttagactgtagaactagatgaatgtgaatagagaaatagatgtttccttcaaaaacttccatatttattcaagaaatttttttattttagatttgctagtgtagttacaatatgcaaactttggcccttgtttttttttttaatatcaacaagaaataattggaacttaatgcatgtgcatagctagtttcagcaaaattttagatctgctatgactttgtaattgcattatcaatctcaaaattaatatgagtggatgaagtacatgttagatttattacattattagcatcacatttgagatcacaatcaagctcctattgacatcgagatcacattttatttagggtattaaatattaattacacaataaatgcacatatctccatgattgggcattctatctcctctttttttgatgcaaatctgttcaaagttcaaacactacgacaattgcaatagcaagagaggatctaattgaaatcaaatctctacctaataccaccgtgaactttatgtctc

SEQ ID NO: 70609 - DNA, 1052 bp, Cannabis sativa
atatatatatataagctagtagtagtagtactacctagttagtggagtgtccacatagttaaaatgcctataacatacctatactcaaattatatataaatatatattatttgtgaattattgaaatcaatttcttgctaatatgcttctgtacgttattcttaaactcatattagataaaaatctaaaaattttgttactatctaataagtcgcacgattagaaactcaaacaaaataaacggatttggattattttagggttgacatggtattaatccgtttattaaacaagttatttttgaattgatacgtttgattcaaaaatgacacaataataaactatgtaagaatatgcattctaaaatttattatatttattccatataaattatattttgtatttatataagacataaatatatcataataagattgtaaacatgttaatgaattgattagttaatcaaaattaaatattgttcttcatatttataggttaaacaagttgggtcacccatacatattattgcaaaagttatattaactattgcagatcataaatacaatcatgcatataattcctaatttcaatttttgttgttatatatatatttggatccaaaattgaccaaaacaaaaaagtgatgtatatatacttatgtataattttttagaattgaaaatgatggagaatatattataaatacatatacatacaggaactactataaatgttcaagtggaggatgcaatgtgaagaagagagtagaaagagacagagaagactcaagctatgtgataacaacatatgatggagtccacaatcatgagacccctggtgtcctctattacaaccaaatgcctcttatggctccaaatgcttggaatttacaacctaatcaccatttttctcattctcactctaactctcactctcactcttcctcttcttcataaaatatatatatatattaattaattacactaaatgaagttctatatacatatatatatatatatatgaatattgtaatcttgttataaaattta

SEQ ID NO: 70610 - DNA, 1982 bp, Cannabis sativa
gattaaacccgtcctcccaagattgatttgtcctacccaacgacctttgttcctggtaggaatatccaagataataatgtgattattcaggaagttattcattcatttaagcggaaaaaaagaaaagaaggtttttttggccattaaaatcgacttagtaaaagcttacgacaagataatttggcaattcattgaggatgctcttaagtcttttggtcctgatatttttcgtaagtgaaaatcgtagtatatctcgagctcttcaatgaatgtgtgcctcaatgggggcattgttgggaagattaactagtcgtgcgatattcgtcaaggggacccgctatccccttatctctttatctgggcggcagaaatcttgtctagacttttggaggacaccctagggaagagtaagataaagggaattaagttgagtcgtggcggcctagtgctttcacacattttctttgttgatgacattattttgatgggtagagcaaatataacggaagctgaagcctattggcattgtctagaaagattctgtacttggtcgaggcaacaagtcaataaggtcaaaacctctattttctttagtaagaatatgccagatggagttaaaagggaaataacagaggccctaggcattggtgctccgaaaagtaatgtgaaatatttgggtttgcctatttttcatactaaacagaaagatgctgattttaacttcattttgaacaatcttacctctaagctggaagggtggaaaacaaaaacgctccctaaggctaggcgcgccactcttacaagtcagtaggactggccttgccgatttatgctttgcaaacccctaaactttcaaattgtctgatagcaagaattgatggtttggttcacgaattttggtggggatttaataaaggtaaccatggaattcaccttaaaggcttaagacaatttgtgtgtttccaaatctcgtggaggtttgggtttccgaaaaattagagaaatgaaccaagctttcctagctaagtggggttggagtctgttgaatagatgtcaatctctttgttgttagattttggaggccaaatatcttaagggaatggatttcctcaagtgtaagtttaaagattcaaaatcctggttctaaaagaatgtggtcaaagcaaaatctattcttctgaaaggagcatgcaaaggaattcattcctaatgctagtggaaggtggacacctactaaagtggttgaacttcttacagaaactgaaaattgagatactcaaaaattgaattgtcttttcgatcatgatactgtctcagctattctcaagggggctagaccctcaggtcaaagtagtgatcgttggatatggaaaaaggagggaaacggtaagttctccaccaaatctacctacctaatttaagatttggagtgtgctccactgtgtgatgtcgccccttctctttggaatagactttagaacagtaagttattggagcgtcacaagatcctttggtggagtatcctatcgaatgtcctccgtattcagactgtacttaacaaaaagttccaggtggaggaccccctttgtcctgtgtgtgggggtgaggaagaaacaatggaacatcttttcttccaatgtaatttggcctttcatctttggaggtcatttccttggggcatctttcctgtttcggactcaagtactcgtatatgggattgtgtcaaatttatctggagtttaagtaacaagggcattaatacgaatgaagttttccttaatgcgtccatcgttgtggacactatttgaaaagctaggaatgacaagagccataataatagagttgaaagcattgtaaacttaattggctctatcaccttttgttatgttgattacaataattcccctattccctcagtggcccctacctttttggcaacttggatccctcctccagagtgaattaaactgaattgtgatgtc

SEQ ID NO: 70611 - DNA, 1448 bp, Cannabis sativa
gaattgtgcttggttatgatggttgtttcgttgtagctgcgaaaggaaaaagtggtggattagctcttttatggaaagatccttgggaggttagtgtgaaatcatacactgtatctcacattgacgcggttattgaaaacggtttggggttcgagtcgagatttactggcttttaagggagtcctgatcccggtggacgaaagaattcatggcaacttttggaaagactccgcgacttgagaaggggggcatggctgtgtggaggcgacttcaatgagattctgaaggctagtgagaagaaaggtgggggcgtgaagatggactcacaaatgaaagaatttcaacaagctatctcgtattgtaacttcaaggaactatggatggatggtggtgaatacacttggtgtaatggacgacataacaacttggtttttgagaaattggacagggttatggctaatccggattggtttaacaaaattcgagcctccaaagttactcttctcccttggtggaactcggaccatagacctctcatgattaacatcatcaaagatcagcaacactccaacaaggaacctaaatggagatcccgattccactatgagcaggcttgggcagaggatgaggagtgcagcaagatagtggagtcgacttggctagatgtttctttttggggctcagctactggtcttcgggggagactcaatcagtgtggtgagaagcttaatgagtggaacaaggataaaaaaactgaattgagagcaaaaacaaagaaactcaaagaggatttaaaaaaattatcctcttcggatggcgaaatagactgggaaaacaagcggaggattgagaaggaacttaatgtagcagaatataaggaggaaatattatggaaacaacggagtagagctctttggcttgcgcacagggatcgtaacactaagtattttcatcacaaggcctctcaacgaaagaagaagaatactataaaaggtttatttgatgagcaaatgaaatggtgtacatcgggcagtgaaatagaagaaattctggttaattactactcgaaccttttcacctcttcaagaccttctctcaacatggaggatatcctcaaccagagtgttccttgttgcctttctttccaagataacaacctgctccttgaagatttcacaaaggaagatgtaaaaactgctattggccaaatccacccgctcaaagctccggggaaggacggtctgcctgggttattttaccaccaccattgggaagcggtgggagacgaagtcataacaacttgcttggctgtgctaaacaacaatgaagacagtaaaagcattaatgatactttactttgtctcatacccaaggtgaaagatccgactgttgtaagtgactttcggcctttaagcctctgcaacgtaatttataaagtgatctctaaa

SEQ ID NO: 70612 - DNA, 2637 bp, Cannabis sativa
agagtcacacaagacttacatcgaatacattttacttataactttcacaagatacaaatcatgtcaattatatattttttaaaaaaaaaaaaaaataaaaaaactaaacttacattaccatataaaacatatgaaaaataacttatagatatcaaatcatacagtcttaagagaataggcacatcatcataatatacataataatgtcaaataaaatactatatatttagaaataaatcataaatatgtgttcctaatacataaataatttgcctccttatataatacgcataataaattgtacctcaaaagtaatttttttagagagcaaagatctgtaaccaaagaaaagcaaacaaaagagatcggttacaagagatcttcaagagaaggaacacaggttgttccatacaatctcttcgtccgttccaagagcaactcgagctagattgtgagcgtgagagttcgcggatctggggagaaagcggattgaggcacctggaaaaaatgacgaagaggagacaatacttgcaatatatcctgagagagccgaacggtcaaaggattttttctgaatcttaagaacttgattctggcagtcggagacaatagtgctaagaggaaatcaggctgcctgacaccatagtaaagcacgctggagggcttcagcttctgtgaaaattggaggaagaccagaggaagatgatgctgaaaaaccagcaatgatctgaccattgaaatcagtgactacgacaccataaccatgcttgttggagctggaacaaatagccacatccacattaagctgaaacataccacaggggcgctgcagattggtactgccagaatgagggtgtgtagacagagtgttgattttcaattgagcttccctgtaatcctgctagtaatttaaaactgaagcttccaaatccaagtcaaaacaattgtgatcagtgaaaatgaccttattcctgctattccaaattgccaataaaaaacccaggaaaagagtgaacttatccttgtcaaaatgttcaaaaccacgaagcaaatattctttaatatcataatttttattagtaaaataaaagtttgagaaagaagagttcttccaacatttacctgctctagaacaagtaactaaggaatgagtgttagagtctaaatgagagaagcaaatagagcaagaaggagaagacctggactgtcgatggaaaaggttaaggttggaagggaggatatggttaaaagatttccagacgaaatgtttgatttttggggggtatattagacgaccaaacaggtgaccaccaagatttaagggcagcaggattagaggaactaggagctgtggaatgggagttagccaaatggtaggcagaattgactgtgaagcaaccagaagggtgatgtttccagataaggcagtcattgttagaaggatcaattgggacgctgaggatggaattaataacactctcatcaaagtagtgatggagtttgcttgtgtcccagtgtctatcctcagtaatgaagaaagagacatttgggagagggggatatgaaccagatttgaaaggaatgttatcccagtcaggaagccaattaggatcagtgattctaacagaagtaccatcaccgatcttccaaatgagacccttaatgagaagctccttaccccaaaggatactacgccaacagaaagaaggagagtgaccagtagctgcattgaggaagtcattgtgtttaaagtatttagcttttaagagcgaggcaaccaaggaatcaggggtggtaaagattctccaggcttatttagctaacatagcttgattgtgatgaacaatgttacggaatcccaaacccccaaaaaatttagacatacaaagatggtcccagcttttccagtgaatctttcgcttatgaccaatggagccccaccagaagttagacataagcctacagaaatgtttatagatagagacgggaattcgaaaacaagacatagcataagaagggatggcctgaattaccgattttagaagaatctccttaccaacttttctcaaaagcaattgtatatatatactacataaaagaataatgataagctcaaatatccttaagtaatcatatcattagaaaagccattaattagcgtattacaaataaacaaccagatgaaacatgtatacaattatcacaatcaaatataaacttgatcaaaataaattgtctatataccatatgagaagatatatgcgactgaatcttaaacccaaaatattccactggtagaattattcaaagaaaaaaaaattctaaatcttcaaaatctgcaaattttataaacagaaaacgatcaaatcttcaattaattcaatagaagtgactctaatactatttgttaggatttataaaatattttataaattcaactaattataatcctaaaagtactttaatataaaaaaatttaaattatattttattgaacctttagtaaattaaagaaaaagatgatgataacgaaatgagtagaaacactaacctcaagcaactgtttgcacagaagattatgatattctaaaaatacacttttctttatgtatttttctctaatgggaaaagagaata

SEQ ID NO: 70613 - DNA, 1009 bp, Cannabis sativa
atatgtttgtagctcatgaaagttatacatatatatatatatccaaatgatttaattaaacatatgtatatatggtcgaaatccaattatatatatccttccttatgtattatttatatatgaagatatattttatatacataatctaacataaaaagtatatggtaataatttgaagccgtagagaagaagtgatgaacatgagtaatttgtcatacacgaaaattccttgatacataattaaatcatttaagttgaatagtaatgacccataaaaacatatccaggcaatttgtttgaaaaagacaaaatgtggccaattaaagagaccgttatgagagagaagagataatacacacataataactacaaaaactctctccaaagaaaagaagagaaaatccagagttagacaagtctatttcatgggttagaaaaagttgtggtctatacttaagaaggttgtcatcttgaagtgtccgatagctacttcagataatgaaaagctatacgtaggggagggaccattattattattattattattattattgaaattatattaattttagatgtaaattaatacaataataataataatatacccactgaaataggaagaggaccacacaagtttggtggtcagagagatatgcatgcagcaattttagacttgagaacctaacagctgacactcgtaatggaataactatttttcaaaacggagttgtcattaaatcccagaaaaagaaaacaaaagagagaggttgccgtaaccaaattttgtttctcatcctattacagaaaaaggaaaatatgtaatatattttttttatctgaatttattacatatgtaacatattgcttgtgttgtagtatacattacattattttatagatcctaataatgatcatttgtcacctcttattattattattattattattattattattttaaagggttatttgcggcaaaaccccccaaagtagagagggttttgcacat

SEQ ID NO: 70614 - DNA, 1760 bp, Cannabis sativa
ttttgatctctcattattcctcatacaagctttcatcactgaaaaaacagggattaattttagcaaaaatatatggtacacagatctctaaaaagctttttcagtacctctgcgatctattttggtatttagtattgaagggagtttcagaaaaattatttcatatactgtttttacaatagcgtattattatttttttaggattatttgttaccaaacattaaagaaaaataatcacgagtttaataaaatatataaaacattactttcaacactattccatactaaaaaaattttagatgcttctaaataacgacggctcaagggtgcgacagcagtgacccaagccaaagtccccctatcaagccaaaaaaatatttaacaaaaatactctaaatttacttttttaaagtacttattttttttctaagatactacatttgaagttttattaaaaaagtgttcaattatatttttaaaatactatattttaaaaattttaccattatatatataaaaaaagatattatttttttcattttaaaaaaaatcccaattaaactttttggcccaagttggcttgagagatgcttgtttctaaataattacaacatacacgatcataaaaaaaatagaccaaaaaacttttcttgatttgaaacaaataaggggtgtattaaatgacccttttaggaggtgtattagtgtgttatccgtgtttccgattagatgacaagtgtaattccaagataattcaatttagctacaataggccaaaccgaaggcccaattaagataatggactggatccataagtgaaggcaaaccttccggctggacaaacgatttgtgcaggcaagataaaccttcagcacagcatgtcttcgcatagggacaagcaaagcttccgaatgagtaattaatgggcatcctaatatctagctccgtatttcactcatttattactaaatcctgcaatataaggactttattcccaagatgatgtcggagaatcatctcttccgaatatggaaataaagtaactgtcaattaaacatgtatgtgtatttaaaaagtagaacacattttagatagctatcaacatgacatggcatccacgtcagtagaaaatcaagcctcatgggtcgggcttcaccaaatgagctcgaagtcaatgtattatcggtatttaccccatcaataagaaaagttgacttatgaaaatcctagctctataaatataaaaaaaaaaaaaccatttgtgcaaagggttataatctgattctgggagtgctcacaaaaattctagggtttaaaaacttgacaaaatacttgtgtacatatatcaaatatattgactcgtggactagaggttattaatccttgaatcacgtaaaaactcttatgtcattctttatttttaatctatttctttagttttaatatattttatattagttttcgaaaatctcggtaaatattttggtacttttaatgagagctgaagaaagaggtggtgtcaaagttttatattgcaacaaagaccacagttggaaaatctaccattcgtgatggggacactccatggatgacgtgaatcctcctattgtacatgggaaatgaggtgttttaggagatacattcgaagtgactagccattctacgaagaaactcaacataacgaaaaatatattgatgaaaattccaccaatgaagatgacctagaagacccagaggatgactcagaaggtgacagtgac

SEQ ID NO: 70615 - DNA, 1634 bp, Cannabis sativa
tattaaagctaacaccgatactacaaagtcaactgaaacaacgttgaccttttacaatcctcctgacttgaacaagaacattactcagatatttggaaagctcattgacatatatagaggtgagcccaaatcctctttcctattttaatgcatttctttaaatttgttataatttactcttagcttactaattatggatttctaaagctttgggagatgatagaagatcatttagctattacaaagctataccagttatagagaagttagatttcaaaattgagagtgcagagcaagtcaaacacctgcccaacattgggaagtccttacaagatcatgtaagtatatgttgaatcaagattgttgttaattatttctcccctttgttcaaagtatgataatgtggagaaagttgctgttgagatgttcattttttgcagattcaagagattgttaccactgggaagttatccaagttggagcattttgaaacagatgaaaaggtgttgaaacttttaagggtccttttaatcaataaagaaaaacaaaatattcgtttctgttgttgctaacatggatcactaaatgaaagaggatctcatttgttgaattatatgatttctatttgtatattctcaaaatgttggatgagtttgaagataaggctttaaattctgtttgtgagttctctgagtttatttttcttttctttttatcctttctagttattgatgcctcttgactgctatttaagttgaaggaaaattacctactagtcatttctttatacgcaaatgccgggaagttgaaattcaatttctttgtcagtgttgatgatgggtggcttttgagaatttgaacttcatttcaggttaaaaccatcagcttatttggtgaagtttggggagttggtcctgccactgcattgaaattatatgaaaaaggacaccgatcactggatgatttggagaatgaaaatacattaacaaatgcacagaaacttggtttgaaatactttcatgacatcaaacagaggataccacgtcatgaggtcttgtttgctacttatttttgtgattacaaacggatatgttcatctggttctacctttgaaataacctattgacattgtttgtttcttttttgtcttgtggtttgttaggtccaagagatggaatcccttctaaagaaagctggagaggaagttttacccggggtgagaaaaataaaatttgaaaatattagcagccttgaacttagattttctttctggatattcacgtttctccaaactacagactgtgttacacagaaattacttaccagggaatcttactagtggcattttatttttatatgtgttgctgttgatggataaagttcaaagttaggcatattcatattttgagcttcttttttagatgggaggactggatgattcctattattagggatggtttcttttccctttgatgtttttgaaatatgccaatgggataaatcttttgtttctgaatattctttgagatcaggaggaattagtaaagctaaacgattaagctttgtggttcttataaaaggaaagaaaaataaataaattaaaagattttatagtgtcattttgcttataaact

SEQ ID NO: 70616 - DNA, 861 bp, Cannabis sativa
tagaaaatactagtaaatattgattataaattataaatatatgcgatttccaaaatttaaacccacaagaacaaggaatgattgatggaatccattgttatctcagtgtacattggaatgtcttttaggaagagaggagatccttggctttattctttgatcatctaccttagatatgcttctttcagacatacagattccagaagcaaccaacatttcagcattaaaatctggattaattgatagtacaacaattttctctaataggcaaaatggtcaacataaaaacctataacttgttagccaaaaatgcacaattccataagaaaatcccgaccaaaagaaaaaacccccaaaaaaaggtgttttgactcaaaacttagttgctcaggtatacatattagaacgaaaataatgatctctattctggctggaccataaacattcctccagtccacgtgaaagcttgagggttgggggaatctcagtttaatcatcttccatatcttcttattttcacaaacaatattagatgaagtaattccatcaaaaatattaaatgtggctgctgggattcgagcccaggtctccacggccacaacgtggaattctcaccactaaactacagccacttctttgtttcattgtctccacaagtatatattttacggttgaagtaaaggaaaaactgtgaaaaaagagtaaaaatatgttattttttttttcatatatatatatatatatatatattagtggcaactccacgtgcaatgcacgtgaaacaaaacacacacattatatatataaataaggtaaatagcagcataagtacttaaagttttaagtttgtaagctgcataa

SEQ ID NO: 70617 - DNA, 985 bp, Cannabis sativa
agcaaaagtatttaattatttatattttttttagaaaaaaacaagtcatataagacagcagtaacattacattagcttattaaaatgtatagaagtgccatctgaagctagctcaaggggttgggtgagtgaggttaagaatggttcggggttcacattgctgtcaatgtattaaaaagaaaaagtactgaagtatgttcaaagattgtttttggcagtgttacaatatcagatgtttccttgattctaatgtcaaattttcaggtgaattttcttcagcttagacaaactgaaatgccaactgcataaaagatatgtcatgccttctttacctcataaatttccatgtaaataagtcataatttaccttaattaagattataaattatgaataaatagaatggtattctaaagaaaatattaaagttgggaaaaaaagggaggatagaatggaaaacctccccaatgcgacccattgcctgtgaatcagaagatataatgctgattgcgcccatatcatgcaaaatatcttctgcagcaattgtttctgcccttattcttgattcggcaaaagctacatcttccgggatgttcttgtcaaggtgatgacagaccatctgtatgtagcaagacaaaagtgagaatattgaacagccatagtgcacctacaatattagtgattcctacatttttattataccagcatgtcaagatgctcatctatggtattaaaggtgaatggtcgagtagggttcgttgatgatggcaacacatttttcacaccacatactttaatgatgtcaggagcatgacctccacctgcaccttcactggaaaaaaaaaaagaatagatcaagtaagaaaataaaacttggaaccgaaaaaatctaagatagtttgacaagaccctactatcctcctgagcacaattaatctcaatagcaatagagcagtagccaaacagtagttacgagctatgagagcc

SEQ ID NO: 70618 - DNA, 906 bp, Cannabis sativa
tagtgtcaaattttaacagattggggataacttgttgcccctaatacactttaggagtgaaacataaggggatttttataggagcatcaatattttaggggtaactttttgcccttaaaattcttacccaaatcgccttaatactttcttttcttatagagccgatgattgttagtgatttgttcggtatatctctagcttgcttccatcacttggaaataggattttcttcttatagtgatatttgaaatctctcatttcaagtgtaattgtaatagttgctcatggattataagttattaaggaataaagatagcaaaatgggccgaagactaaaaaataattcgaaacaaacaaaatttacaggtttgggtttgccttaaatgggatttggtttatttttggattgacttgtctaatccatttaataaatgagtcgtatttggtttgacacgactaacatgaaagtaacatgttaatgacatatttaaaattaatttaggactgttataaataggtcatataatattttatatgtcataaacgtgttaaatagatcagtaatagattaatgagttgacgtgtttaaataatatttatttataaaatgggtttcatgagtcatctcgtcgtgttaatctatttataaacgagtcatgtctcaaatttagcttttaacaaaattaatagaatgaatgcgttcaaattaaacatatacctctcatacataaaacttagcactagacaaacacaaacaactactacccttaaaaaaggaattttaacctttaacttaagagcttgggataagctctgtctcccgaagtcccatggaggtcttggatttaggaagacaagagagatgaacttggcgttcctggcgaaatggggatggaacttgttgaa

SEQ ID NO: 70619 - DNA, 830 bp, Cannabis sativa
tcggattgtttgagagtcatcaggaatttacaaaagtttaaacatatggcttctccttatggccatatactttctgattgtatgactatgtgttcgagtgttgttgatgtttcatttaattttgttaagcgatctgctaataaggttgcgcatgctattgcgcgatcttctcttgttgaggcagattgtacttattttggggatgcgttacccatagattatgcatctttagttttgaatgatttgatttaataaaattttatcattattcaaaaaaaaaaaaaatattgataaccaatggtaaatatcatcttttagaatgtattagcacactggtgcccaactattcaatagcactctttttaaaataaattgaaaaaaataaaattaaaagaaaaaattatgtactaagtcagggtaaatttaaaattcaacgttattgaaatttaatgcatacaaatataatgcataattggctttcttaaaagaaagttgtgtgaaaactccacaataaaataaaatggtgtgaaaatttcaatatcgtgctcttacaatatcataagcaagtcataagtccatctattgtttttgtttaatttagtaattaacgatattatttatattagtagaaaaattacatcaaaattttttaaacaaaaaagaacaaaagtaacaaacaaccaccaccataccaaccaaaccactaactgaaaccagctttcaccacgagccggcttattagttttaccatacccctcatcaaagaagaaaaaacgacaaaataaagaaaattctactattttgtctctccctcagcaatttcgcctatg

SEQ ID NO: 70620 - DNA, 2140 bp, Cannabis sativa
ttatacgtgcacttgatatgattgtgttactggatggttgaagaagaattagagaacttgttctgtttggatgggtgaaattctaataaatggaagttttctgctgtcgtgtgttatctatttgttatcgtgaatttgttcccacggtaattggaaaattcttgattatggagtcacttgatgcataatttcacaaatttcccaatatgaactagaacccctcacaacttgagaatactaaagatgaaaatcagaatttagcaaatattgtccttttcattattcacagttgcaaatatttgacattgtgcagggaggattgcccatgtatgttgcaactcgtggattgtacagtatgaagcctccaacaatttttgtaccgaagtgtataaaagaagatgttgaacaactgttcaatattcacagaaaaatggatcaatcagagctaaaacataatctaattgggctggatgttggtaatgtctatttaaaattgaactgtaaatgaagtttgcatttatccagctaccattaaattgcatgtttccatatctaatgaaattttgttagcaggagaagaggtaaatgtaagaagggatcttagagtaagggcttttaggacataccatgggataccgagccaggtataaaaaatagttgtagtcctatgatattattaaggctatattccattggtatctacttcaagtatcatgtatgtttggcttgactgactgtgtttgacatatgacagggttatatagtttactctgtgaagcagaaacttaaaaaggagcatgttggcctttcagctaatgaaattaaaaccttgaaatcatcaggtgtggaggtctgtcttgattgtcacaatcttatgctgtttaaatatcttgttttggattgcttacgtttccataaccttcatttttttattttcttgctttctcccccactgttttgttgaccaggttgttttttcttattttgtagatcacaaacacagtgagggaacctctagttgcttttacaggagacaccacatctgacttcattgttgacgacagcaatgcagatgttttaaaagcaaggattcttgtcatggaggtggatatttttaatattttcgtaaaagcttttattaatgactgttaacatttaatcttgattccttgacatctattcagagcaccttcattgatgattcagtttcagtagcacatgctagagattatggacatactcatttggctgaggtcagttacagaactctttcggtgattttacgttgcttgcatgatttgatactcgattcatagattatatatgtataggcttcttattcaatgatctcctactctgaatacatggccaatttcccagataataagtcacgcagaaaaatttgagaataaagcaattcttcttatacacttttcagctcgttatatggtgaaggtatgattggttgttttaaaataataattctcatcttctgcattctcagaattttaatgtttttagccattgccttttcaggaaattgaacaagcggtgtctgcattgcctgcacctttagcaggtcgggttattgcacttacggaaggtatctaacaatcgtcatgggaggagccttctgttatttatatattcattctggaggcactgaaggtgccctcggtgtttcttcttttgtgggaagtttgaggccttctattgtgcttgctaaacacaaagaaaatgccttaagaagtctgtttggaggagatattgcagcaaaatagtcatattatacgaacacaaccaactccaaacataacgagttttggagctttgtctgttatagttgttgaacaatcacattttgtaaattaaacatcatctgttaaaaattgcacctttcggaagaaaatgtccgcttaacaaatcttcttttcctttcacttttttaccatctcaaacaagggcaataattttttttatttattttttattttatctcttttttttctctccccatgctatgattcttatgggatggcatcctaaaccatcaatagagttcacacgtggccatggtattgtccataattgttgtccttcacaatttcttcaataggaacatagacagctgttggtttaa

SEQ ID NO: 70621 - DNA, 1315 bp, Cannabis sativa
ttgatcttccaattagtatttaacgttaacaacaccttaaatttacaacgaaaagtaaattaaggagttttgccaaaaagaaaaaaaataagaaagttaagtatataaaagttaattactcttaataaaaattgaaaatgggagaaaggataaacatactcaatgaaattatcatattcaatggctttgactttgccaccagttttgtcgaatttggagaccagtaaatccaaaaccactggtgaaacagaaaatcccagactcaaaagtgcttctctcaactcattcatgtcgattctgccactcctgtctctatcaaatcgctcaaatattccctattttattgaaaaattaacacaacaaaccattattctcagctcaataaaaaaatattaaatgtaagaaaaaaaaatcatttctttagattaattaattaattattaataccctccaactctgaagactgtagaaaacatcagtgaattcctttggacctaataaaaaattaaaaattagaatgagaaaaaataataattaagaaagtcaacattttttattttaataaagcaagaaagtcaacattaagataaacacgtgacctgcacgtgataaatatgtaaatgtcgttaatctactttttgattttgtagggaccacaaagtatcggaaaacaaagggttaaatatgtaaataaatttcaactctaagggtatatcggtcatttcatagcatgaaagaagaagaccaggcttaacgcgccacgagcgagtcaactcagtcgtacccgagttacgactcagtttcagatcttttaacgaacgacgaaaaaccctaaaaattcatcgattcgtaaacttctgaaaccctaatttcaattccagaacaatcaattttaagagagagagaaaaagatgtaccgatcttcttgctattggaattggtgaaaagatacataagaagatgaaccgttctgagactaaaactctgattatacgaagagagagctctctgcaactccttatcgtcgattaacccacttccgtcttgatcagccacctgaaagcaagccaccacgttgggatccgtaccgggagggaaagtcgaaggcacaagcgaagcgaatggggtgccgtccccctgcggtggcgggtacgcgctacctccggagcttccgccgtatggagagtagctgtcctttggtggcttatctggattgtaaggagccgatggctgagcgtagggactcgcgtaagctggtgaaggctgttggtgatggtgctgatgatcttgtggtggcggaggagcgccgtatggc

SEQ ID NO: 70622 - DNA, 1364 bp, Cannabis sativa
aaaagcagtaattcacggattatagttattagtaatgatacatattgtaagaataattgataatgctaccctaataagctatacaattaatattaatgtacaggttttgtctcttctgccacaatttcataatctgcaccacctccctcaactacacggcgactctaagtagacatgacacgttacaaaaatattaattaattaaaaaaaaaaaaactgtttttgattaattaaaatcgtaattatattacaatggaatttgctagtacagacatcaaattcattccaaatcctctaattagaatctaaaaataaatattgttaaattttgtaaaccctttgactcaaatttcgtggcttattataaaactattggattttagatttttttttttatattctatgtggtattatatgcacaactattgatgcgaatgttgtaatcttttaattagattataatgaataataacttaaaaaaattattctaatatatataataatattaaaattatattatctaattacttcttaataataataataattttatattaaaatatgtatttttataaaagtctattcatcgtattataaactaaaaaacaaatcgcgttttgcatgcggttgtattttatttattgataatcaaataataaagctatatcaaatcttaaattttcatatttttgatgtattttttattagcatgtgtatctatttactaaaattttattttttttactcaattaaataacttactatcttcaaacattataagaaaaaaatatttgagatcctcacacaggaatggagatttttttaattgataaatctatgtaagaaaaaaaaaatcattatatgatttcaaaatcattgtcatcactgtatctcacttgtattcgccattacattcaaagtcttcgttatcaccatatatctcttatagtcgctattacaatcaaagttgttgtcattattataatttatacataaagtaagtgttaatatttttatttaatattttacataatataaatcatgttttgcaatttggtagtagtctgtatggctctatagaaatggattaatgttgggttttattttattcagtatttgtattaggagtactcatcgagtgagttttattgggtttcatattttcaggtttggtcataaaattaaattagtaatccaaacccacctatttgtctgaccaggttttcaggttttgggtgcgagtgggtcgagtttgggtggatttcaactaggttcgggttgggctgacctttcttttttttttttaaaaaaaaaatatatcatttttatacatttttttcataaaaaaaaaaataaaagaagaa

SEQ ID NO: 70623 - DNA, 1441 bp, Cannabis sativa
ggatgagggagagattagccacaatacttgctctaattaaaaatcaattaatgacaacttttatttaaatactactaaattttagtgataaataattttttggtgtcatatctacaattcaattaaaaagtatttattaaattaatattgacaattcatttttaatataaaatcataataaaagatatcaaaattttattttaattaaacgattaaaataaaaaattagaaaatagattttaaaaaagttgatttttttgtaaaactaagatttgaaatacgttatttaattaccttgcaaaaaaagaaatacattatttacattttataatgtaaaattagtctatatataattttttttaattgaattatatatgtgacaataataccacatcactgttcaacgttccaatttagcactttgtcacataaaaaaaatatgaagaggagtactactgtcaacttccaattaaaacctcttagtcaatttttgtgcccgaaaattctttgttggaatattttttcatgatagtattctttatacttacaacatcatccttgtaatttttttaaaaaatttctaatacaatgtcaaaaatacatttaagttttttgaacgcgcgtgataaattaaaatatcaagaactctattttcggcattataaactatttaaaattttttaaaattttacaagaatgatattgtaactgtaataaataccattataaaaaaattataaaataatattccaacatgtaatttcgaaaataaaagttaattaaaagtatgtaataaaaggttataattaatacttctcaataataaaagccatacagtagcataaataattggagatcttttttcaaaacaaaattggcaaagaaaattttacaccatataaatttcaataatataaaattaaattaaaaaatagcatatgataaaaataatgataatgataataattctagataaaaatcatagatataaataaagtagagttggatttattaaaagtgagattggaggtggggtgagtagtgtatatatagtagagtactagagagtagacagggtggagtgaaaagttgtttgtgaaaagtaggttgagagtaattgtaatggtaatatagtagtagtagttctttttaagctcatatgacgattgggcaccatcagcagaattttgagcgactgaaacaaatataatttagtcacactcatcaaataaaacagcattgctattaggtaccactggtgcttagtaccttctcgacacgttgcgttacgattggctaacgatatttcctaaaaattattatattaaactatatgagacccgatacttagttggaccaataacgatactaacacataagaggatgctagacaccaatagtgtcctttaccatttcacaaataaaatgctcattaattgct

SEQ ID NO: 70624 - DNA, 1320 bp, Cannabis sativa
agagagagagagagagaattgagcagtgagtaagaaaaagaacgagtttttgaaaactcagtttcttttttccagaaaaagagagatattaagggaatgaagaggaattatcgtgtgctgcgcgagacatactaagcagctgtagcctacttcgtacaataagccaaaggggtaaaccggtaaaatggtggagcccacacgattggcccgcgcatttctccgtctgttactcgctttggattttttctaccgtggggtcggctttatctaatatatttttattttttttaaggtgaggacgcctttgtcatgtgctaatttcgattttttgaatttttattttatttttcttttaattcaattctgagttggtaatgttaatagtagtagtgttgcattggtttgcatacgctttacgatattccaaaaaaataattatcaatttaaatattgtattgtgtggggtctttaatgatattttatcacgtatgagttcacactaaaattattggttatcatagtcttttatctttttttctttttctcatacatattatatacataatccaattaataataataatatgcttctctgtatattattcattctttaatggttggagaatatttgagacttgataatcccaagtaccctctaatccttttttgccattttttaatataactacgaaattgttcacattagatattaggttaagaacttaccaattcatatatatctatagggtggctaatttggcaacttataaatttgaagattttactttttctttaattcggttacttttatgtggtataggatgggttgtttcctttcgtagttacgttagattatattaactattttttttttctgttcagcaaaaaaaactaatatttcttttttttccatttgtataaggattgtattagctgatattgaatattttatttatttaagaaagctaatattgtattgattattataatctatacctaccaatacctgtatcttagaagtaattattgtctatattgacgcttgtaagcgcacataaatcatgcattaccaaatactaaggtgggtggacctctctagatgtacatatatcatacatattgccaggctgattacatgataataaaaggaatatatatatacatatagaactgttattatagtgagagtgaggtgtcaataatataatgggattttgaattggagtctttttgtttaagaaaatgatgagttgggttggtgtggtgatgggtgtttgagagaataagattggagacaaagtgttatgttatgttatatta

SEQ ID NO: 70625 - DNA, 1247 bp, Cannabis sativa
tttatggcaagagttcctgggtgaacatgttgatttcttgtcatttttgcaggtttaataaagacccttcaagcaataaatgtcacaacctggcatgacacatttttaggtctttggattgcagctcttcgtcttattcaaagggttagaacttgggacttgtggctgaactaaaaagttcttttttcttcatttcttttccatgagcatgtcatttctcatcctaagcattggcaaggcaatgctaataggattcagatttatgattttatactttgaatactttcttcatcggttaaattttgaggaaaatgttttgcaacaactcagaattcaatatttaccagaatttgcttgttcacacaaggttgaaacaataatcattactttataatgccatatgtttaggcttaatattaattattttaatttgctttcaggaaagggatcccatagagggtcctgtacctcacctggatactcgcttgtccatactgttgtgcatcactactcttgttgttgctgatcttatcgaggaagaggaaagtgctccgcttgatgaaacagaatgcgactccaccaatcactggaaagagaaaaaagagatatcgagaaagcggcgtattgatctgatttctagcctacagatgttaggtgattatcagagtttgctagctccacctcaatctgttgttcctgtggccaatcaagccgctgcaaaagcaatgtttttcatttctggcattggtgggggaagtcaatactttgagtgcctcagtgtaaaagacatgccaatcaactgttgtaagtaatgatttctggttatcagttagcatttggcattgatttttccaccatgaattgctaattttgtggccaaaatgttagaaccggcatggctatgcaatacattttagctttggccatgccaatgaaagtatgttaaattggcctcctacatataacttcactgagtagttttatctcttgatgttatcaagtggcgttacatgagctcataacagaatataaggaaactgttcactgcaaaggaaatgatgttttcagggtttagtggttgatggatttttcagtgatcattggttatcctaacataactgatggaaagctcttcatgagagggttgtctcaaatgtgtataaaagcctattttgtgctaattggatgttgcatcagagaacatattgttcagtggtgcttgcacattatttgcttgttaatggtac

SEQ ID NO: 70626 - DNA, 680 bp, Cannabis sativa
attttcttgaatgtgaaaatggtgattttagatactggagtttctagccacgttgatcatgctcaaagtcttctttagatcataggaaagaaatataaaatactcaaaataacccagaaattctttaagccttctaatcccaaatcataataatagggactgcaaaataagaataataggggcagaaaaattgagaggactttgagattttcagggacggggacttagtattttgtgtcggctttgaatggtggcagctggagatggagatctgggctaggaacagacatggagagaaggttgatgcgtgagggaagagatgcgtgagggaagagagagaaagggagatgcgtgagggaagagagagaaagaaattttagggaaaaaaaaataatttattgaatatgtgatttttttttaaaaaaaaattatttattttaaatattaaaataattttttacaataattaaataattaaatgatttggacaaatatgaatgtgccatgtgtatatgagtgtacaatggacattccaacttggcatttaactaatgaaaatggatggaaaactaaatttgctaacagaactaaagtttggtaggtttagccaccaaaatttgaatttggatggttaagtgcaagtgaattgatagttcggagggtttaaccgcaaaaaactc

SEQ ID NO: 70627 - DNA, 913 bp, Cannabis sativa
agtacattaattatagattgttgttctttccaggcatgggaataagtccagttctctttgagcaacctgttcgcaaagatgactggaatggtcttgcttatgttcgaaatgttgcaagagacaaatatgggattcatgttggtgcagatgagagctgccagagcatgaatgatgtaaagagagtaatacaagataaattagtagattttatcaacattaaacttgcgaaattcggggttctagaaacactcgaggtcattgatgttgcaagaaaatcaggcttgaatcttgtaattgatagcatggttgagactagaattgccacaggcttcgctggtcatttgacttgtggacttggatgcttcaagtaattttactttctcttaatttgtgtcttcctcaacactaagtggattaatttaaattggttttgttgtaattactaattctttctacctttctttagataccctttcatgaacaaaggcctaaacagtccttttcattttgcagatatgtaaatctggatagccctttaatgttgtcagaggatccggttttcggcggatatgaaggtatacgtattctcagcttgagcatttgattagtgtttatgtgtgtttttttttttaattttttgtaatggaaagtgttatatgtgtttcatatagtctaatttgctatcgatctaacttttgtgtcttcagtttctggagctgtctataagttcacaaatgctagaggcttaggaggtttccttaagcatgagtcatgacagagtctcgtagtgggcagtgagttgcaacctttttttttcccttttcatttagaagactactatatacgtaaatatgagttttctgtaaatgttgtgatcttagtataaataccaaaaataaaatcactatgatca

SEQ ID NO: 70628 - DNA, 1188 bp, Cannabis sativa
gtaaataatttccaacagtctccatctcaataaataaggagtatagtatttaacctcctcaaatacaaattgattctcattttattttccctctcatttttgaatttcactctctcatttcttcagaatttcaaacttcaaaaatttcttgaagcttcgaatccccattctcctgagatgatttctcgaaggttgagggatctttgtagagtgatcacgaattcaagagaaaggatttttacacagaaggttagtaatttctttctcgtagcttctatgaatttgcttttctgaatgttcgtacgcctaccgggtttttagggatagaatatggtgcatgagattaatagagcttattgatagaataaaaaatttaggcaaaataaagcattttctctagaaaataattgcctaaaatttgaatactcgcgggttttatgaaaaactttgaatattcgtatttttatgatagaactttgtgcatactcgcatatttagatttattcgccttcaagtcaaaatttggtagtgattgggagttttgtagagatttaatgcttaattttttgggtaaccttacgtcactgtgaaacccccaaacactccgttcttctttggagttggtcgttttatttttatgcatatgcattcaagttttgattagaaccaaccgagtctcgaagtggtggggggtgtcccatagctgcatgaaccttaagatactgggaactcccagccactatttgagataatagtcagttttgtcgcacttgaaatttgttgtttgggtgagaacacttctttatttaaatcgcacttacaccatgctaaaaagatcttttatctttcagatgagcgatttatcggacaaccaagggtactattctggagataaggctttggccgatgaatctcaaaaaaatgaaagttttattccacattgctattggaagacgaggttcgtgcgggaggagctcgagaaggttcactatctaccagtgagattaaccacgtcgtccaagaattagaaggaccatcgattactctagaggtgtggagaagtgaattcacggtatccactcaaggcaacttcatttatccacgagttaatcctagacgcagaggtcggggaaatgggtgaagactccaagttacctactcgcagggttgaggggagtgaaacgttct

SEQ ID NO: 70629 - DNA, 2011 bp, Cannabis sativa
  modified_base (1656)..(1672): a, c, t, g, unknown or other
taatttaatataaatattatttttctaaaatattaatataaatttcaagtaatttaaaaatatattatttctcttgaaatcaatttaagtaattatcatttaattaatattattttaaattttaaaagcttatgtatgattttaaatacattttcacttattttaatgaatatatttttgataaaaaaaattataataatcatttaaattcttattaatttttaaatgtattaacaaaattaaaattaaaaaatcgataaaaaaaatcttacttgtatgagattatttatcccaccttactgaatggaataaataatttcagataaatagaattaatagttattcacactaattaacctatttaatccaatccaatcttaagtactaaatagaccctaaaattaaaacatcaaccctaaactattcaattttttttcacataagagaatctttagtcagcgtataaaaaaaattctcaaatatttagttgaatttaaagcattaggtgtaccacactatcacatggatcgatctaattggttggtgggtatatggggactagtgctatgattatatatatttggattatttggtggtataattttttttttttaaaaaaataataataattaatcttaattttagttcaatgaccaataaaaaaattaaaatttttgaacttaattttattatttaattaaaaaaattctcttagcactatattaaaaatatatttacatttaatatattttttatttttctttaattcaaatttaactatttctttaactctctttacaatgcaaaaagaaataaatttttgactaattaggttttttttactttgatatgtatcaaatcataccccctaaatttttaagatcgttaaaaatactccctgaactattaagattgttgaatttaagtacttttatccaattttaataaaaaagttcaagaaacatgatttagtacatgtcaaagttcgatagatatgatttggtagttatcaaaatttggggagtatggtttaatacataaacaatcactgaaatagtaaattgaataaaattagacaaaagtcctaaatctaacaatctcaatagttcagggaatatttttaacgacattaaaaatttaagaaatatgatttggtacatgtcaaagttcaaaaaataaaaatcttaattaatttatttatttttaattaaataataaaattaagtataaaaacgtaaatctataactataatcctcgtaatattaattaaaagtacgtaccataaatattatttatatttatcaattaagtaattattaattatttaaaagtcaagcaaaagtcagaggtgccatgaataatgaagcacagcacatgggtacttggaacctattaaatctcacagtttttcagttcagttcacatgactttaaagactttttatttttattttttattattattatttgaggatataagcaccgctacctctctctttgaaaactactatttatttactttattataaaatcaaactagctatatactacttataagatcccattctgattctagtttggctatggatttttaaattattttcacacatatataataagagaagcatacactgtatattattattattattattnnnnnnnnnnnnnnnnntattattattattattattttagtcattgattgtcttgcttcacgtgaaaatatgttagttcctttttgaaaaacaaaaaatgatttttaattagatcatgtttttctgaaaagatgtaattataaaaaaaaatagaatttttataataaatcaaatatagtccattacagataatcctcattaagtataattaataatagaaaaatactaaagggtactagtggtgcctaacacctttccatgtatcaatatcgctattgatctaactaagtatcgaatcccatataattcaatgtaatagcttttagggagtatcgctagccaatcgcaacgcgaca

SEQ ID NO: 70630 - DNA, 1410 bp, Cannabis sativa
aaattattgtgagaagagtagtgaaagtgtgtttgtttgcttaattttaactagtttttatctttattttctatttattaagccttgtaaagattattattttagttgtgtttatttaattaaattttgcttgttggctgttgagaaagtaaaattacattgttaggaaaaagaaaaggatgcgaggacaaagtggacataaaagttgaaactgggctgaatttctgaagcattgctgcaacgaatttaacatcctgggcagtgatgtggaaagagttgtagcaagaatttcattcgtccacattagcacgtacatattagccattcaaagttacgccagctggctgttgtggaggaaggagactgaacctagtgagccaagatcggaaaggattgggcttctatttttagggtattactttgtaccctttttacctagcattttaactagtacaactaccatcaccttctacacatgagctcagctaccatttttggagaaaagtaattctagaaaaagaaagtaccaaaaaggaagaacttaaaagaggaaattacctaaaaaataagaaagaggaggatacaagctccatttgtttgaatttctatttcctttcttctattttcttcattcctttaaatacttgaagttttatttttaaattgtaaaagaaaaagaaggtagcagccattgatgagcaactcttagtttcaattttaatttttgatttgaatatgagctaaactttttgaggcttgattggttatgaactcctatgttttgtatgattaattttaagcctattttagcatctttgccattgttcattcaagtaagcttgctattattaattgttattttttggccatgactaacaatttactaagctagatttggtttggaaaagctagatctagtagttcaacttgagtgaagcaagtgaatacctaaatttaggttttccttgtaaatggaataggaatatttcatttaacttgcataacctaagaattgatgtttaaatgtttttctgcaatctagtttgatataggaatatgttgatctaggtggtagaattgaatttgtgagttttggaaaattctcataaacatggaagaatttatgttatctttgtgcgaaaatgctgaagttatgctgtaacaactgggaaaatcctgggggattagttactcaagccactttttaatatattacatttcttgaaagcaattttatggtaatagtagtattatttaagcaagtttaattacagtccttttaaacttgaatcatttctcaaccattctcatattttttttttcttttactttaagttgtaattagttaattttacatcatgttttatttgcaatccctatggagacgatcttacttatcactttattact

SEQ ID NO: 70631 - DNA, 2335 bp, Cannabis sativa
gcgaatctcatgagacaagagaagcgcctgaacttacttaagggtaagattatcactacgcgcgatgatgcctgagacaatagagtcaaattctggtccaagaccatttaacaattaaagtatgacatcttgatcatggatcggagatttagcaacaaccaaggagtctgtgatcgactgcatcttatcgacatagtcagacatggataggcctccttttttgagagtggataattgacttttgagctgaaggagcctaaccttagactgactggaaaacctctgttccagtgcacgccaaatagagtatgaggatgtgaaggtggcgacggaagcaagaacacctttgatcatggaggatcgtagccaagaaagaagcaactgatcttgacgattccattgactgtaagcataatttggtgctcccgtgatcaaggtggttggagggggaatccatgtgagcaagatttcatcaagatcttgccctataacagtagggagaaccttagatttccaagactaaaaattagtacgatcaagcttgattgttcaggtggaagaaagagagtgtgaaaatagattctaggtggaattcagctgatttgtttgagcatcggtggcctgagtgaggatcgggaaagtcgttggagctattggagctggtgcaggattggtagacgtagactccattgaagatgttagtcaagagcgattgatactatgtaatagaacacaaagtagagagagaaagaggaaagaagaaaaccagaattggagaaataaaattatgaatagctcaattttattaattgccaaaagagatgtttatatacacaagaccaaagcaaaaataacaagcgaaacagaaaaactagtaacaaattgttagttgaccgttacaatgtcaactaacttaaccacttgtagaaccaactaacatctttcacattttgatacactattggattaatttttttgtaaagtactttaacacatcattagagatgctctaataataagtggtactatagtaaataaaaaatagaatttattgtgggccaaatgtagccaaaaaaaatattaaattagtcaaatttgttccataataaataacatatttttattgtgagtaatgatatgtgcacacatacacaaatttgacacacgtttgtgacaaaatattttttaataggtgagacctatcttaaataaaaataattaatttaaattttttgtcatataaatgtctgtcaaatttatgtttgcacatcgttattattattttttttttatattttatcgctcattaatgcaaacatattacttatactagattaattgtcacgtgcaaggcacgtggttagttagttaaatataatgtttattttataaaagtattggattataaagtatgaagagagaacaatacaaaaaatttaaaggaaaattaaatgttataagctattggtaactaaacttggtagtgcttattcatggtaaagtttggtgaccggtgtgaaattcttttcttttctgcccccagaaatcttgtgagcagtttccacttcactttaaaagcttttcaaacaacttataaattctgccatcaaataaacatgacatattgaattagcaaaataacaaactcaaacaagcacgggaataagtgatttcaatgaaataaatcaccatttactttgtttgaaatcatagccctataaaaaaaataatatagtttcttcttatacctaaattttatgagcatttctatcatatcatgaaaatagtagatatctgtgacatataaaagctcaaaacacggagaagaaaatgatgtaagggaaaattaataaattccataaatttgatcacatataacatattaaagaaactttctagaacttaacgaggtttctccaaaagcccatttgcacaatgatgaccctcccacaattcaagcccaccagtcaccataaacaccacaggctacttcactttccttccttagttcaataccaggcaggtccggccacacttatatcaacacttgaaattaaaatataagctaaaaataatgaagattgtacctttactcatggctttatataagtagaatgaaaatagataagagaaatagtaataaataatgcgaatatttgtctctttttgcatctatattgtttaccaaaaatcagaaaacagtgtgatttagaatgagttgaagcaaccctttcaagagaataagcgagaacgagatttctaacccgaacatataatataggggtttaagggttttgagagtgaaattgagagagagaggcttttgttgtgtttg

SEQ ID NO: 70632 - DNA, 2426 bp, Cannabis sativa
  modified_base (1525)..(1533): a, c, t, g, unknown or other
atatccaataataaatctaattataggatttatgatactctaattggttagctatataatgaacattaagatttgatccccaagactaatgtaatctcaaccattcttctcctctatttttatcaattgagtgatcgaacttatagagaaaagattagtctatggaagaccgtatatccattatcatcttatatccaatatcatgaaattagatatatgtcttctatcttattgattcatataataatttgagatgagttaagatctatatgtaatttagatctaatctctaacaaggtatcatgagcctcactctatgttagattattaagattattgagttttatttttataaacatgatattgaaaatattcataaaagatttagagttttgaatggtattatgtgtattattagtgcatggttatataattgttgaattaatgaagatattgataatatatgtaacatatattatcttatttgtttgtatttgttcatgttagatattattttaaagttggttatattaaaaaaaaaattgttgaaaaattgagctcatggtcctacttttactattttagaaaatatagaatcattttgtcctttaataaaacagagggtccaattaattacttttgcaaaatacagaactcaaaatgttatttactccataaatactattatatttctttttattttattaatttaatttcctattctatcaaccatattttttttatttgtatcatgttctttttagattgttttcatgttactcaacgaagtggaaaaaaaaatgtaattaaaaagagaaaaaaaaagtaacaattcgtaatgtcttttaaaaaagtaaatatacgtcataaaaacttaacatatatggaattgaattacgattaaaaaatattaaaattcccttcatattttttttaaaaagaataaaacaaatgaaactacaatgattgtcgaatttaggggtgaaaatcggttggttatggtcggtttttacaattttataaccgaccggttggttacggtttttattttacgaaaatcgtaaccggccgtttagaaattataactgtataaaaccgaccgtacggttcttggcaggttttcggtttggcagttttaggcagttttggcggttttttgatttaaccatttttttatttcaaacaccaaaaccgaccgccatgtcaaagaaactgaaactgaaaccgaccgccgaattcgttgaaggcgaggaaccgaaaaattcagttacggtctggtcggtttgatggtcggttacggtttatcactttttatgaacacccctagccggatttgtcaccgatgccaaaaaaggcgtcggagtttgctgtcagctccagaaaagttgtcggagtaactgtcggcaccgagaaagtcaccagagttgctgccgacactggaaaaatcatcgaagttggcattatcaccggaaaaattaccaagaaactgatttctacatcaagaatttcttgatgaagaaaccannnnnnnnntgatttttccggtaatttttccagcgacaattctaatttccgacgacttttccgaagtttattatcgatggagtagctgtcagtgtcagaaaaagtcgttggaattggtattgtcgccggaaaaattaccaaaaaaatagttttttcatcaagaaacatcttttcggtgatttttccggcgataatgccaattctgacgacttttccagcatcagcagcaactctgacgacgttttcggcaccgacagctactccggtgattttttcagcgccaacaacaaactctgatgactttttcagcatcagtgacaaataagactatctaaataaataaaaacattaaatatgggatttgaaaacctaatttacatatatatatatatggcatatcaaatactataaaaatacttaaaaaaaaaaaactatataaattagtcaaacttaaaacttaaaagtatcatatttaactaaacaacttttaaaatctgtctaattattacattttcaataacttgtaggctcaaagcttaggcccacgtgataatgttttcaaataagacattaaatgtgaagccaaattgggttgcatttatgttaaaataaaaccaaagaaaagtaagctatttgagtcattcgaccaaggccctccccttgggccctaagacctgaaggtgaaccccatgtttaaaatattgtttttatttttaccattttatggtaaaagtttgcaaaagatataactttttttttttctaaaaaatattttttggaaagaaaaaaggttaagaatatgcggaaataatataaggtaattgtttaccttaaggagataaatgattattctaaaaagtaactgattacctaaactatttttctcattctaactttttttt

SEQ ID NO: 70633 - DNA, 1549 bp, Cannabis sativa
  modified_base (1489)..(1491): a, c, t, g, unknown or other
aggtagttttcgtggattttgaacgtgagtttcaaaaaggtaatggttggaaggtagtttgggctgaaataaatggatatgtgtaagtggtattttagtaaataaaagctcattaaagataaaattgttactcacaccttatagagatatttttgtgaataaactgtcaatttatatttttcatgtaataattcttttttatattgtgttggacatcttaaaatacttaataatattaatgatcactttgctaatccttaaaattcaagaattcttttttaagaacatctctaatggtagtatattttaaaggtgttaaaaatcttcatataatctaaaaatataatattttattttatctattttttcacattatttttgacactctaattctaaaaacactctaatgatataacactttttaagtatattataaatatgatctcacacattattatatataaaaatatttttttattaaattttatattatacttttaattttttatttaaaaaaaaacatgaatgctattgcgtgatatcactacaaatttcaaaaattcattttttttatttttaatagtataatatctctctagtacttaaattttttattttattaaatattattattgaaaatgttttaaaaagaaggctttttttttagaaaaaaagaaaagaagaattgagtaatgatttgaatacgtggaagtacgtagatggtgacacaaacattacatgtgcaattaggaaacgtggcgtaatggcagctaggggtgtgtggtccaacttcgtatgatattactaattttttttaattttttcccgaatactaataatgctatttaataccacatttatagttattatttataataccacatttatttttccactataatagaacctgtacaaataataactattaatttttttttttaggaaaatttacaataatatatattatcaaattttattacattattatatgtgaaaaaaacttatttataaaaaaattgtaaattgagaaatatattcttatttttatatataaattatatgtatggtaacaaatttatatatactaatttaattaaatagtattgttattaattgataatcttttcttaattgtatcatatatttaatgatattctaatcattgtatcatatatttaatgatataagtatgatgtttttcttatattattaatagattaattttgataatcattgttaaatattaattttttactaatttattatatcaggcttaatattattgtgataacaaaataaaatatttattttttatttctttattttatataaagttacatacaattttttatacattattagtttataatttttctttatatatatacatttaatttataataaattataataaaatagataataaatatgtattctttaataaaaaatatttagaatgtttatttttgtaaaaaattattctaaatannnattaattttatgaaattgtttatttttttaataaacatgtgatttattaaataataaa

SEQ ID NO: 70634 - DNA, 1199 bp, Cannabis sativa
atttcaaccaaatatgtaatcccacctttctttcttctttttttcaaatgaatccttatataaatttttcttcaaaatattcttgtggcagatttttctaatatcaattggtaatttaaaatccaagtatcttttcacaattccaaagggggtctaattgaaataattatatacctttttctctctttctttttggcataaagattggaatgattccattcttaacatataatcatcttttgttttattattattattcttagagagagatttatgctgaaaaaggaaatatgtttggttgtgtgtaaatatattaattagtaattatattttaatattaaatttatttatttattttaattttttgataaatcaacatcatgctctttttctctaaatcaagatataatcttgccttcaaggcaagcacagacctttttttattgggatgatatcaaatattctaatctcattaatttgttagttggaaaaataaatattaaaaaattaaaaataacaacacttctttaaaatattgatacaactaaattataggctaaaaacataactatgcaataataagcataaattttgtattatgttaaactatgtgggagattatcttatatatttgaaagtatcataaaataaaatttctatgaattatctaccaacacatctttcctctactccaattttctaaaaacataaatttggaaattggatttttgtgtaaaaaaataaataattcacaaggaaaagtacgaaaaaaaaaaagaaaaaaaaaagattcaacaaaaaatttcatatcgagcataaaaatttgatttattttattttctacaattttcttaacttttttttaccgaaattcaaccttcaaacataacctaaagagaaaaacattaacaaaattcattataaaatacctcaattcaactaaacttgtatccaaaaacctaactcatctttgcctttttctatttcaccaaaattcaactttcaaacataacctaaaacaagcattagcaaaattcattataaaatactcgattcaacttaactcgccttcctcaacctctctaaaaccctacatacacacgagtattagaactcgaagaagatgaacttatagagattcatcttggaatagaattttttattctaaaactcccaacaaagactcatatttgatttat

SEQ ID NO: 70635 - DNA, 3200 bp, Cannabis sativa
tactctgtttcttatcttttaactgaaactgacaccttggcttcaaaacatgctttgagacgttaacaagcaagtcagtaatctaaaaattttcaagacaaaaggactcttctaaaatttcaacgtcatttttaatttttaatttaatgacaataaattattctaatacttaaacaaactcaacgacattttctaactacctaaactattttaaagcaatatattagcatgcataaataacataatcataaaaataataaaaataaataaaagtgatcgaccatttaaattttgaataacaataaaaaagtcaaatgaaaacctaaaaaaaatatgaataaaaaagagattatatatcattaaaatatttaaaatatttatatttaaaaataataaaactctaaacaaaacttaaatatctccacatatatataactatcctttcttaatctgttcattaatctatcgatttattcctgcaaaaaaacaaaaaaaagaaaatagaactcatcattctgtgaaacctaaatatttatataatattattttataaaattgaagtatcgacttttggaaccaatcttttatttgaagagctttgaagagcaatgattaaaagacaaaaatgtataatgtatatttatatgtttaaattagatatagtaatgtatgtatacgtaaaactcatttagatttatgataaataacataaatttttttataataggtgtgaggccatttttgaagggaaatttcgaaatcgatgaaagcttcaagtggaggacttgatcactataaggtatcttgtacgtgtatttaaatgtatcgataaatggatactgtttattttttgagtaatttagtcagctaatatattcataaataaatagatacaatgtgtttttttttttctgttcattcttctctcatttatatatatataatattccaaatggtgtttagtaatacaatcctcttatattactcaaatctaaacttatgaaaacaataaaaaattgatataataaattcctcttgaaaattattcaaaagttcttcaaaataaagtaccaagttcgatcaactaaaagttaaacctatacatcatttcagacctaataagcttcaaataatatatgtaatgactcatttagagagtaagagagagaagtacatgttgtgctcttgagataagagcgtgggaaatagatatataaggattaaaacacatataattcccaaaaaaaattaattaaaaatgatttggtaaactaatgtattttagaatttttgacagctttatgtagatgtctagattgtatacagataatttttttttttggaaaagaaaattttcaatctcattaaaccattgataattttatttatttaactgtaatgaaaaaacaacagccaagaactatgatgatgtcaattgattaatcgaaatgccaaaaaaattatgatgatgttaattgataaatatgaaaaaaccatttacatcacaacattgttaaataccatttactcaaaacatcgtctaaacattaataaacatagacctactaatactatccagaactttctccaaaatgctgtccaaaaaataaccctcacactcaaccataaactagtaaaagaaaccaagaactttccctcccacatttttcctacgtgcctcttcatgatccatgattcaagtagaggttgtcaaaaccatgtacccaaattaacgatatggaagcaaccatgctgtcaaccctaatgatatacctaatgacatacactaatacactcaaggacataacaacaatacttaatgacatacacgcaaggaagcaaccttgttatccaccttaatgacaaccttgttaaatacctaatgacatacactcaaggacatagcaacaaaaaaataaaaacagaagaatagtactaacaagaatagcctataacaaaattctcaaacattcattacattgaaaatcataatcaactaattaaaggataatcccataagaaatgaaaagtaaaacaaaaaaaaaaaaagaaggcgagattaagcaccaatgattcattaaaaatttaactcctctatagtatttcttacctttcatcggcggatatgaatgagaccgcgccatttcctcggctaccaaaaagatgatgatgagcaggaaaaaaaatggttgagaaactcttctgctctagcagtttaccgaatctgagcaggataacacagcaacccagaagcatcagctccaataatcgcaaggtcacaagcaccacaaatcacaatggagataaaacatcaaacccacatatagaaaaagatccagattcaaattggagaaaaagaaaattaaggaaataaaagtaaagaaaattacgagaaagaaaatcaacctgcattcgtccttctaatttgcaagggaggagctgtcatcgttgactgtgagtaggggagaagttgtgccatcatcgtctacaagtgggggagttggagtcatcttctacgagttgtctatcgtcgtcgactcttttgggctaagtggtcggagatgggcgggtagcactagagagtgtaagtggatttgatcctgagagagtgcgacaaggagaggaaacgagagagagagagaggggagcagatccatttgcagggagctgtgcgcgaggttggaagagagagggtagctaagaccaaagggataatgatgaaattagggtttcaaaagttgtttacccaaattagtttaatgtttttgccttagtactgaaaaaaatagtgtttaatgataaaattttattaatttttaattttatataaactttatctatttataatgtatgaaacaagaatccttaatgatggcacatagatgtctatttaaaacccttaatcgaagaatcaaaagaattatgggagaaaggagtacgaacttttaatgttattgataaaacatattttacaatgcgtgctgctgtgttatggacaattaatgatttccctgcatatgtattgtgtctggctatagcactcaagggtataaggcatgtccattttttgaggatgacacatcttctttttgagttaggggtaagatctcttacatgggacatcgtcgatatttgtgtgttgaacatcagtgatgcaatgataagaattacgatgctacaattgaaacacgaaatccccc

SEQ ID NO: 70636 - DNA, 1115 bp, Cannabis sativa
attattttcaaattattaattgttatgtataaaaaataataacaattagatatgataattaataaagtggaaattaattgtttgtacgtgaatgaatgtggatggattagaggaagcatatgatgaggaggtaaggtagcagcctagcacaataaagttgatgccacgtggatgggttagacctttattttggaactttatttcatgaaagggagttaaatatccactaatcatctgccacgtgtatcattacccattgaaaagttgcagcgtcaaatagcttttactgcattaattttctttctcaaaacattatgtttgaccttacttttcatttatatgagaaagtgctatatatctaatttgattagtatggtccaacaaagcttcaaattcagaatattccttgggtatctcactctatatatatagtatagtataaatatataaatatatatatatatatggcgtatgatcgatgtgtacatatatatatgcatgtatttaaataaattattaatattagcaacaaataattccttcaatatatattatcttgtaacacctcctgtgatatataaatattttcttagcttgggaaaaagaagtagtcatttttatgtgaaacttgttatttaaaacagggatttaataaaaaaaaataaatatactataacatcactacttgcattattattattatataattgttgcccaaagcgaaaacaaaaaaggcaaattcatatcaatgcagtctaaatacattatatcaccgttcacgtcaagaaaaagaaaagaaagagagaaggaaatgtctagataaatgaagggaaatttaagtatcagaaattctaaagggaaccagtagcacttagcatcatcttatgtgttaatattgttattggtctaactaagtatcctatcttacatagtttaatataataaattttagtaaatatcgttagtcaatcgcaagacgacatgtctaaaggtgttagacattactggtgcccaataacaatgctctttaactatcaatgcatatatttgtgggaaattaattcctcaaacttatgtgtatcaatattaaagaaatgtgtatacaattatgttga

SEQ ID NO: 70637 - DNA, 2179 bp, Cannabis sativa
aagttaatattatatgcctatatagatatcatattttaacacaaaaatataacatatattttttttttctaattttttttttggaggcaactatatcccgcataatccatattgagcgtacattaatgatttaatcctaagaaataacactaatttaattattaattaggcctctttaagggctaaaccatgtaaagctgtttgttgtttttcttttgttaatttttatcttctaacaataaatttctctcaatgtagatgatgaaaccagcatcacaagaaatctttttttgtagaagctagataaacagaaaattaaatagattacatcgtattgtgtagttaattgcagaaggtgagctagttaggttatggaaagaaaaagaaagatcaaccatattttaaataattatttattggatacattgatcgctattaagtggacacttaattaggctttctcacacattaaaatactagaaacaagttgtacacatattgaaacattaactattttattcttaattaagaatgagttattgtcattttaagagcaaaataaaaactaaaaatattaatattagagtttttttaaatatttatattttctactagggttttactcacgatttttagctacctgaggttgtttttttcagggcttagacgtggcttgtttagggttactgtgattatagtcttatctttgtgacatggttgttgttttgtctttttgttcttcgttgccttgtcgttatattattgctagtggttgggataacaaattgtggctgaaggaattgttagtggtgcagttacgtagcttgcataatagttggatgctcaggctaagagaggttgaatgaaactgctgttacagatggctcgtttttttttttattctaattcttattgtgttccaataaaaaagatgtcttgattaggttggatattggtattaataaaattgcacgaattcttaaaaaaattaataatgtactttattaagaaaaaaagaaaaagaagagtgacttaattaatgtactgctaccctatatgtaactataaaaatggatataaacccatattataaatatatatatatgaactatatacatatgtaaataaatgcaacggtttacttatagttattttaaacgctaacattaactaagaattaaatatatatataaagattttctttatgatacacagttacattcaaaggaaaatgtaatggccatgcattactaatttttcattaattttgagaaaataaaagaaaagaattgtagtttttatttattgattttaattaggggtcgatgtggatattaatattcagtttaactcacgaggtaaaatcgtttaagttgatgatgcctataatatgattttttttttcattatacatataatatgattgatatttggtgttatattattatactatgattattccattactaataattataatttcatgtatatatacatatatagatatttggtgttacgtttacaaattaaatcatttactatttttttttattacattaactctacagtaaaaactgcccacataaagacaaaaaattaatgtgaattgtgactaataatggtgtgttttaacgtaattaatgtgtattgcacgtttacgggaatattatgatgtaaagtattattattattattattggtgtaaattaatattgggtctaatttattttactttcatacaaattatagaaaactatttatagaggataaatttaagagtacatctttttttaatccattaataaacaatactcaaagaatagtctaatgttcaacactattttccaaagtatgaatcttgatgattttgtcattcaccaaattattagcttgagttttggcttcattgaatgcagctaggacttattaatacaagttcatctggaagaatatatatgaacaatgattaaaatacaagcacaagtgctaaaacaaaaaagccattattaagcaaaaaaaatttatgtatagaaacaaatgtttaattttattttagattatattttctttagaaagaagaataaaatatacatttgatttactatgttttgaaatatatttgtattatatatattagattttaaattattattttttacattaaaatgttaactgtatg

SEQ ID NO: 70638 - DNA, 3436 bp, Cannabis sativa
  modified_base (294)..(298): a, c, t, g, unknown or other
  modified_base (1220)..(1237): a, c, t, g, unknown or other
tttagtgggtcaaacttgatggcttagtgggtaagtatgtgaacatataattagtccatgcattgctattccacacgtgtgtgtgtgagaattaaagtagttcttattttgaataaaaaaagtattgaagaagttggtaatgttattttattattgttattattttattaattggaagaaggtatataagttgttggacaaatggttgcacacacaaaaaacaaaaattactaattaataagaaaacaaaccaaatacaactttgtcttattaccataataataataataatannnnnaataataataataacaattattattattcctctatatctaaattataagtctcttttggacagacaatgtgtaataaatatatagttataatttgagcaatatatataggtatgtttatactttataattcaatttttaaaagagtatttcggtagtttttttttgtttgtttcagctttcaggaatattttagtttattttttttttaagtagtgtgtattataattatttaagattatttataaatttttaaaaaatttagaatacggtacaatgcaaaaaataatatttacatatttattatatgcactaccattttttttatacgcatagtaaaatttacaaataattttaaatggctatagcgtacgcgatcattaaaaaataatacacaaaacaatttttaaatgctaaaacagaaaaaaaaaaatctaccaaaacgactctctaaagtgtctattaaagtatgggtgtggattgtagtgctttctggttggctctcatgctaacttggtggctcacggtggcttcaggcgcgtctcataattctaacaagggaagtagcaccatttgtatagctaccacaaaaagtaattttctttatgaagtttaggtgcaattttggtaacactttcattttctaaatttttaatcaaaatgaaagtaaatttttttttttaaaaaaaattatttttaaaaaacaaaaatacgttctataactacttttatttttcaattttaaaaaatagaaaatcaaagtgtgttctgtaaaatttatttttatttttatttttttaattttatttaagttgggtctaggtccagggtcagattcgggttcggtcagaggtcaggttcactgtcaaggccactgggggatttggatttgagtctgttcggagtctaaaatattgattaaannnnnnnnnnnnnnnnnntattgaaagtgactttttttttttaattttgattatcaattaaaaaattaaaagtaaaaacagttttatagaacatatttttaaaaaatatttttaattttacaattttaaaaatataatactaattaaaaaaaatattacaaaatgctagcttaatttttcattaaaaaaatgatagttgttaagtcaatgagtcaaaggatgtgtattgtattttcaaaaaaaaaaataaaaaaataaaaggatgtgtattgtgctaagaaaataatatcaagaagatatctttttgttttgtggacttgatatgaaaggaatttcttccttttgtgacatcactaaatgatttttttctttttcacacagaataaatataaaatggataatttgataaaaacataaaaattataaaataaaaaataaaacttatgaaattgtaaatatttttacaagttttaaaattttcttttaatgtatatttatgttgtactatatattaattttttattatttgtatattattttttattattttcatgtgatttttttatatttttatagagtatcgtaaaaatagaaaaataaaaacttttaaacataaaagtataaatattttactaaaaatattagtttatgtaatttttcctaatataaatagtgtaagcataacttaaatttgagatgtcactaatcttcccttattagccaaattggttaaagttggtggtatatttcaacgaagtttctttagtttttttttttctcacgtatgtgtggttgttgaccaactttgtaatctttgttggtaaaatctttcaaattcacattatcttttgatttttattattatgttaaattttcatagttaagtgtcaatgtagattatctatatctacacaattatacacattatattttcattgatccacataatttaattattataaacattaattaaaaataattttaaaaaaattacaatatagaaattcagcattataagttaaaaaaaaaaaaaactaaatagaaattcaggattattttaattatataatatagaaccataacaacacaatattgtaatatataataatatagtttcatagaaatcatttcctctgttgggattgttatgtgtatagagctttcgaattaattatttggggttgttaaattgaatgttttaaaaattaacaaaggcccactatttggaccatcataagtaacattattaatgattatatatgcatgagtgattagtgggttgggttggtgacaacaaccaagtcaatataacaacaatacattgcacccttcttcttcctcttttcctattctaatattagagaaagaaaacacatcctttgagtttgacttgaccaaactataacctttacccatttctttaaataaaatagtaataataaagagcaatttgaacttatttttatacaactaaatttacaatattataaaaaaaaaaaatgcaagaaatattaaaatataaataaattaattttatatgtgtataaaatagtaaatattttatatttattgtattgggtaaaaattaattggtttgatattgtttataaggtcatattataatttaccaaatattcattgctcgatttgatttttttgaattaattatcaaaatattttgataattaattgtggcagaaattttaatagaatgtctcacctataaaaatataaaatttcgatccccaagtttattactcattatgtgaaatacagtaaatttatataaaagaaaataaagtaaagagagcttagaaatccgattacccacactaatcatttattcattctcttttgtagatccaaagttaatatgggattgaagcccaaaaaatcaataacttaaggtatttcgatcctttagttatatgcatatatgttggatttattctacatttcataaatcgttcacgtgctttttttatttgtatataatttctaatagttagtacgtatcagagccgttattatttctgtcttgattattttgagttttcggtatatatattgtattgtctctgtatgtattgtttgttcatgattaattggtgtaaaatttttgttttaattattttaatacatattattattaaaattgttatatattcaatattaatatttttatatctattaaaactaattattttcatatatata

SEQ ID NO: 70639 - DNA, 1042 bp, Cannabis sativa
gttcgggaacattcttattaccttctcgatcttctaccacatattcctgacagaaaattaccactacatattactaattgtcctatacaagtcaagtttcagcaagtagaagttatacaaacctttgttagttcttgtttagcaagaacatggtaatggcgttcgctgatcctttgtccacatattatggctataaagaaaccgtagagcaaacccaccaaaacaattgctaaaactgccatcaatcaagacataaggtagattacagttacatatactgcatatgtgtcaaactaaatcatgaattagttctacaaatttcacgggcgcatcaaatccatctcattgaattcataataatatgttttgtgaataagcagggatatgttctcgaagatcataaacacctgagttacacatacatatcaatacatgtaaataagtaagtgaaagagagagacagacagagaatgaagaagagggtcaagggcaatgaaggaagtactgcattattgcaattgttattagtatgatcggtaaggcaatgaaggaagtatttgtaagtaggaagtggatatttgccaacgaaattgggacaatgcatggataagaaagttcgaaataataagaagaaaaaaacacatgagagatatttttattagacttgttcatcatggtattttttttaaggatatctagctaattttccttgaaaaatagtgaagatgaagagttcatgtttgtaacttattctttatgtttcgttggaattgaaaaaattagttaccccataaacatggcgcctgtttaatggcttgatttaatgtatcttgtctcagtatgataaaaattatatacattatctaaacaaaagatacatataacacatacataactaatctttgatgacagttcagatataatttatttggcaaattaggtgcgaaattaggccactctaagtgttttttttttttcctcttctggggaaattatacagctcatacaaccaacataaatggtttataaaataaaaatagtc

SEQ ID NO: 70640 - DNA, 1110 bp, Cannabis sativa
aatccattaaaatttttaatactataaattatttataaattttcaaaaattcataaaatatttcaataataataatatacactatcatataacaaaacagaagaattatattctataggattttaaaaattgtttaagtttaactaatttatatgtcatttttttattcttagatattttatggtgtttgatgtgtcatatatatgtaaattaagtttttaaagccatatttaatatttttatttatttaggcagttttatttgttattggtaccaaaaaaattatcgaaatttgttaccggcgctgaaaaaattatcggagtggctgccggtgtcagaaaagtcacgggagttgttgctggcgccagaaaattcatcgaaattgacattgtcgctgaaatttatcatttattgatatgagcaagatactcaatgtatatatacaagcataagttagttataagctaaccacaacaagaagacaaaaagctaacaaataacatataaataatagaaaataaccgactcataatgagtctctaacaattaggtgttgcactttaatggtcctaagcctaaccacactggaacactacccctcagctcatctaatttagtcaacactcaacactactcactcattagtcaacacttttcttagctcccagaaatggctgctaagctcaaacccaatccctccgatcatcttctcatacttattgtcgtcttcctcatcgcgatcgattcatttgtaccgtccacggcggaattttcctcatccaaatggtctccacgtttccttggaaaattttcccacccgaacaagccgcatccccaactccagctccaacaacaatctcaattccaatacgacacccgatacttcgatcagcgactcgaccacttcagtttctctaagctcccgaggtttcgtcaaaggtacctcatcagtaccgagcactgggtgggtccagagcgattgggtcccatcttcgtctactgcggcaacgagggcgacatcgcctggttcgctgccaataccggcttcgtctgggagatcgctcctcagtttggcgccatggttctcttccccgaggtaggtttttagag

SEQ ID NO: 70641 - DNA, 1397 bp, Cannabis sativa
cgcatttaattaatcatttaattaaataatcaaactaggaatattaaaatacggaatttcaattaccacaatgtatcttaaacataaattatacgattattcatgcagaataatctatatatattagattatatataaaaaaaagtaatatatatatatatatacagatttattgaaagatatttttttttttataaaaaagtaacttttactatagtattagtattattagtaactaaaagatttaatgtgaaatactcagaaaaattaaaaaaaaatcagaattgaaatttttttctattttttatatacaggtataactaatcaggtatatatgtactgatgtggcacggtattttaaaatttatttaattaatgatgattttatgaaaagtttctttcaaaatcattttttatgtattatttataatgattttaaaattatttgtaatttttttctttatttaattaataaaaatatttatataattcacatttaaaaattatgagtgactaaaacgtgtatgatatatatacttttaaaaatagtttactaaaattagtagcatgttatactacatatgataactgattagttttgaaaataaacttaaagatactcaaatgtattaatataacttaaaaaaataactaattgattattaagatgttacagaaataagttttggagataacaaaaatgtatctcaaattatataatataaaaatgatgattttattatatgaaaaagtaactaattaatttcttatcatcataagtaaccaaaaaagttacttgtacttttgaatcttgtgctttttgtatctctttttctttggtcggcatgctagtattttgaattttggtgggactacaataaaatttttgatctcatatcaagtatattcattacaagaaaaaaaaaaggtattagcacgactaaattagtgccaacaaactcattttttagtacccttcgttttattggaacgacttgtcgtgcccttttattcgtgccaaaatgtagcaacatcacaaataactttgtgccagttgcctgaacaaatagcacgacaagtgtagtgcccacttaaaattcttaaaattgtcagccatagcaataggcaccacaagagtcgcgcccattgtttattatttaaaaaaataattttttaatttaaattaatttatatttatatttaaaatatatattaaaactaataaaaattacaatataaaaaaatattttctactatataaattaagaatcaaaataatattaatatcattcaaacaattaaatacaactactaaattaagtgctcaaataaaaatacttatattgtcacattcatacaacaactaaaataaatgtttaaataaataatacttatat

SEQ ID NO: 70642 - DNA, 2899 bp, Cannabis sativa
  modified_base (2298)..(2303): a, c, t, g, unknown or other
  modified_base (2518)..(2524): a, c, t, g, unknown or other
gttaaacggtctgctaacaaagtcgcgtactgtatggcacgtggtgcttgttattggtcaagtcgtcgttttactgagagcgatgctccaattctcttcaagcatttgtattagcggatgtttcagtctaataaagattattttcattaaaaaaaaaataacaagcatttaatttttttttttgtaaatattagaaaaattaaattagatcttaaaaaaaataattttcataattaagaaaattaaaaaagaaatcaaatttcaaaattaagtaaacagtataaaaaataattattttttttaaaatttaatttttgtaaaaatctaagggtgcttttagtaacacatttttaatcaattttttgtttttaaaattataaaagtgaaaatattttccaaaatcacattctataaaacttagtagcaacattgccctttaaagtttgacgaatatcaaatcataccccttaaaataaaaataaaaaagattcaatattttattttgtaaatcatagaaaaattaaattagatcttaaaaaaaataattttgaatgattaagaaaattaaaaaatcaaaatttcaaaattaagcaaacggtataaaaaaattattattttttaaaaattcaatttttataaaaatctaagagtttgtttggtaacatacttttaatcaattttttattttaaaaattagaaaagtaaaaatattttctaaaattacgttctataaaactgtatttactttaatttttaattgtgaatcaaaattttaaaaacgaaaaccactttcaattttttaaaataatttttttaattactattttagactctgaccccaacctagaccttggaacctaaactcagacccaaacccgaacactaactctaacccaaacccctaccccaacccaaaccccagacttgggcctgacctggaccccgaccttgaccccagatccgaaccccaacctcaactcggacttggaccctggacccagaccccaaacccgacctcatgttttgtggtactaaatcaggtacatagcgaaataaaagtttttaattattatcgtaccacatctcaagatcaccacatgtatatatattaaatctaaaagtaaaatagatgaaaaaataatttacctctcgaagcctattagagtatctttgaatctttttgtcaaatgtatcctatcagttgatctcgaaatactcataccgtagtttttggaatctacaaccacacacaaagactagcgtgtgctagtaggataaaatgtatatgaagttcttgttagattttcaacacatgagcaagaacaattctacattgatgatggagagaaaagattaataaaattaattctttttatgcttacctaaaaataatacgttaaaaattctatttcttatttgtatcttactaggcttatatggtatatttaaataaacttaataaaaattttatttaattaattatttaaatttaaattatttattaaatcatatttaattatttaaattaaataatataacaaaattctattatagacatttatttcatataactgattgaggaaatcactcaactacttgagggaatctctcaattaccttaagtaaatatctcaaccaatagaaatatctataactatttttcaaattcaaataaatatttatcttttgaattaattaattaacccaaaaataaatccagtggggacaaccctatagtagtgggcgcccatcactctgtgaggatacagtgtaggtggcaccacccttgtcttaattaaggcaatggtggtgccgtttgtccaagcaactattttttttttgatgaatatgtccaagcaacttttatctttttccaattatttaattattaaattttaaaaaattatttatttattacaaaataattaagtaatattttgacaaatcaaaatagactttttctgaatttccatatagaacttttatccctacccttgacagtatttcaaggtggcaattcggggatcatggacctataattctaagctctaataaactagattatttattgaatctcatcaatcaaataataacatttattaattctatgattactccattgtaaatataaaattgaactcttagtaattataaaaccatatttaaagagttttactgcaatatctattgatataatcaattccagtgattagccctcctcgtgtcagtttataattaattttggtcaaattagcgatatatccttctaattactttttatcctttagtaccattaannnnnnagtgaaagtataatttagatcaaatctaaatttgtgcacaactttttaattccaaaattaataccttaaagggaaccaacattcgatttgttaagaaagttagaattccataattatagatcatctcatccatccacattataagatttcataaacataagttgtaagaatcatcttctctaagaaactttgacgagtgaatcaaagaaactaannnnnnnaacaagagttcatgattactcaggattcaggctgatatactatcgatcgtcgttatgatatgaattaggtctttataataaactgcatgtttgataaggataactatattcatatcggtccttgtcatatataatatctataaaatacagtaccttcacttagatgtcatactatatcattaatctgaaccgagattacttgcactgaagaatgagcaatagtgaactgtactaacaatcactgattaaagattccataatttcaatatgttgatgaatattttattcatagctaagtgatcttagttctctgtacaaccacaagtcacaacctcatatatgaataagaagtttttcgatatttatataaattat

SEQ ID NO: 70643 - DNA, 1253 bp, Cannabis sativa
aatgtaaaatttcacagcttacctaatattttttttttacggatcacaaaattactgactgccacacaaataatgactccttaaaatttcattcacaccaagcttctattatttgttacatgtcgtttgtggagagcaaaaattttagctttaaaaaaagtttaataaacaatgaattttcaaaaatcataaaattaggtgaacaaaataggtgtaagcaaattggaatttttcacattttaaatattaaacaaatataacataacgtgtccataaatataacaacaacaattcattcttcttcaaagtcaatctctttctttacccaaactcaaaacaccatcaatggcctccacccttactcaaatctctctcttcttcctactttcaacccttttctcacaaccccatttctcatcatccctcagactcctcagactaaactccgacgaccctcgattcactcccacccaatcaatctcagacgtccacgaccttctccccaaattcggtctcccaaagggtcttcttcccaacaatgtcaaatcttactctctttcagaagacggtagcttcaaggtcgagctccaaagcccttgctatgtctacttcgatcgacttgtgtattacgataggaagattactgggaaattgagttatgggtctgtctctgatgtgacaggaattcaagccaagaagctctttttttgggtttctgttactaagattcatactgataagggttctgatagtattagtttttatgttggggctttgtctgaggatcttcctgcttcgaaatttgaagaaattcctggatgtaggagtaatggctgtaaattgactaatccacaatccatttgagcctttcaggtatattcattcacttattattttatgattatttgaagattgtttgtctagaaagttttgtaatttgattgtaatgatgggattgttttgtttggcatgttcatatttttgtgtttgatattgatggtggattggtgggtttattttgattttctctaacttgatttcttttgatgatgatttcaagattatttttctacaaagtttggtaattttactgtaatgatgggattgttctgtttagtttgttcatattttgatgtacatacacagatatagtatctatatattgacacattctgtgtttgatattgattgtggccttattttggtttcaaaattgctttcctttgatgatttcaagattatttgtctaccaa

SEQ ID NO: 70644 - DNA, 973 bp, Cannabis sativa
tatcagctggcttcattgtgtttgcaacgtcgatcacaaaacggtatctaacatctgctttggcaaggcgctccattgctgtgttcacataatcaataggaataacctcaatctcagctgtgatgttgtgtttggctgcaaggtcaatcatttcttgtgtttccttcatccctccaatgcaacttccaccgattatctttctccctattcaatcatataacatatcaataataatgttgtttagtacgcagaagtcaacagcaacaaaatattatagttaagacatcaccatcatatatattatatatatgtattgatgaactcacccattagcaaaggaaaaactggtagctcaagtggtttctccggagcaccaaccataataagctttccatgaggcttcaaaagaccaatcaaaggcagtagaggatggacagcagaaaccgtatcaataataccatccatgcttcctatggcagccttctccatccaaacaagaacaacacaaatgcatttagttcatttaggcacaaactcaattaccacatttcatttatgactgttgaaaccacactaacactacataatgcagtagctatcaatttggtggaattaactaataataatcatttttaatcagcacatttaaattataaattataatatctaaacatctcatatgatcattttgtgtaacaatattaataaatagcaaaaacaaacaaactgagcatatatattatacctggagttgttcttggtcacggctgaccaggaatgagtcagcaccaaggctttcaatagcttcttgcctcttatttggggaggtactaatgacagtgaccttagccccgagagccttggcaaatttgacagccacgtggcctagcccacctaagccaacgatcccaacatgaagaccaggcttatcgagtccaaagtatttcaagggactgtacactgtgatcccagc

SEQ ID NO: 70645 - DNA, 1946 bp, Cannabis sativa
agattaagatatgaaaataatatattactaaccttttcagctccagttgcatcatcaaccacacaattttctcttaagcatgtccacattgcatccagatcatcggcatttagcaaaagatctgattgcttctgcaacaattaagggaagaatgtctaaaggaaagcgccaacgatttagcagataaacacacaacaatatagattttaaaaagaaaacgacccatacactacctttaaaaaccgatatttcgccagcctttggaccctattactgatggatccttcctcaggtttctgaaacacaataaaacaataatttaggaaaaaggaaagtatatggaggacacaatgacagaataaaataaaataaactgtgaattatacaaaacttttaaagcgtagatgcaattgtatcatatgtaactcatggtcgtgtcttagtaatttagcatttcaagttgtccttgcaatataaaattaaaacacatgccttcttatagaaactcggaattgtgccagcttcagcacttttttgttgcttctctttgaaaatatcaagcaagattttctttgtttcaagctctacaaagagaaaaaatacacaaaagaaagattaagataaattgtacaccacaagaaaatgcatagtcacataaacgtgtcgagagcatccgaacatcacaacacatacacagttcacttctatgcaagcaataatgtcactcgaaatctatgttgtagaagagataactgtaccaaatcacaatatggaaactataagcatggttatgaacttatgatgctctcacactttaactgtagtaatgggctcgcttgcataaatgataaatgtatcttacttgaagaagaatccaaatctcatgtgcagtcgaccacaattatacaaattcaaaaaacaatgaaatttcaaattgatgaggatgatctttcattaggctaacagtaaaatgtacaatgaaattggacaagtgatcctctcctctccaccactaactaaaatcacaaggtagctaataaattagataacaatgaactcattgaacatataaagaatttaagatagcacacttaactatatattctcatctcatttcgttaggaaaccaccgcatactttataaaaatactaaatttaaaggaaggatctttcagtacattatctcagctaccaattagatttcaagcacaaagcacaccaactttgctaaagaacgcaccaatgcaggttaattaacaacactacatccataccaaaagaaatgaaatttaaacgagaaaacttcaacaaaattagagagttgcaagtacccattagagcctcagatccgagaccccgtccatctccgatgaatcgtcggaggttcctgacccaaggcatggaagaagctggagggatcttcctatgcaccgcctcatggccttcgccatcgctggaaccactgtacatgaccgagtcgaatcgtatgaaccaactcaggcagtcgaatttctgaaaaccctaaaaccagaccgctgaagaacctctgatcgatgagtttcttcttctctctctctttctctctctaatgtatattttattatactaattatatattagttatgcaaattgtcataaaataaacactaattagtaatttttcccttgaatcttgtcattaaatttttttttggctatttaaaattcctttgaactattgagattgttgaatttaaagacttttgtctaatttcattctttttttttttgaggaaaaagcgtttatatcataacataaatcaaatagttagacctcgcggtcgttacacaatatattgtttggtaaatccgaaattgggataaccccaaaaacctgatgagcaaacgcccatctagccacattatgagcggtgaagttacaagacctgtttacataaacgaaatta

SEQ ID NO: 70646 - DNA, 1446 bp, Cannabis sativa
cctctacgtgtctatatttatgagttaacataagtggtagtaacagtgtaagagaattgtaatattaggtatttttgtctccaaaaataaagataatgtctataagcgtataaaatctgaaacattaaatatttatgccgcaatttaccctattaaaaaaattatattttgaggattattattaataaatcgtatattataaataaaggacacaacttgatattgtaaaaaaaaatgctaatgttcactttaaatgtcaagtacaacaaaaaaataatatattgttaatagtgcatttccatatcatgtacattttaatttaataaataatataagtaagccctaattaattataaaatattttattagcatattgattcacattttaagttgcaaaataataatactatctacaaaaagttcagtgagcagaaatataaatttttctttattttattattattttatttcgggtgacaaaaagagaaccttcaaaacttaaaaaaccaaaaccgaacttttcaatcagttgaaagcttatcaaacaatcttattacttttcaaaagtttatttcaaaggttttgaatgggaaaggaaaattatacaaaatttattacttacttgattgattagttaaattagtttgatctcgtacccattgaagatgaccgtttatttagtcataattatgtgagccacacatatacataattacatacagacttctcttctccctaatactcattatacaactacttcacctccaaagatctttcctttttggaaaagaagaaaaaatggttcatttgcatgagagattcaaggctttcttgaaaagcagatggctagtattcgtttgtgcgatatggattcaatcctttactgggattggctacttgtttggaagcatatcacctatgattaagagcatcatgggttataatcaaaggcagctctccttattgggtgtggttaagaccttgggtggcagtgttgggtttgtggctgggagtttgagtgaggttttgcctatttgggggcttttgctcattggggctcttcagaattttgttgggtatggcttgctttggtatattgttcatcggagatggtctggtgtgcctttgtgggtggtaagattagacttttaatattattatgctaatcttatctgattataaagcttcaatctttacatggtaaaagtactgatcaagttttattatctgcagctgtgcatttgtatttttgtgggaggaaacggagagaccttcttcaacactgcaaatctggtttgttgtgtgcagaactttccgaaaaatcgaggccctgttgttgggatactaaaaggattttgtggactgactggtgcaactttgattcaggtttatgccatattcaatttcccagataaggcttcgttgatttttatggttgcagttggt

SEQ ID NO: 70647 - DNA, 1075 bp, Cannabis sativa
cggatatccgcattttgcggattggattggattggatcgtgcagattggattggatcggatactttgtgaacacccctaattccttatacatttttatggattattaattttttatttttatatttttacgagtttttttatatagatttttactttttttttatgacttaaaaagtttaagggtacgatctagtacatgtcgaaattagaaaaggagggggagggagaaggggagaaatcctcttaaatagaattatactcgtatagaccatatatcttagtataatggcactaaatttatagaatttaattttcaaaaaaatgaaattaaaatttagaactaaaattgaagtaaaaaaaattcaaatatgaccaaaactacccttccatttataaatgaatgaataaattaaaaaataataagttaatactcattaaaacaaaagtaattatttttgtttattaaaaaaattagggaaattctttggtgcacctccccccaaagggatgtactgatacactcccttcatattttcgacattcaaatagttttaattatatatatatataacagtgtgttgatatgagaaattagcgctctaattatcgacaaataaggcaaattaatacgaacaagcgtcctagattacatgtgttgagcagatgagagaacttgcctataaatttagtttggatgggacgaagaggagatcccgagacccagcaaaaagcttctcctcgctccacgtgtcacaacccccaacaaggggtcccttgcacatccctctacgagggggcctcttccttgcgacccgacccacaacgacggagtgcttaccttactttcattgggggcccctctcctcgaaactcgaccctcagcaaaggggtctctaccttgtcaccatgggggccctcgccttacgattcgacccgtaacgagagggtctccaccttgctcgtcaaggctccaatggggagcctccttgtctcgcacaacataatctcacgagggcctcactcacacgagaggtcccatcacacgaagaccctcattgaagaaaggttcttgtt

SEQ ID NO: 70648 - DNA, 769 bp, Cannabis sativa
tgattctactacacagtttacctaaatttggattggggaatgcaatgtgtataattttgtagtttggtgtcatgtgaataaaaagttttcattataaaatatctgattattatttacgttattattattttcattattgttcttttctactgctacttcttgtgacatataatagtttcatatatgtgttattgattttttttttgtctttcaaacttttgtaatatttgtaattataaaatttgagtttgtgattctatttgctattgtttgtttgatttcttgtaggcagtcttgctgaattcattattcgaatgtgctcatattgtaagtggtatgttctttgttgtacaattgtattatagataattaacacaattttattggtaatattttttttcaacaaaaaactaaagtcgtaacaacacataattacctagatccttacggatttgaaatggagagatttgaggaactctgctaatgtaattcagcctgtatttggcagctcgagaggttgggtatttaattttcaggttactctcaagactctaaaaagaatccatttttgtagcatagatatttgtcaagttattaattagttggtatgtatctttaaataatagttcatgcaagtatatcaaaaaataaatgattactacggaggcgaatctagctctcttaatcttatttaggttttttgtttattttaaaaaatatataatttgttaaattcttaggcagtatgtcactacaaagcattttttct

SEQ ID NO: 70649 - DNA, 581 bp, Cannabis sativa
aaaattaaggatattacaaaagctacaagtttatctataattattttgtaaaaaatattatttattgactaaataaaaacctattataaaactgtcattactaatttagtaattttgtattaacggtctttacaataaattataaataaataaattgtaaaaaatatataatttttgtacaagctaggagtgctaataataataattttttagtcaatctcgacgcttaaaattatataccaatatttttttcataataatattcgttataattacaatattatcattctagtaaaattttgaaaattttcaaatagtttacgatatcgaaaatagagttcatgatattccagtgtacaatacatgttcaaacctatttttggcactgtaaattacttaaaatttttcaagaatttatagaaatagtgttgtaactataacgctgtcataaaaaaattaaaaatattctaatatatattttcaagcattaaaattgactaaaagattataataagagatttatactcttcttttaatatattaacattgtatatatgattgtgtaattataattaaaaaaa

SEQ ID NO: 70650 - DNA, 1060 bp, Cannabis sativa
aattattcaagtttatatttttttctaataatggggtgtatttataattttgtgggatgcaaatataactctccaatttcttttccaaaaaaaatactaaatagccccttggggtaccatagacttttccttgtgtacttctcatctataataatatctgaaataaaataatattaaattccaaaatatctcatatggtttcctaattcataggaaatcaaaggcaatctgaaccgttggataagacagactattgaccacacaaaaaagttgggttgtattaaggagattccagagaaaacacgtgtcattattatattggaagatggagggagttgtggacagctttgaaagtgattgtacattgttagtgtgaaatgtttttattataataattaataaattgttgaggttgagcaaccggctataaccggttgaaaaggtgtaaagagtcaaagaggtttgttgattggttgaggttaccagaattggaatataagtttaccaaaatagtttaaggtagaaggattaccttaaggggaaggtactaattgccatgaatgactaaaccaataatctctttttcatattattattcttacactcatttttgttggttgtgcaacatattgctatttggtatctactcaacatcatatttatatggtggtctataatttttttagattaatatcctatattttttttttatttaaacgttgatatattacaactatattttactggaacttaatatatatatataacatttaatactaatatatataatacttaatattatatgtattaatagcggtataatatcttttataatacttggaagtgatacctattaacattttttttcttttgagaaatattaaaaaacaacagagatatctaaaattttctaagacataatataagtattagtataattaagtattatgtcttatgatttgatagtattttgtatagagtattattaattaaccaaccgtaaaactattaattattacgcaagtgcacgcaatcaagtagtatactcacgcaagtgagg

SEQ ID NO: 70651 - DNA, 1268 bp, Cannabis sativa
  modified_base (58)..(59): a, c, t, g, unknown or other
tttttcataagaaaatatctaaaaacaatttttaaaattttgtgccaaacaccattanntttttaaaatgacaaaaaactgttttctattctcatttttaaaaactcaattttgaaaactgaaaactgagaaacacagccaaacaagcttatttttctgaatatctcaaaattttacagaatatcttcaataactatattgtgtacgaccataaaaaaaatctagagtaagaaaatctctaagatacatcatgcttcattattaatattgaattaatttggtatgtgacacacacagagaaaaattcgacacaatttccagaagggaaaacaacgttatcaatcatcaacaagtctgaagcaccaatagaagaaaacaaattgaaagtgatgttggagttgacagggtcaggacttggtaacaacagatctggagttgatcttgtaacagttttagatgtgagtgggtcaatgggtactggtgagaagttagcaaaaatgaaaatggcaatgcaatttgtgattaagaaacttagttcaattgatcgattgtcagttgttactttcaatggtaattcgatgagattatgcccattgcgtcagattactgaaaatgctcaatctgagattgagaatttagtgacagctttaattgcggaaggtaccactaatattggcgctggccttgaaactgggttgaaagttgttaatgatcgaacactcagtaaaggtcgtgtggttggtatcatgcttatgtctgatggtctgcaaaatggccctcgtgatgctaccaaagttcagattgggaatgtgcctgtttacacatttggttttggggcagaccatgatccaacagtaagttcatttatatatatatatctatggtaacattaaacttttatttatcaacagtgttatttggcacatggttcaacatttagaacacccacaatagcttctttcttaaaaaaaaaaaaggctaattaggattttaaagaagttaggagtttatactagttcaaaatcaaagatgaatgtgatctttgtctccccagtatatattttaccttataaatatttgtgataattttggttatataggtgctgaagattgtggcagacaacagtgcaggaggaacattctcagcagttcaaaatgaagacaacttgagcattgcattttctcagtgtttggctggtcttttaactgtggttgttcaagacttaaagctaacttcacagaagtcgaaacagaatcgagcattgaga

SEQ ID NO: 70652 - DNA, 4240 bp, Cannabis sativa
aagaattttaaaattaacttataattttatatttattttaattttatattaatgggtctgggtcccgggttcgggtcccgggtcctcagtcccagtccgagtctgggtctgggtctgagtccaggtcccaagggatctgaatcttgaatcaagttttttttaaaataaattgaaatcgggtcgaatcagatccgatccagaaaaaaattaggcaggacggagcggatctgatccaagatccaataagtatctgaatgtttttaatcagaggtgatccgtcaggccggagctccaacccgctccaactaaatagatctttttgacatgcctaattaacaatgtgagactctctaacatggagttctaatacatattttagctcatttttatatataaaaaaaactctaataatagtgtataaaatggtctaaatttaatataaaatataagataatcttccatggaagatataaaagttgagttattttgtaatatttttatattaatttttactattgtgctctaatacataattataaatcttaatgtaaaatttaatgtcttttaatgttcatttaataatttattaaaaaaataaaataatactaataatataaagataaatataaaatttaataataataataatataagtcatttttttgtaaaggagtttgttacctaaaattaataattaaatattaaaattaatataatggtaaatataaaatcataacatgtattgtgatgcaaattttatatcatgctatgttgtgattcaaatttcaatcactttttgttatgtgatatatttacatcacaatttagcacactattaggataaaattttaacaaagtgagctatatttttattttgcatttgcatcactcatttgtatcatttgtatctctattaaaaatgctctaatatatgaactaaattttacaccataatagatattacttttttatatactcttttactctttattaatgtaattaataattatttacatttttatttatatatttaatagaatttttatacactttcaattaaaacttaatgcttttgttgattttttttaacatctttttattaaaaaaagctaaattttacccctaatattagaggtgttcataaaataaccgatccaattcaatccgcacgatataatctaatccaattcgcaaagtgtggatatccacacttgtgcggattggattggattagaaaattcaaaatctacacttatgcggattggatgtcgattaacatgtaaaagtaactgatccaatccaatccacacatatttaaaaaaaaatatacataaattaatattttaatgtaaagaaagtagtaatttaaaagtttaatacatataatacaattatgtttcaaaacttaatagatcaaatgtatatataattcttatatatatatatatttttcatacaatttaaaatataattaaatatttttttatatatacaatttttttttcttcctttgaatttattatttgttattttatttattttaatttgttattaaagacataaaataacaataatttgttttattttattgctaattatgtgaatttttttttttacataaatattaaataatttaatattaaaaagtaatcaatctaaaaaaaccgatccaatccgtacttttgcggattggattagattggatttgagctcttgtgcagattggattagatctaaaatatgaaattcgtacttaggtagtgtttggttggaggtaatgaaatggaatggaatggaaatgaaataattttcattccattctttatttggttgcattttaaaatattgaaatatcatttccactattttggtagaatgactattctattttgaaatagaatgaaagacaattctaatgtaagatttgaaaaaatttaataatttttttaatcaattttttttttatacattttaaattttattctattacattcctatttcaattctcattctcatttccattctcattcctctcaaccaaacgccaccttattagtgtggatcggatgcactatgagcaaaattgtgcggattgaattggatgaacacccctatctaatattgagaaatgataaaaggcactcatgatgcctagcacccttacgaggtgtaatatcattcttggtacaactcaatatcgggtcctatttgtttactttaataaatattatataaaatcatcaactaattatcataaagcaatactttatcgcagtgttagacaccattagtacctcataacaatattctaatatattagaatcttattgtaaaatttagaacataataatgactcattttttaagctaaatttaagtcaaattatacaccttgagatggtctaagttcttttctaatagtaaactctacgatgcatcacatgcaatgtatattagaaaaaatgtacctttttatttattatataataaaaagatataaacaaattaagtaatatgaaaatataacatgccaacgtctacttttgtatatacataaaatccaaatttaacaagaataatgagcacggccaccaatgatgaaaaaatagaaatttagtatattaatattgttttgaatatttgttaatatataataatattgttgcattgaaaattaataattaatagtttgtgtgtgttggtcgttgtgttgcatgggctgtcgccgacagcctctcagagcagctcatgtggactctgctgccctcacgcatttctcgcctccgcttcatcatttttcattaattaaactaaattcaactaatacatatacatatttattgttatatctataataatgaatgagtgaatgtatggctctttcaccattagaatgtatggctctttcaccgttagaagaaatactatcccaagataaaataaaaaaaaataaaaaatattaataagtaccaatagtacctaatatattcagtaaaggccttagaatttttactttgtgagcacttatttattatcaaaaaatatttatacatatattataatcactctagatttatttaattttgtgggactttttcattattttataattattaaattaaaaaaaaaaaaaataaatttaattttttaaaaggtaatatttttattagtgggtcatagcctcacattaacacaagtggtcctgagcatactcctattgttattagtccaatttaatatcaagtcctgatataatttaatgtaatagcttatgaaggatactaaaagctactaacctcaataacaaagttaaaaaaaatagttcccactaccccgaataaattttcaccatttacaagaaatttttattccatatcaaatatttttacggaagactattatatcggcgagtgaggatatcttaatgcttttacaactttcgaacatttattgactaattatcttttcatacgttaaaaaaaatcaaatccacactttgcaataattttagcagcacaacagtattgtttttttttaaaagattttatatatctttctggattatatctcatttttatatatcttttgtcactcaaaaagattagatcaaaatggaccttaaaaaaatattagattatttttagcaatatgtaaaagtgaaattttcctccatatctcttgactatatgtcacttttaaagaccttttatggctaatgaaatttaaatcaaagttaaccaagagagaaaattcagtagagaaaaaaaaaaattagagtgaagagcaaaaaaatagaaatttttacctatttatctttatagaatcttctgcacaaatctttctccctcttattctcttctgttttttttcttaccttcaaaactactctccaaaataaaaaaattctgcttctttccctttttatggagactttttttttttctttttgttttattattttttatttttaataaatacccatttaacgtagaagtaatttaggtagaatgaaagtgagaaaatatcacctacatttgctctcactttgagacccttttttttttaattacattattatttttaattaaacaaatcattcctttacatttttaaacactttttcattcgtttaacaacttatatctaaattactgaaatcatttctcataataacctcaaacttatcaatacatatattaaatttaaatcattatatacctgagttaatactttagcttaat

SEQ ID NO: 70653 - DNA, 950 bp, Cannabis sativa
atgatttatctttgaatagttggtactagaaaaaaatgtaatttctataattattaattaatttattaaacacgtcaacctcaataagttgaaaattcgtaggtagaatgatgtcaaagtcaacacaagacatctatctatccttttcgttttttccacgtggccttatcatgttacagcacatagtcaaagtgaaaatgttgagttactataaagagaaccattttatagattttcctttttgtcttttttgggtagtgcgttttttttattattatttttaaaaagaattattagtgtatttttaagtcttatataattttaaaaaatattatttatttgaaatattattatagaacatgttaaacatatatatccaataagaatactcatttcaaaatacattcttctaatcagtaattttataaaaattaatgcatcacgttatataaaaaatttagcatttcttattaaattattatacatagctcgctattattttttttcactaaatgactcaatgttacataagaacatttaacacgtggttgtgcaataaatatatatatatatataaatattttttaatataaaagatgttttcttttactgttggttagttaatatattattgggtaagtttagaaaatctattatatcttttggcacttttgagaattttttaatatattatgttataattattatttataaatttttagaataccaatattttacatattttattgtacatattattttttatatatagtaatgaactatttaaattttattttatatattgtaaattattcaaaaaaaaaaaaaaaatttacaaatagtattaaaaatagactaaaaagtttaaaaacataataagtaaaaagaagggttaatttcacaaatgcacggaaacaacaaaaaaataacaaaaatacggtttcacggaa

SEQ ID NO: 70654 - DNA, 1591 bp, Cannabis sativa
  modified_base (1518)..(1518): a, c, t, g, unknown or other
acaacggtggtgccttgctagggttttaataataataataatatttatatagataataacaaaagaaattaaggccgtacacgtacgtatatgtgatgattaagaagaatatctaagccacttttctttatatatacgcgtaaatatattgtctctcttccaaagcaaaatcccatatagcttaattagcttgcttttctttctcttatcttgttatataagttttaactcaattctactatacatacatatttatagaactttttcttcattacttttgttaagagaagataaaattaagaaaaatggagaaaagggttattgattatttgttaataccattgggactcttggctatggttctttaccattgttggcttctccaccgagttagacaccatccaaccaagaccgtcatcggtgtcaatgctatgtaccgccgtttttgggtccgaaatatgatggaggtgagccccgccatgtttttttttaatatgaatttcgatattctggatatctgaaaagaagtgtagtatcactaagctatatgtttattttaatcttcgttgtttctgtttgtttgtttgtttgtttttgtagaatgtaacgaaatatggaatggtttcggttgagacattgagaaacaacatgatggcgtcgacacttttggcgacggttgccatcatgttgtgttcggtcatcgcgattttgatgactaccggtactggtgaaagtacacatgagttgtttgttatgggaaataaaagtgaggccagcttatctgttaagtacttttgtataatgacttccttcttacttgccttcttattcaacatccaatctataaggtatgatcaattataattgttacatatttatacataatttatatgcatcaaaatattatatgttatgttttatttttaaaatatgaagaaagccaattccatatgtaatctacacctaaggtcactttgtgaatattgaagccaaaataatttatgatatttttgtaatgttttatataaaatggtatttttgaaaaaatttgaagcctttttatgtatataacataatattttgaaaaaaatgagagttgttagcaagagttgtaggtacaaatatagtccgcttatatttaagatcaggcactaatagggatgagcatcagtcagtttggtcgatttttttctatataaaaattcagaattcgattttcggtctagattggtgcaattgaaaaccgaccgaccaatccagaacctatcttaaaattgaccgttttgaacggtaattggtcggtttaaaccgcccaaaccgaacttttttttctttaaaatatgatccaatttattctataaacatattattctacattttacaactacaaacatatacattaattatttaaaaactaattatcttattcttttaattttaatattaataaaataataatatattattatattattagtaactacaatacataaagcaaaaaaaaacttaataaattantatatatgtataacggtcggtttattactcaaaaaaaattgatcgttcattgacggttttaaccgtgagcagt

SEQ ID NO: 70655 - DNA, 824 bp, Cannabis sativa
  modified_base (81)..(87): a, c, t, g, unknown or other
tgatgactaagtggtatttgtgtaataaaaccaacattgtaagtaaaaaaagttagtataggcgtataggagtattttggnnnnnnnttgtgcaaaagtgatttttcatgtaaaaatttcattaaataatcatattcaattagaaagtcttaatttctccattaatttctttctcattatgatttaattttctaaataataaagtaataactaaattaaattagttggatattcaaatcaaagtatttcaataaatctaatttattgagatcttcatagttctttaaattcgtgattattttaaagaatattaattatcttgataaagaataatttaatttttttaattttaacaataattattttcaagtccaatagtattttagtgaattgcatactctcactaaaataattaataagaccttattgttactctaaaagcaaatattattctatttttgttttttatggttatgacgattaaactttttaattttgatgttcaaaattaactcatttaattatcacttttattgatattttaattaattgaatcgaatccatttaattattcttactccttgtgtgttctgcttttggttggaagtaataaaatggaatggaatgaaaaggaaacaattttcattccattcctttgtttgattgcatattaaagtattggaatgtcattcaatggaatgattctaatggaatgacatttccactatttttgtggaatgactattccattttaaaagggaaggaaagaccaccccaatgcatgatgagaaaaaatttaataattttctatcaattttcttttc

SEQ ID NO: 70656 - DNA, 3026 bp, Cannabis sativa
aatatttttattgcttaagaaagtaattatgacgtgaataatgaaataactaagaagagatttttacgtagttcaggcattaattatccttagtccatgagtctattttattggcctcattggttagagactccttcacaaatgcatatataatgcacttttactccaatctgccgtgttccacttgaagaagaggaagcttagtaggaatattttagagttaaaagcagggttacagaaatgttttttttatgatgataaagattaagtcttcgatttgaaggcccccctttttttgttccttctctgaggtatttattggccatctctcttgcatggactgtcttggatgggtcatcgtagggatgaaataccatcgttggattagtatgtggcctatttcctaggtggcttttaagggtgttagattgtactagttgtactgactgagcctgaaacgtgtgttaccttagggtcattcttatttgaattccctttattcctaggtgttggattatttagcttagtacacaaggacacgcatgctttgcacgactgcatgttgtgggggacaacctctaacatcggacatgtaaaatgtctagtcatcaggtatgttgcctagcacgcgtgggctgagcctttaagggccaaaggcataccctaaactggtgcatccttgaagtgccttcgctacatggagaagatccacattccttgctggagcaaataatctcagcctccaggacggaatatgactctggttcatgaatacccttcgcatggtcagcagatagggaaactttcttcacagagacttttcttgcgaggttaatgcctttattctcctggagcgctaagtgaatggcttaggtggcttaatgactccttggccttttttaattaacatccacgtgtcatgcttacgaatgtgcagataacatttacccccaagcttctgggacataccattgtccaagagcttgcactatctccttctaaaaaattgggcgcatgtaggacttatgacaggttctttaatgcacaatgtaataagcaaccaatctgaagtgtcattatttgggaggcataagtttgtctatcttcttatcagtattttaaatgctgacttttaggtttttcacgagtgatgggcgcgtgtttcatgggatgctcaaaacatggacgctaggatttcagttgactttccatttaccgagtgctttctacgatgcatgtaatgatggaacacgattgttgcaaagtgagatatctcctgagtttcttatttttcccactgtcaggtgcccttttgacggatctagtcgaaccgtttgcctcttgtggaaggtgcctcttctgagtatccattaaatacattcaatagtcattcaagtctattcttttttcttcttatcaaaccaaagtttttctcccatcttgcaaaatctctctaatactttcgtggtttgatactagttctaccggcaatgacactgcactagcctcaaatttgtctccacaactggtaagctttcttctttgtttacatgttgtagagttttcaggaaattgtgtgggtgtgtcaaccttaggaatagtagtcccacatctattgccttcgagaattttggggtcatgtaatgtgctgacctattctactgttgtatcaacttctggcaggtataagattgcaatggaaaacatttactcttttgaagaaacaggtgggaattctacttggaaaaagcagggacgtatggcgtttgtctctgggatgagggtccacccccagtgccacgatcccccacaaaggctgggtcagcctcgatctcatccctctaccttgtcgagaatacccccgatgggattttccttccccattaaggtcattccattcgaacctctcatcatggagaaagagagggaggtgaatcgggccctataggggggcttggaggaagaaatgctgcaagtgcgctggaggatggtcgtgctttcagtggtctgcaaggccaagatcgtagatggcatgtacgtattgcaccctaccggggcgaccgtggaggtcgaggacttggagaagaggctgacctacaaagtggggagagaagctgcgccttttgctgctgtgcttctagaccaggtggctgggaatgcatttgaactaccaatggttacttgggcctcctgcaccagtgtggatgcttttgcacaggcctatactgctaaacaataggcattgggggtagttttaactcaattcttctttctttttgtttatttgtttttccccttattctgatatttcagcctctttgacttggcctattcggacaggtggcactactgacaaagaggtctactgtggaagtcggcacgctggtgacaaagctggagcaagtcaaagtgaccaatcgcgacctgcgtgctgccaatgagaccctccaagccgagcttattgacgcaaggtttcaaattaggggtttgcagtaagcaaaccaacaattggaggaggagaatgcccaccaggcccgcttcatacggagcatgaaagctatacacgatctttacacactgatcgtgggacagatctctaatgcaggttcttcctcctagtcagtggcatccaacattgaacctccaacaggcctctttgaattggttgttttcttctctctcttcttttttttggtttatccccccttttaccataatttttttatcgcagagacaattaaaattcaccctcgctggggggactgtaatagtaataggttccttttttgttgttccttacttagagatttggtgtgatagatgttatcccaatttctgcactctgacgtggcatcactcgatggtgacacgtggaatagactccaggtatcacatgagatttggtgtgcattcgctcggatgaagttctttaaaccaagaagtgggcaatccgcacagaacgccaacacttagcgaattcacctttcgcatcgtgagtcatcaaggaaatccctataacttgggga

SEQ ID NO: 70657 - DNA, 3695 bp, Cannabis sativa
tacagttcgggaactgaagtccctaatcagatcgcggtctcttgattttgtcttcctcactgagctaaaagttgatgcagctcccctggtacgttcacttaaatcactccaattttactttaacatttttgtgctgcctattagtactgctggagatataattttggtctggaagtatggttttagctttgaatgtctctcctgctcccgtaatcatatctctggaattgttaactctgaccccccaacccatccttggctactctcttgtgtgtacggtcctccctatttccatgcgaagaaacaattttggacggatctcatgaagattggggataagttcggtgtttcttggttgatccttggggatactaattttgtgttgagtgagttggagcgccatggttccactgggacggaccaattcatcccttttatttctaaccttgttgactctcgcggtctgattaacctatctattcagggtgaccgattgatgtgggatagtcataggtctggtaggggccatgttaaatctactctcaagttgttctttgctcatcacagacatgtaactctgatcacagacctttgtgtcttcttactaatggaatggaagtgaagtttaaaagaggcttcaagtttgaggaagggtggacgagagataatagaaggaaattggtggctgaccaggcctagaatttcgtctcccactcttgggcccccgcccgagcttttaggagggtgggtgctactagggtcgctcttttacattggaatagaacacagtatggtatactggacacggtcattaaaaacctcgaggaaaagcttaactgggtgcagagcttacttgcatgttcccgtgattggaatactgaatgctcgatccgtcgctttcttaatgacgcccttaaaaggaaagatatgtactggaagcagagggccaagattttgtggattaaggagggagataaatgctctaagttcttttttctctcggctactatacgaggtaggaggaatgctattgaaagcattttgaataatgatggggtatggattttgaaccgagagttaatcggtctggagttttttaacttattcaaaggaatatttaatgggtttgatgatggccaggcgttcaactataatcagttatttcaagagcggattccggaggtggaaaagaggagctaataaaatgcccctctcaggacgaaattaagagaaccctgtttgacatgggaaaccataaagctcctggccctgataagatgtttgttctattcttcaagcattattgggatacggtgggggatgacttttgtaatgcagtgtctgacttctttgttactggtaatatgcaaaggggcatcaatactatgaatatagttctcatccctaaagttccaaacccgacttgaactaatcatttccgccctatctctctttgcaacgtgttacataaagtcatatccaagatcattgcaaacagaattaaacttatacttcctaccatcattttccctacccaagctgcctttgtgcctggaaggaacatccaggataataatgtaattgtgcaggagataatccactcgtttaatagaaagaaaggcaaggaggatctttttgctattaagattgatctggtcaaagcatatgatcggctgagctggagatttattgaccatgtgctctcttgttatgggatccctcaacagttttgtaggtggatctctcagtgcctttccaccactactctcaatatctgtctgaatggaggcagggttgggtcgatcaagccttcctgtggtcttcgccaaggagatgatcctccctcttctctcccccctatctctttatttgggcggccgaagttctttctaggttgcttgtggatgctctggataagggagggattcttggaataaggcttagcaggggcggcccggttctctctcacatcttttttgcggatgacttaatccttgtgggtggtgccaatgtgagggaggctaaaggtgtttggcgctgtcttgagcaattttgtgcttggttgggtcaacaagttaataggcttaaaacaacaatcttcttcagcaaaaacatcccccagagcatgaaaagagggattaaggaaactttgggtattggttctctagtaggctttattaaatacttggggcttctgttgttttgatcaaggcaaaaggatgctgactttaacttcattattgacaatctcacttctaagttacaagggtggaaagcgacaaccctatctaaggcagggtgtgctaccctgatcaaattagtgggccttttcgatggcgatgtacgctatgcaaaccaccaaattatctaaccgtctggttagtaagattgatggaatggtgcgggacttctggtgggggtttgataaagggaaccatggaatgcacttaagagcttgggataagctttgtcttccaaaatcccatgggggccttggattcaggaagacgagagaaatgaaccttgcctttctagctaaatggggatggaacttattgaatgggtgcaactctttgtgctgtcataatttggaagcaaaatatctgaaagggaaggatttccttaatcataaattcaagagttcagattcgtggttttagaataatgtggttcgagcaaattttattttaaggaagggcgcctgtagactagttgttgatggtcaggatacttgtatttggagggacccttgaatacctcatggcaaagattttctccggaaacctataggttcctatggtaatgatgatgctactaaggtggccaatcttttacttcctaacggggtttgggacatccgtaaacttaacattctctttgatcaagaaacggttgctgctattttaaaagggggatatccctcaggttagggtaaggacaggtgggtgtggactctgaaacgaagcggccaattctcgtgtaattctgcctacctggcccaagccttggaaagagctcctccgtgtgaggttgctccttctctgtggaataaactctggaacggtaaaattcttgagagacataagatactttggtggtgtattttgtccaaagcccttcctattagagttgtgattaatagaagattccctattgaagatactagttgtcctctttgcgggaggggaagaaaacttttgaacacttattcctttcatgcgaggtagccttgcacttatggagatcttctccttggggtatttatcttgtctgtaatactggtatccgaccttgggattgggtaaaattcatttgggaccttaagcacaagggtgttaatgcggctgatgtattcctttatgcttcggttattgtcgacaccatctggaggactcataatgacaggtacacaataatagtccagtagatgttaaaagatgtattgactctatttgtaactcttttacagatctgcatgctaccattttccctcctcctagtccttacctcttgtaggattggaggcctcctccactggattggaccaaacttaattgtgatgtcaaagtggggctagatagcatgtgttcggcagttgtggccagggatcatcttggcagggtgttgcggattactacggccaggttaggcttcgctgatgcgttgtgtggagaagcggcggcctgctgtttggc

SEQ ID NO: 70658 - DNA, 1270 bp, Cannabis sativa
aatcacggtttcaaaattcaatttaagaggccgcctctgtactaactcagaacacagtcggggatttctcaagaaagtgctgggaggaatatggagattgaaggatgctgaatggaacatcaaaatcaaagaaaagttcgaaaaaggtcttttcttaacttttacatttgcatctaaatctattcaaagcagaattttaactagaatgccatggtatttatctaatggggtgttaatcttgggcaaaatggaaaattctaatgaatcttggaggcatgatttaacaagcttccctatatggggtcgggcatggggagttccaatcgatctgctgactacaaaaaacacaactcgaatggcagccaaggcaggggaaataatcacggtacagaatacagatgtctctcggatggttgcagacggattttttcgatttagaatctggacgtctatcaacaaaccagtgtgtccaggattttccctcccttggagcggccaaaagaagtggatagcattccaatatgaagaattgcctttcatgtgctttaagtgcggaagaattgggcattgcattaaagattgtcatcaatatcccatactagctcaaagggaagacatggatggtacagtggtatatggaaaatggttgaaggttggaaatagtctccaagaagacacacaagatgatcgaaaagaacttgaaaggaatttaattcttgaagacactatacaggaaccaacaaaaacaattggaagggccactactgtttcctcttctccctcaatagcttccatgggcgagaacaaaatagaaggcaagttaggggcggctaacagggacactgtccaaagcaagatacagtagagactagaggaggggtcaggttatttatcaaaaaattctggtttgaagacaggggaaatcggcagagaggaatccaagggaaagtgtgatgatggaaatagggggaaacgtcgaattgtggaagattatggagatgtaggctacgggaagatgaagaagtcagccacggctctatccaaagaaactcaggatgaaacactctttaacataccagtattctatgcacaagaagcaaacatactagaaggatctacaccctttgtggtaggaaactgttcaaaaagcattgcaaaagaaaatagaagaaaggtggcagtgaagaaggatcccaaggccaaaagagggaaggtggaaaccaaagtggctagcatttctcctatgggggattcgatagtcactcagatc

SEQ ID NO: 70659 - DNA, 752 bp, Cannabis sativa
tttctatttagaacaacttttgctataattgataccattttttcttacaatttaattatcattgagtcaatggtgtctgcatatttatcattgagtcagtcaaatgtggggttatgattaagagagttcactcccaattgtatttttttccacacactttgatcacaacacttacctagctaccccaatagcattaactccattactatctctcttgacttatatcattcctaagtttgatcatattcttggcaccatcattatgaactagaaaattaataatggagttcctttcttttcttgttattttaagtcttttttctctgtctagaacggcttttgctgtggttaacaccattagaccatcagaatttatgagagataacaacacagctttattggtatccaaagaaggaaagtttgaattgggattctttactccaacagatagttcatcaaacaatcgttatttgggaatttggttataagaacattgccagttcaaactgttgtttgggttgcaaaccgatgtgaaccaatcattgattcatctgccttgttgactatagacaacacaggaaatcttgtgctttttcaggcaagaacaataagagtgtgctcatttggtctacaaactcctcgaaacaagcccgggaaccacttgttcagctcttggattatggtaacttggttttgagagatgagaaagatgcaaacacaacaaaatttttatgggaaagctttgattatcc

SEQ ID NO: 70660 - DNA, 937 bp, Cannabis sativa
  modified_base (728)..(730): a, c, t, g, unknown or other
tggaactgacccttcaagaatgaagaatgcaatagaaccaggaagagtaacatttgatgagaaaatggtagtgagaaaagccattgaagatgcaaacattcctttcacatatatttcagctaattgttttgctggttactttcttggtggtttatgtcaacccggtcacattgttccctcaatggactctgtgcttttgcttggagatggcaacaaaaaaggtacaatatgaattttataactagctagctacaatacaaacctagctataaataataaattatttaatcccatgcatggttgatgatgagtaaataacttaatgcatgccattttcttctaatatgcttctatgaatagaaggtgactttattacaaatggctatattaattatattaatctcatctcactacttcttttcaaattataacataaggaattttactcgtattaattaatatatggcagcaatatatgttgatgaagatgacatagcaaggtacacaatcaaagccattgatgaccctcgaactctgaacaagacagtgtatcttaggccacccaagaatattttatctcaaagagaagttgttcgagtttgggaagaccttatcggcaaagagttgcacaaatcttcagtctccgagcaagactttctagctaaattgaagggtacgtaattaataagttcatattaagcttttatcatcatcatcattattattannnttattattattattttaaatagtttaactactataaccacatatatatttatatatacatggtagaataacaataatttctctgaaaaaaatatagggatttcttttccttagctagttcaactggggatgcacacccggtgagaaattagcagagagtactgctccgtctgtctccatttttgttaagaattttaatccccgtcta

SEQ ID NO: 70661 - DNA, 1300 bp, Cannabis sativa
ttaaatttaatttttttttttgtttggctaactaatatatttaagtacatttcactatccttagttttttgaagtgagttccaacttggagcaacttcacaacaacataacatagattttgatcatataagaagggacccacaatcaaaagatcgaacggttgataggtgtgtttgagtacatcctagggtttacccaaccctaacctctaatattaactatcacacctcacacaatctcaaccctcttttctctttcaactcttctctctctctctctctttctctctctatcttaccgtgccgccgtctattccggcggccactgctttctgccgtcggtttctccgaccatttatctcttttcatccttccctctcctctaatctatcccttaaccagaaaattaaaaattaaaaaattaaaaaaaaagcaaaaacaaaagagagagattttatcaaacagtttgtgtgtgtgtgtttttttttttctttatctagggttttatctcggatctttgtcttgagttcttcctagggttttgattctgaataatttgaggagagggaagaaaaaaaaaagaaaaaatttgaaaaatttatagaaaaaaaagagtggaagtttgtgatggcccaagttcaatctcagcctcagaatgctgttcccggagctaacgctggtggtgcggccaacggtgggaacaaccagtttgtgactacgtcgctctatgttggagatcttgaccagagtgtcaccgatccacagctctatgatctgtttaatcagatgggtcaggtggtttcagttagggtttgtagggacttgaccacccgaagatcacttggttatggatatgttaattatagcaatcctcaagatggttagtacttttttctttattattgttcttattttaggtataaaaatcacttattgtgtgataaagctttattaatgggttatgggttatattatatgaatggactatggattcactgattgaagaaaagtgaggttttttcttctgatgttatgatgaagaaaatatataggttaagttatctatctatttgtttagtttgttggggggcaaaaaagagggagattaaggagttcaacttgaaatttggtttggttgcatagcttgcagtgatgctttacatgagtgtccttaattagttattctgtggtgttagtgagatggacaagggaatggttgttgcagtttatttgggtggttatggtaaagataggaatgcttctattaagcagtttaatagtgcttgtggcactgaaattta

SEQ ID NO: 70662 - DNA, 1086 bp, Cannabis sativa
  modified_base (151)..(172): a, c, t, g, unknown or other
gatacgatgagacaataggtgagatgatgatgacaacgagagagatacggtgataacaacatgaactacaatgatagcatgaactttatataatcaggatataaaaataatgcaaaggagtgtttgcttatgtaataataataataataannnnnnnnnnnnnnnnnnnnnnaataataataataataacacattaacattaatttttatgtaaactaccgatttatttatttaaaaatgaaaagcaattttaaataggaaaattatttcatatattattttttttttcatttttacggtttgggttgctctgggggtagctatgtgggttgttatgtggatttaaattgtgatttaggttgttctgttagttgctgagttgctataagaattaccgtaaaaatgtaaaaaaaaatactttaaaatgtcaaaataaaaaaaaaaaatccctttaaaatttctactatacattaataatataaattttaaacttcttaataaataaataatagaacacactaaataaatttttaataaataaaattatcaataattataatttaatatgaaattttatgttataataaataaaattattaataatactatgcaattagatagtataattttattattattattatatattacaattatttttaaattactatttattatattgatatattataatactaaaaaaattaaaatagccgcgcgaagagcggctatattgccaagttttatttataaaggacaattatattattattctttaaattccaatttctttgatacattattaatttattactggctacgtctataacattttgcaaacaatagtaagtaatattaatttaattaaatagcatgaccgacatcattaagtgtaatatttttttcttcacaaatcacaatcacattcacatgtacgtatgaatgaaaaattatgtgatacgataatatcaaaacaggatatgctggttttgtggtacaattcatgaaaaagatgtctcaactctcaaccacaaatttaaatttgaagttaataaatgatataaccatgacttaattctctacaat

SEQ ID NO: 70663 - DNA, 1781 bp, Cannabis sativa
aatttctccacgatacaacttactggtaattgtaaggacgtaattaaatgttaatttacgtgaatcaataaaaccagtgaagtcataactaaagtggttaactaagtttctaaattatcagttggtatccttctttcacttggtatttcaattgcagttgagggttttcttggttgcattccaatacctatttcaattgtgtattagttctccatatttacaatcaattgaaatgaattagccactagcttcgtaatttggataattcattccttgatcaaattgtctattgtaaaatatgagtaataaaattgtgtcattttcctaacaatctaaaaattcaagcatgataagtcaattatgaataaactatctagaaactgtaacgcaacaattatattattaggcatctaatataaaaatttaaaacaactaataacaccccaaatgtgatacaaacttaccacaatcgagttttttctatacgagtcgtgtattgccaattcaaagccctgtttttatatataataatattgtagtagcacaactattatacaatagatttacaacataatcacaactatgaatgaaaaatgtgttcgggcatcgttcagtaaaaatttatcaatgtttttttttgacactgattaaaaatcacttgtacgttaataataatttatggagaaataattgttagaactttgtaagccaatattaaatcaatcaatttaaatataaaacaatctaaccatattataatattttttttagatagctttgtgttagattgtcaacatgaaacacctgcaaatatcatacaaattattgtaacatgtcaatttttagattgttagtaaaacgttaagctaactgtaatgcaactactcagaaacataaaaatcagaacaatttttcatgtttgtggctcgagatgaattcaaatttactttattctttgtgattaaaaatgaataaatccaccattaaaaatttagaaaataacgttaatacaacgggtataatatattagctactatattgatacaaatttttttcccaaattatacctgttttagattgatcaagacctccaaatctatttcttacagttctatattttatgaatttgcaaattgaatttaatagaattaattttctagaatttgaattataattcaggattgaatttatgttttgaactagtttttctacagatttttgcatcactcgggaattgtagatatttagattgatttgggtcttcttctcaggtgacattgtcagaattaatagtggttcttcgactgtcggggttgattcattgttgttgtcctcgtttgatcgtacgaagggttcgagtctctcaagcgtggatcgtgcggcttgaaggtgagtataaaatgtatgtataatttttttttatttagactgttttaatacttaattggccggtacactataaatttgtaatattgttgtcttctttagatataaccgaaaaaaattctgttttttttttattatttttttatatttttacgaaaatacacataaaaacctacatagcaatcaagaggataatctaaatggcaaactaaatctacataacaattcacataaaaattaccggagcaacctcaaccgtaatttttttttttaagaaaaattaataatagtttataaaataattcccgaaaaaacaaaagccagttttttttttggtagccggtaagccaccaaccgtgggagcaatagcattgttattgttggtcacatacata

SEQ ID NO: 70664 - DNA, 1461 bp, Cannabis sativa
ttacatttccttgacctttatacttcatgttcattaaagaaccaagaagtgttgtcatttcaaccttatcgtttttagcaaaacgttccttaatttattcgaggaaattcttggccatagtaaccccttcagattttgtgacccaaaaagcttctaaaatgttgtgtttcataatcattagactcatgtaatttgaacgatcacacatctcaaattccgttttatcatcacaggtactttccttagtgagaggtgcaggttattcatcccttagtgcataatctaaatccatacatcccagaactataaataagtttatttttcaatccttggaattggtctcattaagcataagaatagcattattattagctgatattgtgacagtattagatgaactagctaaatatagaataaataaaataggttcacattactatacataattaaaaaattagttaatcacatctcaagacaacaaacacacattaatatcaagtttttagacaataatattaactgtaagcagtgcacttggtgtagcaatcaaacattgacaataatattgtgctaaaaaatagattaaactttggacgaacgtattgctcacacaaaataccttataattatcacatatttatcgccacaggtgtggataaaatcttgcaaaatattcatttacctttggattagtcaatatatgtatcaattgtaaacacacaatcatcttgatattttaaataaattaacctacacaaaagaggtcactttggtgacgtattatttcaattaatttatttaaaatattagatataaaccaataccaaaatttaaatttaattttttgaactaaaatctataatattaacgaaataaacggtatacattctgttaagaagaaaataaatacactgatactgtatatatataataaactaaataaaaattaaataaattatatacaataagatgtatcataaatattaaatttattgaagccaaattgtgaaaaatagtatgaattcaaaattaaaccacactaaaataactatgacaaattaatatacgccaaagaaatcaatcgggctgaatcaaatacatatatggccattgacttccctaaaaattgaactacatattacaatgacataaaattctgaataatatatagacaataatctataaataaattacgacaataaccaaattatacgagtgaaatatatatacactgaataatatttgtaaggactcgattggtcaaaattgagtcaaaaaaagaaaaagttatacagtagaacctctatccaagaatacacttgggactaacaaaattatattctaattaaaaggttataactatatagaggtacactaggaaaaaaaaattaaaacaccaaatatcaatgtaacaataataacattataatactatataataatagaattatttttgagtaa

SEQ ID NO: 70665 - DNA, 799 bp, Cannabis sativa
agttcctggtaaaataacttccaacgtaatgcacatcttcagtgaccttctagaggtcaagctgcatctcgaagtttttgatttgagccagggaatcctcccgtgcgatatacatcttccatactgacattttgaactttgacagaggtagggcatttggatatgccgagaatggtgatcccctcactgatcaaatttgaggtctgaaggctttgggccagctgtgccctggatcgtgtctctaagttggtccagctatgcttgcacataaggatctattactgtaggagcttgattgagtggccctcctttgggatgctggatattctaaaaagataggggctagatagccataccgtgggagagtgtatggtgaagatcatccatgccccacaaacctcggctggcattcccagatacaggacttggcataggctggctaggcttacaccttgttattgtgcttggccgactagacctgcattgggtagggtctggccgtctaaggcttttccatggccgtaatgcctccttggccggctagacctacattggacagggtttggtcgcccgtgaatcctcgatcgactggtgtcaattgtgtgctgattgggggtagatcacaccaattgttggagtttggtggatctagatgcctgaagtgatcggtctcacttcttgagtcgccatttaggtgtttccacccactctcggtcctcgtcgatcagattgatctctgtgcacctcgttcccctaggggaggaagtgttgtaccctggctggccatgggtactcctac

SEQ ID NO: 70666 - DNA, 1669 bp, Cannabis sativa
tttgtatataaatatgtactattctatgaaatatacaaataattcgattcactattttcttcaaaaactattaccaatctcagtttttttcagtttggatcgagatagaggtctctgtttccttctgctcttgcttctttttcctgtcccaaactaagccttggtctttggaacaattagcaactatgtgccagagtaagctacatgttgaacactttgaaggcaaccactcatattcaatggattgctccaccaattggttcctttcattgataaatgacagggacttcgggggattgtttgtaattttaatgtccacaagaactctagcaaatttaaccatggatctctccttcgtaacttaataaatcattatagatatccctatagtactaaccataacattaagactatttcttccccaatgttgaaggccaagcccattcaatctaatccaaatagggactgatataaccatttgaacaaagtccatgtccgaagaccaagggcgcatcatgataggcttcttatcaaaatgaataacacccatttctagcacaagatcccttgtaaattcatctcggaagcttactaaagtgaaactagaatgcattcttacaattcttcaacacctagaattcccatactcgtttaacaaaagcctaaaaaacttgaaatggaagattagctcccaagataatacagactataaaagatttccagccagaggcttcttcctcaatctcctctagatcaagtttagcaactagtcgatccccaaccttcattggttcattgaaatcaagatgagttgaaggggttctcacatgattagccttgaacttgctcaaagtttccttagctgaagattgaaaattaggctttccacctcttcaatttccatctcctccgcccagttggaaaccttggactgagttttgcattctagttccaccaaacacaaaatttccacttcaagctcattacagagatcaagaaaagcctctgtctggtgttcaactgattcttcttcttggatcgaaaggagtttcaggtctaattgatcttctctatcgatcgatactgctgacttcagggctacctttttcttcctacccatgaagagaaaatgagagcaccacatgcctactggtatttctttttctactatttttttggaaaataattgtttgaatctttttttggacacaataatttattgatggtcctaaatagttataatgtacgtgatcataaaaataaaaaaattgaaaaaaaaaattgaatgtcaaaacaaagagagcttgtaccataacaccctttttgagatataattactcttgtgtttatagtttttgtatttttcttgcatgtgtcaatttttttatcatttgccgatatttttttttctcgttatgttaggtttagatattgtcatttcaataataatgtgattcgagcttattataaggaatttattctaaaaaattttaaagaattattaggtgacaaaatgggcctgagaaaatggatttatataggcttaattaataaaattttacaaacaacttttttctggtacatatgcgatattaccatacatgtttgagctttaaattgggttgggttttaagaacaagcctcacacatcttagcataaagaagataa

SEQ ID NO: 70667 - DNA, 4008 bp, Cannabis sativa
gccttatacaattaactttatctatattatattactttataatattatatttggttgattaaataaaattttatgttacaaaattatttgttataaatgagatattattaaatttaatgggggaatgttatattatttatataatgtaatgtttagattaaataattaagtgtgacaaaatagtgattttgttaaatagtaacatacaataggaggttacatagtttgagcacaaatcagagttgcaaattcttgaaagataaaaataacaaactttgtaactcctctccatattaccattcttaaaaataaattgagttattaattttatttgaatgtgattaaatgtatcaatagaaatatagttgttggggacttatttcgatcatttatagggtgtataaatgatataatttatagggtgcataaatgatataaagaataagagatgtcacaaacatatttgaggcaccgaaatcagaaacagaacactttccctttttagcacctgaggcaccagggggcccgagcacacttaggttgacatattgtcaacctggggtgcttccaatcacaatattaaagaattatcctaagcattttattcatctccatccaaatcgggggatcaaatactttcgagaaagaaacagattgacttggaggctgaaattgggacccaacgcctaggttgacctaaacattgggcccaacacccaggttgacagtttgtcaacctaggccatttccaacagcaatttagaagagatctaacgaaacgatgagaaacaaagagatcccacttcttctaaaacaaatgatactttgaaaggaaaaagaaaaataaaaactttcaggaacgactttgcaacttctgataaatccttcttcatcggtatggcattcattttattttaaaaaaattataatcataaatgataatgaaaactaagttattaatattataaagaaaattggaatgctttttttaggataaaaattaaaatattaattattcctatgatactaaataattataaacgattaaaaaataattaaaaataattttataagattaaaaaattaaataattttagtttttatatcaaaataattttatacgatactaaaaaattttacatcaaaaaaataataattgtaaaagagtataaaattacaaaaaaaatccaaaataatattaaaatttaattatataaaattataatctaagattaaattgaataattttagtttttatattaaaatagtcttatacaatactaaaaatttctatataaaaaaaataattataggagattataaaattaaaaaaaatccaaaaaaatattaatatttatttatgtaaaattatgatcttttgccagcacagttcgcgagaagcgctggtaaaagtaacttttgccagtgcattacacatttgtgctagcgaaagtcatttttaccagtgcacttttccgctggtaaaaaatattaaggggaagatgtttacacggcttgctatgccaacgtaaatatgagttgcgttggtaaaactttgaatttttaccagcgtacagttcgcaagatacgctggtaaaagtgactttttctagtgcaatagaaaactacgctataaaaagtaacatttcttgtagcgcggtagcccgtgtatttttccttttctcttgttgtgcctcgctgggtatccattttggtggattttttcaagatcaatattgatgtggcattagatgtggtgagggtttttgtggtatgtgaattatccgtgattattatgggattgcttttgcctcaactatttagcacatgattggatattttcaggatgaagttgttgaagcactttctcttctttactcgacatttcaatgtcatctgcttggtttggaaaatattcagtttgagactgtcttaatgtggttaataagatcaacaataatatgttcatttggactcgtcattaagcttagttcttcgagacatttattgtaatttggttctctttaataatgttagtctttctcattgttctatatatgacagttgatattgttacccacaatcttgctaagaattcttgttggaactttgtgaaatcttacaaaaaaaataaaaatgaagtgtgtgagtacagggagtcccacatgggatagaaacacttcattagaagtataaatagtggaagtttgagatatgggtatgggtcctaaggggtacccaatttttgcgcgcatgggtgaggactcacacaccggaccaccacacgcgcgctgtcgccgccgtccgaccgagctggcaggtgtggtgtcaccttattttttggagaaaattttgtttattaaattattatagacttcctaatttttagcatcgttccaacgatcccatgttctaacgttcccttcaagtaacatctttcttcccgttacaaccttcaatgcattgtttctataatgcatctgaaccaacgggagaaacacatctctctttttcactctgaaaaacatatacgatatatacatacaattatattacatacatatatttcgagcagtagtcggtttttgggtgtagtatttcgatagtattctatcgtgcaatagagtttcgatacagtgtgttcgactgggctgttttatcttgtagacgacgaagttgatagtttgcttgcataaatctgggcagtgccacgaacatcttaaagagagcgacctagtccgcgactcaacccagattttaattcgataacttcgttctttttattttctgcaacaactatttttatagcaaatctatggcaactagtaaaatttggtggccaaattatttgaattgtattcaaaatttaatcatggctgatgccatgaatatttaatgatatctcttcttcttcattttttttaagttattgctctatagggtagagttttgggattttcttcataaaacaaataaaataaattaaacactcatagtactagattattgtaacgaagatgggcacttgctatgcatataaacatgtgtaggtttatatgaatttggtgtagtttatatgtatattttattttaaacatgtgaaggttgatatatataatagattatcaataactatttcctatatcacaataatctttgtattgttttgtactatttgttagatttgaccacacttcatgaaatgcttattattcaatgatgagtagtccttaattattaagtagtcttacataattattatgtatgcatatgatgatagcacactcgaaagtttgaaatttattcccaaataaatgagtgcctttgattaggttagacactagagattgatatagggataggaatatatttatattcactgataggtgttatcattatatttcgacggaaatatttgtctcaactcaaatttgtatgtgcgttcctaaaacgtgaagtgtaactaaagcaagttttaggttcaaaactaatcaagtgataactagaaacttaaatttatggccatctttactagaggaaattatatgaattatctattttattttatttgttttaatttttaattttatttttataattttaaagatatactcacttttatagatgatgtcctattagatctcttaggtgaatataaattatatgttagacttaagtagagagtgagagtatattggataacttattcaaaaaaaatgagtatattttaataaaaaaaataatatgagggtatttttttattaatagatataaaaaggagatattttttaacttatcccattaaaaaaactatttacatctagggccgaccctggtaggcatgtcaaaaagatccatttatagttggagcgggttggagcttcgacccgacggatcacctctgatccaaaacattcggatacttattggatcttagatcagatctgctctgctccgcctaattttttttttctggatcggatctgatctgactcgatttcaatttat

SEQ ID NO: 70668 - DNA, 1405 bp, Cannabis sativa
  modified_base (1172)..(1175): a, c, t, g, unknown or other
ttaataaatataaaaaacaatggaatcgaactctcactatcaaaattcaagcctaaacacaaaaaattaacttaaaatcaaacaaatttccttaatctcaaacattcaacaaaaccaacacaaaattccaatacaaaacctaaatattagaagaatcactcaaaaacaaaaaaaaaataataatacaaactaaccagaaactgtgagaattgtggatgggtggcaatgggtcgtcatggggatgtcgtgggtcatcatggggatgtcgtgggtcgtcatgggtcgtcttaggtgcttctcgtgggtcttcttggttgtgggtcgtcgttgtcctgagcaacagtctgagcttgcaagatgagagagggtcggggatttgatgcttctcattttgatgttgggaattttggggttaagagagaaaggggggagttagacataaagagtgggagaagatgttttgagttgtaagggtaattttgggtttaagggtatttgaagaatatttaatatatttatttaaaggtggtatactaagagaatggtctaaatttttaagtatgctttaataaatttctttgaaataaatagatatcattgtgcttctcgaccaatttgataatttgttaaaaaaaattaagagtattaattttttttttccttttaaaaaaacataataattctttttttttttttatagaatcgtaattctttttgaataaaagtaaagtaatgaataagagtcatttttctttttttatttgatcgaagcataattttataagtgtaactaaattaggtcttaaaatcattacaaataatattattattagaaattatagtaaatgacccaaaaatatactaatatatagaggtattggaccacatccaatatttttaggtctatctagatttggtcaaattatatctgattcgatccaattaattttagtcatccaattgatctaatatctattggatgttcgattggattatatctatctattagatgtattttatatatatttattggtttaatttagatatatccaacattttaaacctaatattttttggattagatcagattcatctaatattttaggtctagtatgtattggattagattggatccatccaatcaaaggaaaaaaaaaagtaaaattttaatnnnnatttttatatatacatatatatttgggaaatttacactaggtgactctttttaccaatattcaatgtttatacttgcccttttttttttttactttttagattttctttcaatactattgttgcccctgatttttcccaatatacgtggaccaaccgaataaggacacgtggatcaagcaatgtacaaactaaaatatttgctaactctttatgctgaaaggtagcttcc

SEQ ID NO: 70669 - DNA, 946 bp, Cannabis sativa
ttaaaatttcttaatatggcctcataaatattgtcacttatcactatctttgaagtttattttttctcccgaatcaatatgtaagtttgtagaaatggaatttctggtgattgtccatttaggtgattgttaaaagaattcttctgtatgaatatatgcaagtttataagaatagaatttatggtggtttgataaggaagtgacggttattaattactaaaagaggaaactcttcaattagatgtttgcaacagatatggtcatttagtttatttatatatattacgttcataatttgataaaaagagtatttattatataaataaagatcactttgctgaaccactaaatcaaattggctgattttttcaattcataaaagcaaatctcccttttttaattaaaaaaattcccaatgaatcaaaatactcgtgagctattcacataaagggcaacattgagctttgcatgtgaaacacaaactttataatgatgtacacaaaatatgaacccgttgttgcatcaaataaaaaaatttgaagattgtgcaacacttgttaaggaggaacactctgctgcacctgtgactcaaaaccaggaaacagtattggtcggtcagtgttacatttggtcaagataatctctcttggatcaccgaaacgcttatgttagggctaccgactccgccaactagaaacagatttcgggacaagagatatggaatttgaggccgcttctagcctgcattatgcatgtagcaattaagaaatagaaattacataaacaaggcagagcaagatatgagagagagagagagaaagtacttggatatctcttcgacgaccttcataacttctgcagaacttgtctccaacacttgacctccaaatacaatctcatctaatatagtgtgcatctgaaacataataacaattataatcaagtt

SEQ ID NO: 70670 - DNA, 1710 bp, Cannabis sativa
gggtttcaatttttgagtttgtctcagtgcaagtctcaaacttcatactttcacatgaataagacttgccactaacatgttagaggcatcacaataagaatctgaacactttccgtttggagtacctgggggcccagtgctcgggcaacctagcgatgcacccaagctctcaggttgacatattgtcaacttgggaaacttccaacaacattattaaaagagtatcccaaacattttctttgtctccatccaaaacgagaaatcaagtgctatcgagaaagagacagatcgacttggaggccaaaattaggacccagcgcccaaggtgacttggtgcttagtcctagcgcccaagttaacatattttcaccctggtccattttcaacagtagttcagaagaagtcttacaggcatattctctagttttgtcagcaattaagattttggtgctttcgagaaataaatggagtcatctgggagccaaaattgggacccaacacctaggttgacactggcgttgggcctagcgcctaagttgacatttagtcaacctgagccatttccaatcagtcctttcaagaagtctgtcgggcatattctctgctttcacaaataactaagatatgagtaattctgggaatcaaatagaaccatttggtagaaaaaatctagacccggcgctcaagttaacactgacacaaggctcagtgcccacgctaacattttgtcaacttaggatatttccaaccagttttctcaaaaagtgttctaggcatcttttccattttaagtgttgacgtggaaaagtggccaacatcaactcgctagaatggtgagatgaataataaatttaagtaaataatttagagagacacacaaaatttataatagttcaccctccatgtcgtgatggtaatggagccacgtttagatacgtacgaaaatcttttttcttttataaggtttatcaagaaaatgatgattgaagagagaagagaaatctttacttttggatagtaaagtaacggttcatgtgaattgagttgagacttgatagaggtacatgtacatcactactctacctactatctatcttatatatatatatcatataatgccttttagttttacgtgtatatatagaaactatacaaacatagaatattcttgggtatattatcaattccatataaccctttatttacgtacgacgcctaaggataataattttataccaatagggtcaagttccaagggggtacagtacaccctacctttattcacagtgccctccaatagaccaaaaactttatttatttttttttttaaaaataaaaaataaaaaatgaacatgactatgatcatcccaaaatgcaatctcaagccgccgcgtctgcccactcaactccaactagactcatacatatatttattttttaaaattacaaaaaagtacttttagtgcttaacccaacatccctcctttcctttccttttcttctttttttctctgtagagctttttagtgagaaagctaagaaaatggtctctatgccttatatatgaaaagaaacaaggacatcagaaaaaaaaaaaaaagtaggattagtattattagagttagattagaggtctcatcatggggtattcgatcatcttagtcacgtgatcttgaagatgccttgtgctggccaatcacactatgacac

SEQ ID NO: 70671 - DNA, 822 bp, Cannabis sativa
  modified_base (39)..(54): a, c, t, g, unknown or other
acagtatttttgaaaaaatttccgtgtgacagtattttnnnnnnnnnnnnnnnnaattccagtatttttgtaaattttccttgcattatctcaatcttcaactcgtaataaatttggatctttctagaaataattttctcggtaagattcagaattttcaaaaacccaatctcactacctaagtatttagaattcctccacttatctaataactttctcaatggggcaataacttcctggatatattcacttacctttccttgggttccaataaattgaatggcgagattccaaactcactctttcaactagtacattatataacccactttgcaaaaaaattaaatatactatatagtgtagacatattagtctaagaaaggagtcatctcaatattgagattaagtgaaaaatataaagctactaactagagatttagtggaaaagatttttaaagggatgggactaaaactccctaaattgagaaatactaaaggacatcagtggtgtctagtacccttttatgtgtcaatatcgttattggtccaactaagtatcgagtctcatatagtttaatgtaataatttttaagaagcatcgctaaccgatcacaagacggcacatctagaaggtgtttggcactactggtgcctaatagcaatgctcccataaattggttcataattgaagataacctaacttaatactagtaactttcctagtgttaggttcaataagtaagaacaaatcaatgtgtgaacaaatgtgataagtactatatgtcccatcctataaagttgtgaagtacttagtgagttacc

SEQ ID NO: 70672 - DNA, 1609 bp, Cannabis sativa
tcgtgttttgtatttttgtaatttgttttcttcaaatttttgatttattgcgtaaaattttcttttatttattttttcgatcaattaaaagccctcattcattccttgggtgaaagtgtagggacgaagccacgatagatgtcgagagactgttattgatttgaagcacgaagaagatcttaatctctagtggttagtcaatgatctattgattggcttaagttgtttgggtgttattatttttcattgtgtcattcatatatgtctattggctttttattttgtgctctactcttttgtgattgaacattacaatatagttggtcgtgttattttttttatttatgatttaaataataaggttattatgtcttaatttttattggaagactattagctaataattattaacaggtcgattatctcattatgttcatttgatatagaaatttagtattcttcactttttttaatacttgaccgctagaggtttattagacctttagatgaggttgttgtttaatttttttatttggtatgcctagtgttgttgattttgctttacagtttatatttttatgtaatcaaaaaaagaaattggagtttaaaattctaaaaacatatttgttagtacatttgcttactattttactataagcaattacccatatgtaactatcctagtaattacacgaaaaattgtcaattaggtcctaagatcacttataacaacttctctaaaaataaagaagctttaagaaattaaaaaaactgtactaaaaacatggtacaaaagatattttaaactctttcatttttatgtttatttaaaatacattattcatgctctatatttatagaataaatatttattgttttaaatataatttattaattattttgagtttttataattattttttatggagatatgtgtatatattagtattatacattcaaaaggaataaaatataataaatttttcagaaataggcaaaatggattgtaaaccgttaaattctgtaacttttggatggatcactctagttttaaagatactgtgatggccaactggagtaaaaggatgttgagtaaaaaactcggcaaaatcatgggcaaactttgtagactgaaacactaccttaagggctttagtaggaagaaatttggtaattttactcaaaactatcaactggccaaagatgattagattactgcctaaatttgtcttgctagtattcctatagatatcacatttcatgttgaagagcaagcctttaaggagctatttgcaacaacccatataagatatgccaactatatgcaacaacttattaaaattacttggctttatggtgatgacaatttcatattctttcatactagtatcaagaagagaaaggaagctaatggcataaccacctatatggttgatggtgtggtaattgatgattatgatagtgtccttaatcattattttgagcatttcaagaatttcatggggggctgaaagttcggcttcaagtagactaattgaaggctatttggatcatggacataagttttctttacagcaacaaatctaaattatcagacccttttcgaaaa

SEQ ID NO: 70673 - DNA, 1587 bp, Cannabis sativa
tacccacttttgtgagtggattgctcaatatactctcactctttacttaagtgtttcatataatttacattaaattaaggagtctaataagaatataatctataaaaatgagtatattttaaaaaatataaaaatgaagtaaaaattaaaataaataaaatatacaatgtaatttcttcttttttaagtatgaatgcactatatttagtttttcttttccttctaggattctataaaaataagtatataaaataaaatatattttaaatatcaaccaaaaaaaaccaagaaaatatataaaattttattagagtaaaaataaaatatatttatacaaaacaaatgaaaattattaaaaatatcacaaaagaaaataaatgaacaattaaaaaagtgtcaaaaatcaatttaagtcaaatttttgaaaattcagatgcatttataaattcttgcccttttttttccaatcaaatggccttgtgtttaggctaaagaccttctagaaatattgtgtttattagattggaaaaatagaatacccttcatgttaggacatagccatgaaataaatgtttgtctcaaaggctccactcataacctagtgggaacaaacaaacacactatcaccaattgtcaatatcaattaggtttctctaaaaaaatatatatatacatactgatatttatatatatatattaattaggtttaatgcgttgtctaaatacaagtagtgagtcaatggtacaatttgcattaaaattcccaagtccttctctctttgttttaattgtaatagttggaatatgaatatgaaattgatttatcagagcaaacagaattcatattgatgaactaaatgaatcaaaatcatacattacaatcatttataagtcaccaatgaatgagttgactaactttccaataataaattataagaacaaaaaacttatgtaaatcgtgatcatagaaataacttagtaatttcacacttttctctttataaggaagaggtcttaagttcgaattctctctcccttcatataataataataataataaaaaaaaaaatcttatatgaatcctacttatcatatctaatccaacaaaatatagtagaatcaagtataattatttgatcaccaactataaatgatacaattataactaagggattaaaagaaaattagagcctctagttagtacttccacactaaacaaattataatatctgcctagcctaacctaaccttcagccagaacagtcttgactttacaataagcaaaaataataataataagatcattccacaaacaactcaataacacaagagaaatagttcattcaaaagccaaaacctaatattgatagatagatctatcacaattcaggttgtcaagtttttcaaagctataatgttaataacaatacacacacaatagagttcattcaaaattcattgtcagaattcatggaaaaattgtaaataaacaaaatatatgcatacataatctttattttactttattttttaataaatatcagatatggatcaattctctcattcaatatagcttgagagaataaa

SEQ ID NO: 70674 - DNA, 937 bp, Cannabis sativa
aaaaaccaaactatattttttatccacaaaagttgatatcaccaacaaaaaaaaaataaggtaaagttggatctaaaccaaaaaaaaaaagattaagaactaattaagggttaaaccattttaaatctctctattgtaaaagttgtttccaagtgtttaaaagacaacatgcaaatcccaaatgcataatctttttttctgtttggttaccgagaaaatgaaaatgggaagaaaataaaaatctgaaaaaaaagcatagttttttgataatatagaatctaaacaagcttaacccagataaggaaaacataaaaagatcaaatctttgttgtaataatttcaaaaaacacatcacaaatgttatgatataatacaatatagaaatacatacctaaaggttgtggtgagaagaagatatagcagtgagtgtgtggtggcttattggaagcttggaagaagaagggttccttgttcaatggcgattaataaagaagaagaagaagaagagagagaaagattggtttgggtggattggcagggcgtgagtttcgtcggcttcttatacacgaatccaatcatgccttgttctgctctataaaaaaaaaaagaatataaaaataaaaatattaaaaagaagagaaatgataaaagataatgtgcactctttatcagtgtaatattgttattggtataattaaatatttaatcttatgtaatttaagaaaataactattagaggatatagctaatttttttgaaccaaaaaattaaactttattaaatcaaatcagctaccaagatagctttcaaaccagtagggacaacaccccgcgagaaacacaaccaaaaatagaaccagaagaacgagccaaaaagttagccgtctggttcccggactgcttaacaaaattaattgaaataggaaacaaaagagagg

SEQ ID NO: 70675 - DNA, 735 bp, Cannabis sativa
aattccaacttaacacattcataagtcttggcgggcctgtgacacagaacccgccccaactaagttttttgagcctgatgaagtaacaaggcttccattagaattcccatttggcccacttgaaatatcttcagcaattcttttcctttttgattcaagaatcagaagatcaccatcaataccatcattgatttcttccctcatattagtatctcgtatactataatcatttggagatcccaaataatcagccaaggatttactaatattgatgtccctatcagctccactaaatcctccatccaatcccactgatcgtggaaacgattgatgcatcccttgattaacgccaccattgaagttcccagacattgtgtctcgagcagtcgtactgcctcccatgccgtcgccggagctttcccctctcgccattagaccttgccgaagccacttagtgccgatcgtatgttgtcttctccttggtacagcctttaagtctaggttgtatggtttctttatcagatggagtggtgtatcaaacaacttaggacaaattttttcagagtgtccaagaattccacagataaagcaaaaagttggaagatcctcatacttaaaattggcataacatatctcccctcctttcttttctagtttcatccttcttttcaaaggtaaatcaatacgaacagaaacacgtaccctaaggttatctcgccaaattcccatgaagtt

SEQ ID NO: 70676 - DNA, 2454 bp, Cannabis sativa
tcataaataactttctattttattgaattaataaatgaaattgcatagaaaatattttatgtagagcataaaacccaccatcaaaaactgttggtgaaggggtaggctagaacgaggaacaattgagagatcaattcaacaaagagagactttcaaataagaaaaagtccacgaggctctaaaagctatgtttggcgtaatccttttggtctcctttaggccaacccctattaaatggcaattagcaatgaattagagtgttgtgtgcgatgatttgtgacacgatcgcaatttccaacttagcaacctttgctttgaaagggcgtattagagatacccttttcagaaaggaaggctatcttttctaagcattctcatcgaacaagcaagtcagtatactaccactctttgattgtaacccttgttttaaaactgatgtcgatgcaattttcgacaaaagtatgaattgtgacttgtggtccgtgatgtgatggtgataccttggcgttggcaacatggttcttgcaagtctttttctcaccttttgtggttgaagcttttgtaggtttgcatggctttaggtctacacacaaagttagaattttagttcttccaaaatagtatctcactcatagctcggccttaggaaggaggcctaatcatcatcttggctacttatcgttaagctcattaccaatcatcctattggttattatcttggtagcattatcaatgagattcgagagttttgtatcaattttgaattcattttctctgtatattgttttagaaattcaacgcgtcttcatgtgttcgtgcgattaatatacttttattaactcttttagtaacttttatttcaaaaaaataaaaaatagtttttttttcatagaaacactaaaatcatgctatacatatatattttagaaaaaaaaaattaaaaaaaattgatattgttctttttggctaaaaagaacattatatattactagtattagaaagacaatagtggttttccgtaaataaaaggaaagacttgtacgtgttatatttgtggagctttagcctttatattatactaaaaagctactaagtcttaacatatttggtaatttttgataattaggtaagtatagtgtttaatgtgattaaatttatgaaaaaaaaaatggaataagtgcttctcttatagaaagttctaaattttttattattttatgttttatttataattttaaagcaaaatatttgtaattataaaaatacgtttgtaaaattttaaattataaaaatataaaataaaaactaaaaaataataaaaaattaataactataaaataattagataattagaaaaataaacttttaacaaatataaataaattataaaacaattaaaaaatattattttattgaggagttacttttataaataaaaattcaaagagaaaaaataagaaaaatatatatatttttaaattttttgtctgtaattttattttattattaatattataactattgaaaagaaaaagaaaaaaaaagaaaattcttgataaaaaaaggaactttctatttaatttttaggggtttaaggaaataaaaaagggtatagaatagaaggtggaaggtgaagagtaaggactttgaatcgaatcgtggccaatattgacaccaaaaacccacccaattcccattgcaatggtctccctctcaacctggtttcgctacatagcccacaagtttgagtattccgtcgctcttagctggaaggttcttctctttctctgttcaattctcatattggggttttcttctgtgctgtgttttcccttgaatttcattgttcatggtgcttgaaatgattaaaagtttcatactttacttttggggtttgaattgctttgtgggtttatgaggatttgtgtaactattcgcattgggttggggttgctacttttgttgttgttgtttcagtgacagaatctattgaaggttggtaatgggtttgatactttgatttgataaaagatttatttgaactttttaaagactagaattatggcttattgttgttcattcttagaattttgactttgcatgaagtttttcaattaaaggatagagctttcttacttgtactatagcaatttgttcattatttctcttagccattttggggtcttgttcttaatttaatgttatgctgggtggtgttggattatatatatatattttaatgggacatgctaaaaggcagtgcttcacacatattggtgtaattatataacttaaggaaataggttttagagaatattgttaaccaatcataaaacgatacgtgataaggaccattaccaataacaatgctctattttcataacgtcatatattatatctatacagttgttgacttattgatttttgacaatttgaatcttcataagtatgatg

SEQ ID NO: 70677 - DNA, 1288 bp, Cannabis sativa
ttaaaaatatatataattaagtgtggattggattggatcgtgcggattggattggatcggatactctgtgaacacccctaattattggtataatttaatatcggtcctacttatttttttatttatttttttgtaatggttttaaagatgtttatttttagagatgcaactaaatgtattacaatttctaaacttagaaatgatattcctcaattcatgctaatttatcatccactctaagtgcatgcgcaactaatttatgagttgcattattaggaggaccagtcctatgctgatttgtgccttatgcaaaaataaaaatagggtccaataaaaaagtgaagttattgagctttgaacactaaacctcttaaatattactctaattaaaatactgcccaacatatatttagtattatgagtattattttttattttattattaactatattttatttatttttttctaaatgggggcctgagcagtgagggcctaagatggccgcctctttcgtctcacctcatggtcgatcctgattattggttgtactacgaacataaactagggtctcaggaaaactgaaaagtaaactagcaatattttctaataaagaatctagctgaatgcaaatgaaagagctatttgaaaaatcagaaaccaaaactaaacaaacgaacaccacaaaacaaagaggaagaccaagcgtgtgagattgggggtgtttatcaactgctcacaatgtacaaaaaatatagtttgaaatcctttgaggtgtggtttgtagttttaaatttaataatacagttgaaaccgcaccacactgtgtattacaaaattaccaattttaatcatatagttttattttatgtgttttattttatatatgaacaaatacatataatatatgcatatattacataattttttttagaaacaatacaatatgataacttagtgattggtatatatgttatgacgttatattttaatacaatatatttttattagattcacttttgatttttcattataatgttttataacgaagacaatatattttcataatatgatttttacatttttaaaatcttacagtgcggtttaaaaaattacaaaaaccacatatttagttagtttgaaacaaagatcacaacccacactatctgcactacgaacactcctatatgagaccaattcaatactattatttaaccaattatagaacgtcacctcgtagtattactcactcgatggtgccctcttttagacggtggatgagtactgca

SEQ ID NO: 70678 - DNA, 1586 bp, Cannabis sativa
cccaagcctgcgcataatgggcctaagagtcatgtgccacataattctcgaacattaatatataactaaataaaatacacgaacaaactttacgtatagtatgaaccttagaatcatctgactatattaaatattcatcaatattatattatatagagatttgggcacccctagaaccattataattggttaacaatattagtgctaggtcatgccctttagcatttcatatatgcaatggggccgccgcggtagcatgaatgcatgatgcattggttgtactaaatttcgtaacttcacataacattttttataaagctggactttctacaatgtcactgaatcctttcctcaattagtacatacctcgtatctgtatatgaatttggacagtcaataaactttaataaatgagttgtttcgtggcagtgaagagtttgacttttccccattaatattatattaattattattattaagcacaaggagtgttacttaccacatgcttaattattttgctgaaaagacattttaaaatatcttttttaattttcttttacgtacttataattataatattatttatggaatttttttaaaactttaaattttgaatagttgttagtactcaaaataagtaagtttgttaaatatcataaattatgttttcaattcgcaattttttaaatatttacaagattaatataaaactataataaatattattataaaaaattattgaaaaaaataattctacatcacgtaaaaattaattaagatattataataaaaagttgtaattagcactttcctattaaccattatagctttttaattacaataattaactcaatattcaataagatctttttttaaaaaaaaaaacattaataatacaataacaccatatataaaataatacgtacatagataaataatatctacatttctatttatagaattttgaagtgtgtacattgcacagcacacataaacaaaaaaattgtataatctactttccataatacattatttttttttaagaatgtaaataaatttatatagatttttatttggtaaattataaaaaattaaataataactattatgaatattataaggtttttactcaatttttatttttattcagtattctgcatcctacattatagaatatattgtaaaaataatacaaaactaaaaatatatataactcaaacatttgaaagaattacaatacatatttttttttttttaaattgatgtctttaatatttacccaatctttcaaaatatattacatttatctcttgtttcacttattttaccaattttatttttatcactttcataataatttttgttcttctctaatcaaaattttatcccaattttcccacaaacatacacatctatcaccaaagaacacaatctatattatacttgaaattatgtcttagttatgtgaggatgtgagaataatttggatacaatactcaaaaaaaaaagtatatatatttaaattaaattttatttatagataaatttgattaatgtataccaaaaaaaaaagtatcctttaattt

SEQ ID NO: 70679 - DNA, 1810 bp, Cannabis sativa
ttaatatatattattacatagatgctattcaatcatgatatctcatatgatcaatcatttaatcaaaaaaaaaatcatgatatgaattattttttactatttttagcacgattctaataatctgagcttttgccttaaaaaaacatattaatctgagctttctgaggaaaatattccaccaatatttgattgtcgcaaaaatgttgtggttaacgtttttagaattttaaattaaatttcaaaatttaatttaaaaaggagacacaaatttaaatgtaaatgaaactaaactttaagaaaacaatatttatttcatttttcatttttttacagcaacaatatttatatcactttttttatttataaaaaaaaaaaaatatttatatccctttaagacaacacataatatctttagatccaaaataaaaaataaaaaaaaaaaagcccaaatataccttgaaggaaactattagcaaagtatgtcttagtttcattatcttagatcaagtaatatgccttttattgtcttagatcacactttggctaaatatatcttttattagtataataagttatcatatttgtatctattttctcattcttaatgagcttgttgatcaatcaatgaatctgtatcttctccttctttaagctttattgcttagaaggtagtttcttttgaggcctttcttaaaaaaaaaaaaaagtctaaataattttctctgcaccaaataatacgcattaaagtataacttaaatattaatacttatttaggtacctgataaacacaacatatggttttttatcggggatttttacacgtcaaatttgatttatcgtgattttgagtccatattgatgatcacaacgttataacaaacaaaacgtttttctacgtccattaatttacaagtacatagcatatctacttcatagatagaacctcctttattcacattagtttggtttacttaatactcatggtaatttcttttagtgaaggtgaagcgtacatattatatctatataaatatatattgtgtatattgattagatggcacgtgttacttgaattactttcttttatatattaatatattcttacgttagacttagattcatcatcttcaaactttaatttggttagaagtttggttgaacacaaataagttacttaaaaagatgtgaaagagaagacacctatttaaaaaatgaaattaaaatggacaaaggttatgagtgctatactttgggcttgggcaaagtgtcggaaatatgagtatgaagaaagacaaaacgtgttttgtaatgaattttagttgaggtggaataaatagatggtagatgcaaatataattgttcgaattaagaacacctccttaattatgaaagggtgctatccttattaattatttacaagcaagacttgaaatttaagggagcaaaaatgagaaattaaaatcaaggggccaaaccataaattttgaataattaaaatgagtagagaaatacaaagaaataaaaatattttcttttttaaaatttgggggagagcatcaccaccctattcacaaagggcacagtacttttattctgtggagcttaattgataaaaatatttatatttactttaaataaaaattaggaaataatccacgcttcgcgtgcggttgtattttatttagtgataattaattaaaatctatattaaattttaaattttgttcattttttttatatatttttaaaataatatgagtaaaataaattaatattgtatatgctaaatttttctaattattttaaact

SEQ ID NO: 70680 - DNA, 2287 bp, Cannabis sativa
  modified_base (930)..(934): a, c, t, g, unknown or other
tttttttttttttcctttcaaagatgatactcaaaaaaaaaaaactttatatatttatatatgcatggagcattgttattaagcattagtgatttaatgatgcctaacactttttatgggtggcactttacgattagttaacgatatcttgtcaaaattattttcttaagttatatgagatccgctatttaattacaccaataacagcattactaggcattaaaagtgtcttttagcaattctctattaattagtacactatacaaaacaactaattaattagtgataattatcatacatttgatagttgagtatataaaatttttaatgagtattacttatgagtattatcaagaaaatttaagttttatacttagttttgctatttaattaaaagaattttttttttcattttgtattatatggtaattgtggttgttctatgagaccaacaaagataaaaaaaaaattgaatttgagttaaagaaaaaaatggtataaatataatatttttgatatagtacagtctaaaaagagatttttattaattacttagtaaaattaagcacaacaacattatcgatcattgaattaaaatcccgtttttaaaaattaagcctacgtttggtcatatttttttttactcaattttctattttgtaattaaaaaagtaaaaatattttctaaaagcatgttttgtaaaattgttttcacttttcaatattttaattgagaataaatttttttaaaaaaatcacttttaaaaaatttttagacagttttttttaatcaatattttagatcccgactccaacccagaccttgggatccggactacggcccaggcctatccggacccgacttaaataaaataaaaaagttataaaaataaaaataaaaattgtagaacacacttttattttctgttnnnnnaattaaaaaataaaagtggttatagaatatatttttatttttcaaaaacataattttactgattaaaaaatttaaaaaaaaaacaaaaatattaccaaacactccttaatatttttaaaattagcatttaattatatgttccttcaaataactttggttaaactaaagccaattaaaaaaaatattttttaatagtcaaatattattaacgatccataaaaatgggcgtctgtcttcggatttaatttaataatattacataatgtagaataatcagaatacttacatatatcactattacaaaatatgatttatatgaaatgttagagggcagtttaaattgctaaacactgtaacgtcctactttaaatttttattggattcttaaaactgatgattcttatacatggatacatcattctggttacttatggactaacaaccatgaaattcttttatgatgagttactagaaaacaagatgtataccttgttagtataagtatatatatagtacgaatatctagctatttaaacatttttgaactgtgtactccgatacctacacagtctcatcagaattatcacacttgacattcttcggatgatgtgagattgtacagcttaattacccgatatttttccttacagatcatgagactactagctaacacaaatataagtgaaattatattgggtgccttaattacggtgactaaatagcaatggttatacatatttattattatatttatatttatgttatataaaatgtgactatatatacaacaaaagtattatttttttaaaaaaaaacattacaattcaaatttaaattaactacacatactcttctcatcttttatcttgtataaaatgtgtttatataacatagagtaattttttaacattgcaattcaaatttttaaaaaatattcttctattattgttaaaaaaaaagaataaagtagtgcatgtatttctaaaaaaatgaaatatattatattattaaatatattatgtatacaataaaattataattaacaataaattctcaatattattatatttttttttatatataaataatacttaaattaaatattttttaataaaaaatgatattgtttattgtataacataaaaaaaaaaaaactaattatataattaaaaatatacataacaaaaataaaaattaaaaatataactaagttacatacattgcacgtaatattacactacaaaaaacagttatatttaatgataattttttagtcacaacatattttcttttttgtgattaaatgtgacttttagtcacaacaaaaaattacttgtcactaaagcatagttt

SEQ ID NO: 70681 - DNA, 1764 bp, Cannabis sativa
ttttatatagtaatttattaaaaaaagtaacggcaactttttctaaaacttatcaaacgacatcagaagtttttatttttgcttttggtttcttttttatttatttttttataaaaaaaaaaaaacttattagaaactacaacttcgtgttccagtgcaatctttatggagtaacacaatatttttttaagtactccatacaaattagaaaaatcttaaataataattaacgcaaaactatcggagttaaacgcataattcagtatcaatattttgcaagcaaacccttcaaccatgtaaagaggataacatcttttttttttaagaaaaaaatagaataaataacatcctttcaaaattaataattaatagcatcctttcaaaataaaaataaaatgaaaagataacatcctttcaaaataaataaataaaaaaagataacataatttcccagtagctttccctggattttagcttcacttcttttattttaaaggattaatatatattagtctcatacttagtggcaatcgaataattataatcagatttattagttagttaatatcaatcataattaaatattattttttattcattaattaaatagcaaaaactaaacacatacttaattacacgtaggcataacacacatatataaatagagatacactgattataattaaactatttattcagctgaaaaacgaaaagagttggaatagaaaagaatggatgaatcgatggagtactactctccttctccttcgccgtttccgtttccaattccgtcgttcgattcggattcggattacgacctccaacgaatggtgaccagatggtttctactggctcttttcgtcgcagtactggtcttggcggttttcgccagcacagttaattgtagtcggcctaggagggtgtgtagggcaagcagaagtagtcatccccggcctccgccattagagatggcacatatttttcctccgcctgaactgcctccggtgaatgacactgataatgtggttgcgattacttgcacgtatagaattgagaaaccaaaatccccaattagtagtgatgaaaagaataatgatggtgggttcgactgcgctatttgcttcgagaatttcgaatatggggttgaatgtaagttgtttgtggagtgtaaccatggatttcataaggcttgcattgatgagtggctctcttgtcataatcattgtccgctttgtcgtggtacagttagacctggccacaccacaaatcttgatcgggtttaattatctaattaaattagaattgatcagtagagattagcattagtaatatgtatatatgactcagtcaatttaacaattttgtttcttaatcttttgatggttttttttggtattttttttttctttttcttttttagttattgtggaagtaaccctaatttgagattcattagaattattattagagcactcccaacaacttttctactctaatttttaaaataccttactaaaattctactttttctattttacctcacacatttacattacatcatacatcagcttctctatatttcttcaacatcatttaaataatatattttgaaacatttttattaattaaaaaataataaaaaattaataacttttagaaaaaaagagagagaaaacaaataaataaatataaaaaaaatagttaaatagtatttagctcagagcactcacaacaagtgaactataatagctaaaagctaaaaaa

SEQ ID NO: 70682 - DNA, 1935 bp, Cannabis sativa
cttttaagtctaaaaataattaatcgtatggctgattttttttttcttttttgaaaaacaaaatagtgagagatgtataatttttttgagaaaaaaaatagagacacatatgacatatatgatttgaaatattaaaaaaaggtgataatgtatttgcgagagagatgccgagcttgtatatataagttgacattttatccttttcagtataatgcatttactgaattttttttatttttaaataagcgtgtttatatattcgactaaaaacattagaccttgcggtcattacataagagatcctttggaactgacgaggccggaatatatccgcacaacttgtgagtaaaagcctaattaaccacaatatgagcaacaaaattacaagttctgtgagcatacataaaattacagcaaataaaagaggtagcagacttaatacaaaaagagacatagttctcaagcgcccaatgtgattctatcccattgagagcattgataactatcctcgagtcattctccaccaaaacaaacttaacgcctaattctagagccaccgaaacgggctaaacaacaagtcgctgcttctccacataacacatccgaaaagtctaactgagccgtatgaattcaaatcacttcacccaagtgattccttgcaaccaccgctgtgcacatgctctcaaggcccaccctaacatcacagtttaattttatccaatcctgagggggaggcctccaggacaccctcaaggttggatttgggcaaggcaataaagcatcatgtaactctgcataagaagtacaaatctggtcaatacatttcagaacatccacaggtgtgttattatgtatcaaatcattacacatcctccagatggtttcaacaacaattgaagcatacagaaagacttattctactcggatacgcctattagtgagattccatataaatttgatccaatcccatacccaaatcccattgttacagataggttaaatgccccacgttgaagcgcgccaaaaatgtactgccacatcacaagacgggaaaagatgttccatggattcctcctctatcccacataaagaacagctagtgtcctctatgtggaatctttttccaatcactgatctaacagggagcgcattagagagaatgcaccaccaaagaattttgtgcagttccaaaattttgctattccataacttatttcagagtgaatgaacaacctcacactgagagactctttccaaagttagagacagataagccgatttacatttactgtatggatataaaactttcgttatataaaaattagtttgagcatcgctattcttgaaattattatgatatttgtgtatataaataaaaattccccttaaaaaaattaaagggttagcaggaaagaaccgaaacgagaagaaaaggttcttcgtcccgccgctggttccggtgagaaagctcagtgccaacgtttgctggtttttcagtaatttggtatagatagaaagggaatggaagaagacgacgcaaacatggtcacgccaggtgaagttctgggtaaagcttcggatttcaaagcagggaaaggtgcttatgtgtctcctcacaatcacatcatctatgcttccctcactggacttcgccgcattcagtatcctcctcttgatgcacccgaccaggtccactcattcccattcattcaaccttttatggttttctagggttttagttttagcctatgaatatatgtagtgtaacaggtttggcttttcattgtgaacaatatactatctgaaatctttattttagagatacttgacttgaaagtgttaacttgattgaatgagtgttacatgaaagggtataaggggtcaatagcaaattttatagttagtataagtatgtaaagccatttcacaaataga

SEQ ID NO: 70683 - DNA, 2147 bp, Cannabis sativa
caacatgctaaatccttacaagtgtaagcattaaagaaaatattatatagaatacaaaataagtgtgttgtgtcaatttcgctaaccccactaatgtttcaatgctcgcaagtccgtctccatatcattagcgttctttccaaactgtaaaattaaaatgtaagttattacttaattataagttaatataatagttatgcatatataaatacattaattatatatcttagtttttcattcataataatgaatggatttagagctttcaacatgtaaattatgtaccttagtacataaaaatcaaattctatcttaagcacatgaaaacattcgaattaactcattgaaacctacaacctttgaatatgccctataaattaaataatttatattagattcaattgttcaaattttatgccataaaaaaattcatttcaatataattagatttttttttgaactagaaaatgatctttattcaaaacagacaaaaaaaacaacaagttgtacaaggacagcatccgcacaaacccacactaccaaccagtaattacatttataatatacctctccagatttttttactctcaatacaacagtttaacactctaattttaacagcccttttgacttccccactaatataactggcagtattacatttcaaatcaaagacacaacaattcctattgatccacacaaagtacaaagtagccatgaccacatcattcagaattttatcacgaaagttgtgagaaggtctcaatagccactctctaatgttggttggccaagcaaaacttccacaccatttgatgatctcgctgatcactttgaaagtgaagcagcaattaacgaaaagatgggagtgagactctgtaacaatagagcagacagagcataaatctaaagataaaggaaaaaacctgctaagatgatctctcgttagtagttgatcgttcacaatctgctaccctataaacctgtgttttggaattatcatcttgttccaaatgtttgccacatatctaatttttttggattggatgaacgcaaagtagaacagtttggccttgaatttacctcttcacacagcttccataagatcacttacccccatagtcaattgagtctaaagattttcttgaagtaccagcttaagatttgtttgaactcaaactcccaaaagctttgacccttcaaatagatggaatcaatctaacgaacccaaagattgtcttgtttgctcgaaatggcccaaatataattggctattagagcaatgttccatttcttatcctctcgaaacccatggccactaaatttctttggaagacacactttctcccacaatgggatgtgaaacttgcttcgattaccattagtacccctaagaaagtccctacaacatttgtcaatagtcgctgtaattttttgagggagaataaacaaactcatccaatagtttttaacccccaaaagaaccgagtgaatcagttgcgcccttcctgcaaaaaaaaaatattcttctagcccagttatgtaagttcttatgaactttgtcaattataatttcacaatcagatgctcgccattttgttggtctaagttgaacaccaaggtatttaaagggaaacttccctcatccatttgcagcacattcaaaagtaattgcttacagtcatcatggacccctccaaagtacacagtggacttcgatttgttggatacaagacctgttgactcactaaagacaataaaagcctcatgaacaagcttaacatatttttcattacctctacaaaagatgatgagatattccacaaagtagaggttcaccagccccaaggtcttgcaaagagggtgaaacccgaagtccatcaccttagatttctagataagtaatctagtcggatacgccatgataagcacaaaaagaaggggggacatctgatccccttcacaaagacccttttcacctttgaatgacccttgtagttgccgattcaacaaaagagaataagaggctccatgaagacacactgctacaaaaataggctttagtgacacgctgttatacttaaaactcgacgagcacattagaagaagacacgtgtctagctgggaagaatgaagaactcaaacac

SEQ ID NO: 70684 - DNA, 1385 bp, Cannabis sativa
aaaaaacataccatctcactagaagacaatatacttgggggcaagtgtgcccccatcttgatatgggcccagctccatatgctgaagcctccttctccgcactagctacgcctctcaccaagtatagagagcctattccagaatagtcctagaacactttgaagcccccatggggtttcgtatttcctcaagttgttgtacttcttgaacaagttgacatgctagtctatctcccacggactgtcattcagaaccacttggggagccctacgagtttcctttgtctcttcctttgagtcaacttcctttcgacgagaaggctttgtcatggtttctatacaggaagaaggaaaaccaagaagttagctaccctaactacctagaatagaaagaaagatgagggtcctctccccattaactacttcgagaggtcccaactagacatactacttaaaaaaagattgttccaacgggttgcttgtttcaaatcagaagacaacacaaactagcagtcacccctgaatctgaaagattttgggcaaaaaattggccagcgtatttaatgaaattcctaaacgaaaaatttgaggatagaagccatttataattcataagtttgcctacggtgatattcacacagatgataaaacccaaatttcatctcaaatagagggtgcatatataaatcaaaataagcaaatttgtaaaagtataatacatgaacagaaaggacgtacctagtgcaaacaaggggaggtttaaacttattgttgttgggttcagctcaggaagatgagaaatggaggcgatcaatgagtcaatttccttcccaaagtctaggcttgctatctcctctacggtagtcgtcctgatcagtagcaatagaagatagggatattcatgagccctaattctcagcaaccggcgaaggcagtaatctattacctcttccaaaatgattttccttaactgcgattcaatgttcttggatggtaggaagtctagtgcgatttgggagttagagaatttggaaaagaaagcaaaagtggtaactgaaggttaccaatggtatttataacccaagacaatgatcctcctgaggaatgagtggatggccacgatttttttggcacaaaagtgcaatcctcatccaacaatcagggaaactaaagatctatgaatatctccacatttaatgcctttcaaaatcaaggatgaactaataatgaaaattcctttttttttttatttttgtgccagttagtgagcagtaatcaaaatatagtcgttcctgaaagataactcctcgataactgtgttctagccaatgctcaattaccacgtggacacatcatcatgacagacgaaagccaacttctatggtt

SEQ ID NO: 70685 - DNA, 966 bp, Cannabis sativa
  modified_base (923)..(934): a, c, t, g, unknown or other
tttaagtgggtcttatatatacacgggaatctctgttaatttaaatagtcgaggattccttttaaaatgttttgtttcaatttttgtctcgtaactatttcacaccatcaagaatactaaaaaaccctttaaaattgttgggaatactcaactatagtcgacggtttctaatagtcacttacttttattagtaacggttctctagaaaaaccaatttaaggaccgacaagaatagtacttttgtagtagtgtatatagaatgtgatttataatgtgtaatacccaatagtaaatgttattggtattaatagtgttctaattagtttactaagaaacatgataagcaattctcatcaattgagtgttttagacaatattatcccacatgaattaaatgtaaatgagccaaatataagagcatggactactctattcattaccacttagtttttaaatagaaccccataatttttctatgatatcagagccatatcctaggggtctatgatcctaacaagatccaaataatgcaaagacacttggaatccatatatactcataatctattgttatttcaaatatcatagaatcaaatatggtattcatattttaataatgatgatcatttggcaaaagtttaaaattcatgtatttatctaaatttaatactaacaaggctaatggtaatttgaaataattttaaaatccatgtttttacctagatttaatactaaagaagataaccctaaaatcaactttttatgtgagaaacatagaacaagttgtttttttacattaatagagacacatatgaaactagtgttggaatatattttaccagaatgtaggtttactaagaagtacgttgattataaactatatctaataccctaaatatgaatttctaaaacaataaaaataannnnnnnnnnnnttaagaaaaccttacattggtggcagcaaaat

SEQ ID NO: 70686 - DNA, 3217 bp, Cannabis sativa
  modified_base (2450)..(2453): a, c, t, g, unknown or other
  modified_base (2946)..(2960): a, c, t, g, unknown or other
gatctaagatcctagtaaaataaactccaacatagacaacgacaataatgttggagcaccggtttagtctcagggatgtgttactagatttcatctagaatgtttattctatatggtaatgtttatggcttgcctaatgaggaaattacttgttcattatggattgttgttatgcttgtgataataagtatgagattcattcgagctttaaattagattgattatctatttgatttatgttgttagttacttttcttgttgagtctcgcgactcatgggtgctttgtggtgcaagttagggcatggaaactagggcaaccatgaggtgacagtcttctccaacaaatgtacatatcgacttatccatcttgtatggccgagttgtcaggagttgttttgagctatacctaatgagtattttgacctatttgtgtatacaaccctttttgtaaaacttttgtaacaggggatccccaaaacaaatttttagcaatgccatcccgttcattgctatgttattattcttgtgaagtttttattattatcactgattttattatatcactaatctactattacaaactatgtttcgaaaaccacacacgtggtttccctaggaattagagtgttacaacttggtatcagagcgaccatggttttaaaggtcctaaagactagtcagatatgtacatttgctgcgaagagatgtcgactcgtggtattgttaaatctcaatattttctaaagacaaagaagatgctcaaaagaatgcctaaaatactctaatttaaattgcccaggttgacaaaatatcaacctagacgcagggccagccccaggtgttaacctgggcactatgccctgtaatttgtgccgaggaattgttgttttttttcgcgaaaggacccatttccccatttttgatgaaggtggattcgatgcaaaatttggatctctgattgaacattcaaaaggcacccagattaacacaatgttaacctgggcgctatgtgctcggggccttagggccctaggtactcaaaaatcaacttgctctgattttgattacgatgcctcaaatatgtctgttgtatgtatagttgatgtcccaatgaaagttttgaccactagggcactgggtgaaaccctaggtgccgtcccaaaaactaaaaccctagttgaggttgttaactagggcactgggtgaaaccctaggtgcccaggttggcttccgggctacaagttcgtgtaatttcaacacccaaggcttgaattaggttgcgccatgtcttcatggtatagaatattgaaagataatgggtttgattcgagttattggagtccaaacgttcatctcaaaaatctctaagtcaacctgggcacagggcttgggtcccctcccaggtcaactactatgactcgggtctactcaataccatgacattttccttcatgccacgtgtcaaacattaatgtccacgtcactaaggaaagtttctaggttaacaaaataattaatcaagaagatgaacccaaggaaataacagaataaataagcaaaatatacaagaatcaaattccgtatattattctaatgatgatgcggtggtctccgggatctgaaattacattatgtggagagtcgttcacaagacttagcttgaatagtagaatgacaaatagcttctataagagttatagaatgtgttgcaattacttttagtgaaagtgagagattagtgggatttatgccctaaaagcaagtatttaatggataatatattatagaatatatgaaatgaaattataagataaatgaatatattaattatataagtataattaataaatatatgaaaattccttatgcatatggagttggtataatcttgtaaggttgtacaatatgaatgaaacaagttcgcagtgtattaaagtaagggatctttaatatggaattaccaagtacggtttactatgcactatactttagtgtatgtgattttgattcgaatcacatatttagatagacatgtagtaaaagtgttgtgtataatttgattatacatgactggaccgatatgtaataaaatctttcattaacatgtcgtttaccataaaagagttactcatttcacaacgatgaccattagtagatcggtctaaatcttaagtatacatgaacacctatttatattcatgaagttctttgattcactcgttaaattttctcaaagaagataattcttacaacttctattttgggagcttaataacatgagtggttgggaacatgtcatacaataatggaatcaaagcttttcaagaggatcgaatattagttcccttatagtgttaattctgggagtgctaacagttggatcgaaatctataattggattatagattaactgctcacattgaattaatggtacataaggaatcaagannnnattagaagggtaaaatggtattttaaccaactctacttatgagctaataattacagaaaaactaattatattgattatattaatggactacaagttagaataatgtaaatataagcctatattgtcaaagagtacaattcaatatttatagtggagtaataatggaattaatgaaccgggttattctattgaagagttcaataagtatttattggagcttccaaatataggtccataatccccagatcacctctatacaacactgtatagaggaaagtttaattaaatgaataaatttgagaaagaattcatttctatgagtactaattcttaagggcaacatagtaattttgtggaaattattattttgaataattatatcaattatgaaatgtattaaagtggtaaataactatttcgttttttttttattaaaactatattaattagttaaatataatattatttataaataatattaaagagagaaatnnnnnnnnnnnnnnnaaataatatttattttaatcctaataaaataagagattaatgagaatcaattaattattatttatttacaaaataaattataaatcttatttgtgaaaaaattaagaaaactaattttgggctttaaaacatgcccacacatgtaggccttgtcctacacttgtagggtgacatgtaaaagcctatgtgatttttttttttgattatttcctttataaaataaatcaaattaaatggataattatcttttaattatt

SEQ ID NO: 70687 - DNA, 807 bp, Cannabis sativa
attttgtcacctaacttgccaaaaaaagactttacagattgcaattaataaagatgatgaatttttttcaaaaaaaaaaaaattataggaaatttacatgtacacatgattttgcaccattgtaatgtcttttacagtttttgtacttgtatagtttttgtatcatttattaaggtttgtccctatttatttaagataattttgtagtataattaatgggtaagaaaattgatgcattttgtgctcataatttctacttcaacgattttttcacttttaacaaataagtatttcatgtatttttaagtcattatatttaatatagattagtttactttcgttctttcacattaccttttttcattatattgtgtggtaatagagttttatttttttttttttgttattttataggttgttttatggagggcctacatttacaaagaataaactgataagtttaactttgaatattatctgtttgatattgatttttagcaatttaaattggggtgctaggatgttgttactagccaaagggtaatacctttggctagttatacctaaaaaatttgttggttttttggttctttagtaatattgagctagtgatatgggtggtgtgttatattttaagtttgtacattaattttattttgaagattatcattctaatataattgtattttttttatttggtgttgtgatatttttcaatttcgctagctctggcaataactattaataatgagaaggtatttttcaatgcgatggggtgctatttgaagacgttatagctttattgtc

SEQ ID NO: 70688 - DNA, 4629 bp, Cannabis sativa
actattgattgcttgaaccacaaccaaagcatcagactcaataaccaccttttcccaagctttcgtctttatccaactcaaagcttccttgatcccaattgcttctgcaatttcaggaagaacactaccccaacgactttcagaaattgcttccaaaagtttaccatggctgtctcaagcaaggaaaccatacccaaatttttgttgagattcaaaaatagccccgtcgacatttaccttaaccgtatttatatctggtttacgccatctattgctaattgaagagtcacccgtagcatacatagcagtaggagactgaaatttagcaattttccaatggttaaggacccgttttgccgactgaaccacctccattacagacctggttttcccttgccacaacacttcgtttcgtgtcttccaaatgctccaacagagcatagcagcctcaacaaccacctccaccaatctgttctccaacagatcgaaaaaccaagcagcaaaatcgttaaaagcaccagtcgggtttgttgcagcagcaaaaagcagcaggaattcgaaaagttgcagcccagtaacacatgaaaaatagtctcaacatccatattacacaaaggacaaataagatcaacattcacatgctttgtttgtagttgtaccttggttggaaggcacccggagcaagctttccataaaaaatgtagaaccttaggaggcactgaaagttgccgcagttttttccagccattatcatcttgagtgaaaagccaatttctgcttgacgattgaagaaacttgtaagcactcttgactgaataaaatcccgaagactccatattccagaaccaactatccacatctcgagaattacttagatgaatatttcttattaagctaatatcccgctcctcaaacatatcattcagaatttccaagtcccaagacctctcatcaatactaatcaaattcgcaacatgcttatcaaccaatcctggatgagtagtgaccacataagggttattttcatgaggcagccaaggatcatttagaatgctaaccgaggctccactagcaattgatcttctcgcaccctttctcactaagtcttgagcagcccatatactccgccaaataaaactaggattatttcctaactcagcatcaaggaaagaaccattaagaaagtacctagctttatatatttgtcccacaagagtgtctcccatggtgagcaaacgccacccttgttttcccaagaacgacagattgtagtccctaagatcacgaaatccaagtccaccaatgttcttatgctgacaaagacgcttccaactcacccaactcactcctttacttgagttagattgggacttccaccaaaaccgcgccatcataccttcaaggcttgaacaaatctcattagttaaaagaaagacgctcatagcatagctaggcaaagcttgagcaactgacttaatcaaaatctctttccccgccttggacaagaatttagtttcccaactaaatatcttctttttcatcttctctttcaaaaaaccaagaattgcgttcttattgcgccccattatacatggaagacccaagtaaaaactatcattagacgcctcactcagtctcataacaccacaaacccgatcacggacatccacagtagtatttttactaaaaaagactgaagatttagtaaaatttacttgttgtcccgaagcaagttcataactctcaagaagacgaatcacattttgagactcatactcattagctttgcagaaaacatagctatcatctgcaaaaagcatatgggaaaccattggagcacctctagctactcgacaaccagttagccaacgacgtctttcaaaatgcttcagaagtgatgaaaacccctccgcacaaatcaagaacaaataaggagacaatggatctccttgtcgcagacctcttccaggtattataggccccattaaatgtccaccatgagtaacattataggttaccgtagtcacacaaaacataataagttgcacccaatgactactaaaacccatatgaatcatcatcctttcaatgaacggccattccacacgatcgtatgccttactcatatccagcttgatggccatgaaaccttccttaccagctcttttcctcttcaaataatgcatgatttcgaaagctaccatgatattatcagagataagacgacccggaagaaaagcactttgatgatcagatattacatacgttaagacctctttaaatctattagccaaaaccttcgaaataatcttataaagcacattacataatgaaattggtcgaaggtcagtcatagattctggatgtttctttttcgggataagcacaatgttggtataattcaactctctaggaaacgacccaatcacaaaaaaattctgaacaagagtgacaatatcattacctaccatgttccaacatttctgagaaaatcccggtgtcatgccatccggtcccggagatttatccgggtgcatttgaaagagcgcacgacgaatttccacatccgaaatcggttccagcagtttattattctgggcagccgtgactgatgcaggaacatgctggaaaatttcatcacttcctgctgctactgaagaagaaaaaagctgagaaaaatagtcctccacaaccgaagacaaacccccctgccagtccacccaattcccagcaacatctttaagcttttgaatcgaatttcttctccttcttgtcgtggcagtagcatggaaatatttggaattgctatctccctcttgcaaccaaagttgcttgctcctttgcttccaatatatttctttttgctgaaaaatatcattcagtttagcactagccaaattaaaattctgaacaaaaacatcatcatggtctctcttccacttttttatttcctccttacaatccttgattctcttagaaaaattcccagagtaatcctttccccacctcaacaacacttccccacaatgttttactttatcaataacaccaatcgaatttcctggctcccaacaacttttcacaatttcaaaaaataatggttctttaagccatgaattttcaaagcgaaaataattatttctagccaccacaacttgattgacagtatttaaaagtaagggagtatggtcagaagtagaagcttctaaattaaaaagcttagctaagggaaaaaaatctaaccacgattgagtcaccaaagctctatcaatccgaacctccacccaatctgcagtacctcagcatctctcccaagtgtaagggtacccaaataactcaagatcgtgaagtccacacatggcaagagtatcattgaatccgtcaattaaccatctctggtagggattgccacctttcttatcatcatgagaagtaacattattaagatctccaattatacaccatggcaaacttgacttgcttttcagctcacaaaaaagatcccaagttctcttcctcaaattttgattcggttcaccataaatgccggtcaaacgccaatgtccttgatcactaccactaatcacaacatcaatgtaagataccccatattctaacaccttaacctcctcttcgaatttccataaaagagccactcccccactccttccaactgaatccaccgcaagcgccccatcaaacccaatagccaccctcaatcgttcaatgacttctttttttgctaaagtctcacataataataagtaactgggcctcttttgaaccacaaggtccttaatgaattgctgagcccatgggttcccaagcacatggcaattccaagatataatgctcataatgatgggtgggcctgagaaccaaggcccacctgtgatccgttttttgatccagtaatatcaacacaacattccacttcattatccacctttgactgagtcttatccccactgattgccaccttttctttccccatacgtcttctcttattatcaataataagaagcaaatcattctcatttaaatcagctacattacctcctttgattttgctttgaccctccccagtatgctgcccatgatcccttcctccatctataacgacatcatcttgatttcttcctaaaatcatgggatcgtgattgtcttcatcattatgacgatcaacttccatgattttaggcgagaaaggcgcttcacctccggccccagcagctcgtgaaacaccaccgccccccacagctccgccaacctcattccccgtccgtaaccactgtgctccgatcaagtaattcttttttttcatctgagccttcattccaatcccatacggctttggtaattgatctaagggctgatcaaaacgcttaggacagaaacaatctgaatgacctatgattccaaacacaaaacaaaaagttgggagatgttcatatttgaaatttgcccaaatccattcaccattttcttgcaaagtttcattctcctttttaatggtttattaacatcaatggttgctctcacccggagataatctctccatattccattgaagttctttggatcggatttgacatatccaccaatataatcaccagcactcttaaccac

SEQ ID NO: 70689 - DNA, 1261 bp, Cannabis sativa
  modified_base (989)..(991): a, c, t, g, unknown or other
aagtgtaaaaataaaaaattctcaaaaattaattcatagtactatataatatttaaaaaatatgtggtctaatttattatctaacaacaaaataaaaattttaatcaataatttttatattaattaataatagttttgaaaaaggaatttctgacagattgtataatttagacccacacaacatcatatcatggtctcatttcataattatataataaataatagatcttgcataatatatagtctttggcaggtcaactttcaactgttgactatcatgtattattatgaattatgatcactcactcctattgaagtagtgaaacacatgattatgttctccaatgacacacctcccaactaatctcatatactattcttttctcttaataactaatttaaacttacctatataaatatattaataatcatggtttgtatatacatatgcttcaacttataatttatattgtgtttttaagactattatttctgtatatataatatatatatatattctgatcgaccatgagtggaattccagacttttcaggctaaaatttaattagtagtggttgtatttgatcagagatcccatgtcttctgccctaaattatgtatatgtttatataaatatatgtgtatttataatatacatattttatatatataagagcatggtcatgctatcatcatgctaacgcatcatgcaatacttaaaaataatgatttactaattaattggggtaataattcttctaaatctttcttaatcattcatgtttgattatgttgtgttaatcactaattaagcaaactattaattattacatatataaatatatatatatatagctaagctaatatttaaatttagggtgtgacaagtgtagcaccactcaaagtgaaaatgagaaaatttaccacattttgtctaatcaatttgaaaattaaaagcttaaattattaatatattgatatatatatannnatatatatatatttctatatgcatttgcattatatttagggatacacataggggaattagtgggaagtgctccctcgttccatcatcgatcgttaataattttaatctcaatcgctttttatttacagaattctcttatcactacaaaaaatagctatttttagtgatactttttaattataattaacatgaattttttgtgactaaatgtgacttttagtcacaacaaaaaactacttgtgactaaaatataatatttagatataagtt

SEQ ID NO: 70690 - DNA, 977 bp, Cannabis sativa
ttttttttttttttagtttgaaagattgttatttgtttggatctaaggcctcccgccattttcttagagttgtttggttgcatggttggatgattaaaatcaaatatctctttattggttgtccaaactcaaccttgtccattcatgtcaacaaccgtctatatatatattaggtgtgtgaagactgatgtgaggtgattaatagttaagatatactattcccataattatatatatgttgcatttggtgtgaagtgggatttcatataaattaagcaacgtaccatatatatcaactgaaaagattatattaccttctctttcttttaaatacataatttgtacatatgtatacattcttactttattgcattatctatcatttttccaagtacactcttgatatgtgtttcgtaattctgaatttttttatggtcaaaatcttcagtgtagaaaaatttgctaggatgtgcttacctctctttattttcatttcattttttttttttgtgcggtttgtttttcattacataaataattgcattataaatgtatataatttaatatttacatcttaattatggtgcaaactagtgaacaattcgcacctcggcgtgtttaaaaaattttaaattatatatatatgaaataaattatatcttttatttgatgataactaattaataaaattgtattaagttttaaccttattaattttttatataattttttttcaaattttggacccatgatccaatttaattatttatcggatattaaattttgtcatccaatcaaattgagtcatccgattcgatccaatagatgtgttggattggatcaactccaaccgttagacacattgagtggttttttattggattgaattggatttatccaatttattttagctaccatttaagttgatttcattaaaaaaaaatgatatatatataaaaatatatatatataattta

SEQ ID NO: 70691 - DNA, 1672 bp, Cannabis sativa
  modified_base (28)..(34): a, c, t, g, unknown or other
cacaaataataaaattcataaataattnnnnnnntaacagaaattagtgctaattgtctttactaatccaaaattactaaagcggtcattacaatatgagtttgaattatgatggtttattaatgtggattacaattaagtgtaatgaatgaatatgtgtgtgttttttagggtctagggatctacaacatgtcacatgggattggaaagaatgaatgaggcagagtctatggctaagaatttatgtttgaaaacttgattagctacataaggttttgaagcatattattgttcatccaagctgctgggaatgagagtctggagttgttattgatttttgacttttttttttgtttgttaataattttcttaaagagcataatcctatcctattctttggtctcaatggaaatttaatgtggatattagtttgtgtctaccttataattgttccacacttacagtagtattaattagtcatttgacatgttcgttatgaaagtgagaatagaaaataaagatattcttttagtttaaatgcaaaaaaatatttactgtttttgtataaggaaacagatagctgaaacttagcgttttaaggagatagaatggaagagctaaattttgagtattgatacttttgaggaagttcattcatgacccaacaaaacccgacactccaattgtattttatgcaacctcttctctacaaattttatgtgatatatatatatatactagattaaatttattagttatatacttaattttttttttaaataatgtcatacattatttaattgagtgagacaaatattctcttcttatgattttaatggtaatttttgctaggggaactcaaatacattttataaatattacattggcctaaggaaaaaagcattccacgtaaaactttcagattaagtcaaagtaaaacatgagatattaattttttgaacctttctttgtgaatcaaattatggaaataacctagcctttctaagacttatatactcaatgtaaattaaacaacattatccattctctctgaaaaggttaaatttaatatactctccaagctaaggtaaattatagcatctatatatgtaaactatcttacatcacatataatgaaaaatgattttagctatcatttttttggagcataaaatacttgctcaagcgaacccataatcccaaactccaaaatttaacattagttaaggcttcacaatcacatctttgcaagataaaaaacagaacaagcttctatttttttttttttttctgttcttactaacaaacacgtgggaagaaaactggtatacctccccttataacttttgatgttttctgaattgtctgtgacgaaaagtcaaataatgtaactggactattgaaaataaaatacagatttaataatttgttctcttattcctaatgagaggtgattgtgatgataactcttcatgtcttactgtaatccatattcttatggagatttttcaaaaaaattaaaaaatttattaatgattcttgccgcttgaaaagcttaccttggaatataagcatgacaatcatttatcataaccccaacaaaagatacagtccctatattatatataggtgttaattatgatttccttaatatatttcgttcttattaaaa

SEQ ID NO: 70692 - DNA, 1817 bp, Cannabis sativa
gtgatccacgtaccctacttgatatatattcaacatattcggtccatatataatatcaacattttcaattatattgtttggtgcacatgtgcatatgcacccaattggttggttccctattaaaatattaaataaacaaaaatagctagagaccttataatcttatattcactcaaattgtgtatgcctataaattaagctgatgatcaataacttatcatcataaatcaattgtgtgctaaaacatctaaagtaaaattattctctccaactctttaagtgcttctcaaagacttaaaattccttcaataaatattataaaatattatatattatattaccaaaaatgagtacttctcttgcagtaccttctgacaaaaactgggcttgcatcaacggtggtgatgatgatgtcaacacaatcaacggtgcctttctcatgtcgttgatggaagaattacaagataatcatgactttgtagaggagaaggacgaggaaagattgaatagtgtgattcgatctcttgaggcagagatcaaatattcatgctcagctcatggtgatcatgatgatcaacaccgttcaatatctatggatcacgatcatgatcaatcctctagcgacggagaagatcatagccaaatggacggtcacgatgatttctcgatcatttcatttgatcatggtgatcttgatcagataaacggatgggatttcaatatggaagtagaccatgaggcttgctccccaagtagttcaagtgggaatgatgatgtgaatttttatgggtaccaatgtggagacgagatcataagtagtaactatggggatcataattattatggagttgctatagatcatcaggataatattgcttacaattctttctggcaggacactgtatatgactcatctattattaataataacacattattattgtaaatctttcctaatatatatatattgctgatgggcatatatgctaaattatttaattctttataagatatatattaattttcttttttaatttaaatgaacaatataatgcatgtttaatgttaaaaagccagaatatatatatatagacaatatgtatactaatcacttaaaaaatgaatttaatttcttaaaaaaatctacaaggttaattacataacaatatatatatatatagcatattgttgaaataattgtaactttattaatttgggttgattatttagtgcaagttttgctttacgtacgggactcgcctaattgtttgtaatctcttttattgaatgaatcgattcccgtaaactagcaatcgaattggaaacataattattttttttaatataatttaaaatgaattagttcgatcatggtttaaatattaactacaagatgatgagctgagcaaaaatatcaagttaattaaacatgtatagtccatttttcgtgttaaaaatcatctctgagagctcaagaacgaatgtcatgaatgaatactctaataacaatcacctcaatcgactaatacatatttatatagctgccattacactactaaaaggattctttttagtgacaactttttaattataatataaattttttgttactaactagtcacaacaaaaattacttgtaactaaaatatatatagtattacaaattgtcactaatttaatttttgtcacaacaagtattgtgactaaaaatacatttaatcataataaattatgatttttgtaaattaatatacttttagttacggactttttaatcataacatacaaatgataatttatgattaataataactttt

SEQ ID NO: 70693 - DNA, 910 bp, Cannabis sativa
gtatactatccattttcatatatacaatcattcgtgctcgttctttcttactatggcatgcaagaacattatactgttccttttattacagacttgttaaaagaatataatgtggagttaaaagggccgttcaattattcagctcgagatatagctggcattccgcgtgattggtgagagaactgtttagtttcatgtgtttttgttcactgagtcacttgatcctcaaatttttttgctgaaatcaaaatttttttgtttaattttctttgaaaccatgcatgttatgatttgaatattctacatcgtttatttaggtacgatgtatcttctacgaacaaacaagatgaaaataagcagctttctgcagtaagtgattctaaacttagaatggtttttcaagtattttgttggaatgatcgttccttaaaaagaaaaaaaataggaggaaagctcattcaaatggacaatttaaaaaagaattgataagttattgtatttaataaaattctattctattttcatgtccattcctattattttgtttttattactcccaaccaaatgtatgaggtgtggagagacaatttctttcactgttttttcgcccctcacccctttaatgcggtgtgtaaaaattcttaatgttacacaggtttatgcgaggcttgcttcaatcatatccatggagagtcagaattcaagtttaaataccccttctccttctcctgaatgatgagctatggcaatcaacgaagatgcttatataggtattaggttctatgtttagtacatctgatatatgggagctatttctttatcctttgtagctagctattttgtatattctcatctttgccacacctcatatatataaatttaagcgcaattctgtaatgatttgttaaga

SEQ ID NO: 70694 - DNA, 1730 bp, Cannabis sativa
attaaaattatccatacatgttaataattgaacacacctttcaaaaccaaaatcattacccattagaataagattttgttggtgttgatatatatggcatgttatatcaaacatcttgtgtataatacaattaaatatttttatttattgtttattattttaaatttaatgattttttaattgtttaattttaattgaatttacaacatatgacgttaagataacatcatcaacactaacaaaatatcatataagcacttagccatataggacaacgaaagggcataataactcattaaaatgattagttcagaaaaattttattaaacaactacaaaaaatttgagtgcatgaatacttgaaagtaataataatttaggaaataaattaaatactttatcatttaatgttatataataaaataatataaatgaaataaatataaataaaaaatagtagtatattaaaaaaaataataaaataatataattattgtaatataaattttatatcatacaaattatattatgtcaaatttaattaaaaagaattagtgtatgctaaattaataaaagaagattgttattagatattaatgttatttaatatttttttatatactttatatagtaatatttttttaaaattattttattaataaattatatgagactcgatacttaattacattaataatactttaatactttaatatcatgtcttttagcaattctcttaacaaaagtataactgtatttacaggttaataattgaacacgagtttcaaaacgaaagtgatgacccataagaataagatggctaataatttcactcgaaagtcatttaggtccccacatacacaccaaactgtagtccagcagccatacctgcagacctccttatttgcaaccattatttaataataagaagaagaataaataagatttatcattcctcaactattactactcttaagtttatgctcccaaatttttttatttattgaaaatctttttcacttattcattttattagtcaacattttgttgttggtgaagatatatatatatggcatgctatatcaacatcttctgtataatttaattaaatatttttatttattaatttattgtttgaatttaatgattttttaattgtttaattttaattgaatgcacaacatatgacgttaacctaacatgccatatcaacaccaacaaaatatcataataaaaaaaaattaaaggcatgaatatttttttttttttgagtaaaagtacaaagacatgaatacttaaaagtaataataatttaggaaataaattaaatgctttataatttaatgttataataaaatatattaataaaataatacaaataaaattaatataaataaaaaagtagtagtatattaaaaaaaattaataaagtaatataattattgtaatgtaaattttacaatcacataaatattatgtcaaattaactgtagatgtagaatgaaattgtactagaaagaaacataaaaagaagaagatatcaaatttggaaaatatcaaatttgaaaggatattttagtaatagggtgaccaaagttgatattatgatattaatcttttgggaatttgtttcagtattgaagttgatcctcactagtccattaagaggattccaagtatttcacattttcatctcaaagattagaaagaggtagagctctatatttttta

SEQ ID NO: 70695 - DNA, 4922 bp, Cannabis sativa
  modified_base (530)..(530): a, c, t, g, unknown or other
  modified_base (1879)..(1880): a, c, t, g, unknown or other
taaatattggcatttataggattgaaatttgagaatatggcatttttgaaataatagataaatggttacgaaaaattgcaaaaatgtaactagtgttgggcccaaatcatggtcgcccactgtgccctatttttgctattattttatgattttgtattccatataattcaatcctaaccctaggtgaattagtataaaaagaaaagaatggtctcattatcaaactaatgaccttaaacctaattttcattctatcagacaactagtgttttgagacttcttcttcttcttttctctcttctaatttcaaaatcctatagtcttcttcacaaatgaatttgagccttagtgattgagtggacgcccacccatagcaagttagttatcaatcatagtgtgtaagactttgaagaatccaaacaatagaaggagttttgggcttagatcttgattatactctgcgacagaaaagagcaagggttagagatctgagcggaaagagttatttaattctgctgcaaccaatgtanggtttctcatactttatatgtgtaatttttatcgttttagagattcatatttaggatgttaaaaacatactcgttagtaaatctagttcctggtaaaatataatccaacaactggcctcagagccatggtagtgatttactttcaagaaatattaatttaaaacgatgtatgtatgattcggatgtgattcatgttgctcaatgtgtttattgatgactgattgatgtgtacaaaatttttacgtaaaataattagaatttccttttggaattatttttcttggatagtatggaaaatagttaagcaattcacttttttatatttcgattttatatgaattagttataactttttgaaaaaaaaaaatcagggtggggatcacccacgtgtgtgcgcggacgcgagtgtactcgatatgcgcgcgcattaggacaggctttgcctaaataacctctacggcccccttgtcagaactgttatgcgcacgcaaaaaatcctacattgcaggatgcttgtgtgtgaaacttcaattgccttccttccctacgcgcgcggatggtatgcaatgcataccatctgcaccaaacccaaaacttttttattttttcattttgtcatactttttaatggaattaatttttaatttttttggtgtaatttagaatttagattttttttttcaaatctcaaatataattatcagaataaaatttattaaattttattaattaattttaaacattagtagattttgaacttgaaaatggataaaatctaattttttgcttatttggttatcttatttttaaaattgaattattttatcttatttttaaatataaggtcagatatcttatattttacattatttaattaattttataaaatggccttatttgaaatttaaaataagatatattttaatctagaaattctaaaaatcaaacgagatattttgtcactttcagatttttgttattttatttaaataaaactataaaattatataaatgatattaatttatcgttttatttaattagactaattttttttcttttaaaataacataaattttgaacagttagtttgcatttttgaattgatatttaggtttgttaaaaacctaatttttcaaatttattggtttaatttataggtttaattgtttttcatctaattttattatttagatttttcgaaactaatttaaattggataaatcctatatcccactatcaagtttgtgatatgcgcgtgtttatatattgtttattattaaaacttattttttttataaaacctattattgtttgatctaaattactatggttaacttgttgacagatnnaatgatctgattttaaccaatagttcaattgtaaataggtcaaataaatgagtggtaacaagtaaattttgtaatcatctttcatttgtgtataaacctagtaacatggtaagatccatccaaatcagtgtgtgtgtgtgtgtgtaacaccctgacctttagggacgccatgtgtgtgcttttacaaacttattccttactaatctattactttagaaaaagtgtggtttaattaaaaacctttcgattaagttgaattaaaaatttcatactaaatacaccaaaatacggggatcccctgtatataaaattcttttacaataggttacaaaatcactgttataaaaatgaggttacatttccaaacatagaaaataggttgatcctacttccaagaagccaagacaccacgactaataggtatatagatggaagacctctatctcatggctgaacacaactggtatccttcctacctgcaccacaaagcacccgtgagtcccaatgactcagcaagtaaagttattatatgacaagcaataagaactcgagtattcttatcataatataacatacatactcgtgattcattatctattcagcctgcatagatagtataacatccatacgaaccgtatgttacacaatacaaaaaatatcatagcatcttgccgtgaatagctttatcattacactaatcaaatattcattcaatacaaaataacatatttgtagtgcctcgtaaagcactctaatcttacatccctataaacatgtattcttacgtcccgtgagtcaccgagactccacaagaaaggagactaatttcataagcaatataaaattaattcagtcacattataacaaagatgtatccgattacaattcatcacataacaacttgcataattaatttcacaatatcataatcacacaatcccggtatttcataaagtatccttaccactcgttaaccacgagctacatatgtcactattgttgcctaatacggaaaacaataagaaagaaacctatctgcagtttcaagaataattactcataacggtaatgatcgttcccaatcctcaccactcattatccacgagctgcgtctgtcaccatcgttgcccaataaagcaaacattaagtaagaaacctatctgcggtttcaagaataattactcataacggtaatgaccgttcccaatcctcaccactcattattcacgagctgcgtatatcactatcattgcccgataaagcgaacgataagtaagaaacctaaccgcggtttcaacgagtaattacttataatggtaatgatcgtttccaaccctaccactcgctatccacgagctacgtatgtcacactatccccgatatacagcaaatgataagtaagaaacctatcagcaatttcaggagtaattactcataaatttaatgatcgtatgttaattcattcacaacaacggtgataaccgtgttcttccctcaatcataaacaattcacaaacgacaataatcgtttctcataattaccatcgagtcacaacaattacatattaataatctcgatctagattaagtcacaataaacacctaccgggatcttgaggataatcgagactgtaacaatcataacattaacaatatacggtgcttaatacttttcttaccttagtctagagattaagcatgcatgccagcctaagtggaaaaacaaacccaatgaatactttaatttgatattctgggaactaaccctaattcctgtaaccagacaaaacctaacttcctttagctctataataggccattcaacacttaaatattcttaaatagatactagtaccaccccgagccaaaaccaaatttgaaagaaatcatgaaattttcccctatagtacaaccagtcgaccagttctgttacaccagctagaaccaaccggtcgaccggtttcgttacaccagaacaaaccggtcgaccggttctggcagaccaaacttcatgagtttttcttccccaactcgaacaaaaaccaaaccaaacctatctaaccgctccaaatcaaaataatatcatattcacaacatatcccaagcatcaattaaccacaattcatccatttgatcaaaagcacatattcaaatgaattcaagcttaatgaacttcacttaaaccattacaattgagccaaccctaactctagctaaaacaagctcaaataaactttaaatcaaatctaagaacattatctaatctcagtttaacatctctaacccaaaatctcaaaaccttaatccaaaactaacattaaacttgagaaatcaatatacaatatagtaggaaactcacctcaagaacttggatagcaactagggttgattttctagcaggattgaactgaattaggatgaaagaatttgattttcctttggttttttctaggccgaacagaggaggagagagagagagaagacttgagaggtttcatagttagggcttcatcttcttatttctttctttatttttattttctaaaattatttaattaataacttaggaaaataaactaataatatacctaagtcttcagccctaataatctaaataagacaaaaataacattctaacttatgaaattactatcttaccccttcctcacaaacaaactagaacacaacttgagggcactatgattatttcagctttccaagcttaacgttcgtacttctcaacatttcaacctagtccggtataattccaattctattcatcttttattgtcgtaatatttctgacatttccgtcaagttccgcagttgctaggcctaaaaatattttattcgaattatggtgtctacgatacccacatattctaatataatctccgtaattgataaattacacttgatttattttttatctccctaatcaactcataattagtttaagtaggattataatcctactctaatacccacttaatcgcatatttaataaaatatgtctagttaaaatatcaatatattttttgg

SEQ ID NO: 70696 - DNA, 2111 bp, Cannabis sativa
  modified_base (2053)..(2072): a, c, t, g, unknown or other
ataatatcacaagacctttacgacttttgtcaccttggtctttatatctttatgactttgatttcttctttttagaatatgaaataatttttgggcactatcttatgattcgttctttataatattaacctttaactaagcaccaaaaccaaagttgttagtgggaaagtggggtttcttcacaaaattttatccatttttatgtaggagaattattttatatattattttttttcaaatttacgatttgaatttttaaagtagttttaccggtaggttttatgtgggttactatacagtttttagttacgatttaagttgtttcgttagttgcaatagaggtttctatatagaattatgtaataaaaaaaaaaaaaactatttagaagtataaaaataaaaaagaccccttttatttatatacatttagaaaataattaattttacaatatacataaaaattaatatcatcatcataaaacgaaatagttagatctcacaatcgtaattatcataaagtgtaatactctcaaaagcgttaaatatatataaatatatatgtacataatttttttgctttttaattatatctttctgaatattctttgaagaaaaacgtcattaagacaaattaattatttttttcacactaaataacaatgttttttcaagtatatttttttataataataataataataaaagctaagctgtatactgtgtcacatgttaatgttacaagttgcatggcattattctaattggacttttgtctattgagttgttaatataaattaaataattgaatgttttgttttttcaattgtttatttattagcattatttattattatcaagcaaactccatgctgaaaaagaaggaatataattaaaaaaaaagaaaacagaaacttaattaaataattaattggagccatgataagggcattggccttcattgtctcttaagagacacaagtaaataaataaataaataaaaaccaaaataacttaacctttttgcttcttcttatttttttttttatatatgtatttatatatagtaatttacggtataaatatttaaatttaatttttagttgtacataaatatttaagtttaatttttaaagacatacttaagttatatttctgaaacttctatagtacttggtcgttaaatgtcaagttattatctacatgtcatttttattagtatatttaaataaaaaaaataaaagtttaatgacattgatcaatcaagaattgtcacgtgatcattaacttgacacttaatattcatttattaattaagttctagaaatataatttaagtatagctactattaaaaattaaaattaaatatttatctaattaagagttaaatataaatatttacgccacttaaacaatcgaacttaataatagtaataatagtatgtgagatgagatgtgtctctaccaattaaatagacttatgggaatctattggagaaggacttgtctcacattgaatcatgatgatgtgattctcttttgttgatgaatttattcaaattttataatagttaattttttattttatttaaatattttaagtaatgtaaaatatacttattattgatagctcttgtgtaattgaaaaattaagtgtaacttgtaattggtggtaattgaattacgttgtccaatatgaaaattaggtgtaaagaatattactatattagataattaatgttatttatttatctaattactactttgttaaacatcaacattttgagatacaatatcattattaagttatgttacgtaatttagtaatttaataattacatatttacttccaaatgtatatttataactttactaaaaggagaattatttccgaaatgaagaaggagaagaggaatgatgaattaattttgtttccaaagtaggattgagacaccaaatccgtacttaatttataaaatactaagatactatgttgcatataatttagaagactaaaagtaattgaataatataaaaaatagggtaaataccatnnnnnnnnnnnnnnnnnnnnaaagttactaattggaccctgtgttttgttaaatgacaa

SEQ ID NO: 70697 - DNA, 1296 bp, Cannabis sativa
ctcacaagggatataaatgtctcagctccactggccgcatttatatttctcgtgatgttgtttttaatgaaatggagttcccctttcaaaccggctttctaaacaactacaggtctgaaactcctgttgtgatacacagctctcaatggtccttccttcctattcctcacactggacaggccacaacactccctagaacatctgttgtatcaccattatctcatgagtttaatgtttcagatcagtaccttggttcaggcagtgagggggagaaaaatgcagcagataatgcagataatgcagcccctgcatcaccacaatctcagcagtctcatcacgatttcactatgcctacatcaccacatttctctcctgctacatcacgtacaccatctactgctgcatctacccgtgaccaactgcccgaaccaaccacagcatcaactactccacaacaagctactcaccacatgatatctcgtgccaaggcgggcatctttaaaccacgggttttttgtggtcagtcaaattgggagtcccttatcaaagagcctagtagcctagaagaggccattaatcataaagggtggaaaaaagttatgaactctgaaattatagcactcaaggccaacaaaacttggtatttggttcctgctacccctagacagaacctagttggaaataagtgggtctacaggataaaaaggaatgcagatggatcggttgaatgactcaaagagaggttggtgggaaaaggatttcaccaaagacctggaatcgattttggagagaccttcagctcagtaattaaagcctcaacagttcggattgtcctaactttggctgtcacaaaaggatgggaaataagggaattggacataaccaatgccttcttgaatggtgaaatcaaggaagatgtgtttatggttcaacctccgggatttgaagagccaggaaaagaaaattatgtatgtaaactgaataaagtccttatacggtctcagacaggcacccaaagcatggttcgataaactcaaggctgccctcttaacttagaactttaaacactcaaaggtagataactctttgttcttcttaaaaacttcaaaagtcattatccttgtgctcatttacgttgatgatataattgttacaggaaatgacattggtgaagttaacaagttcatcactcaactcaacagatccttctctctcaaagatttaggtgccctacacttcttccttggaattgaggttcacagagatgagtcgggactatatctcacacaaacccag

SEQ ID NO: 70698 - DNA, 2489 bp, Cannabis sativa
ttattcaacacatcgtagtgggaatcttcttattttgttatttagacgtagggccttctacgactctcaatgaaagcaccaaaatgttgaccaagatttttagaaactaatttatgaaagatgtgttgaatgtggtggttggggggggtagtatttattatagccttatgaagagaaccaaaaagtctctattgtcgtaagtgttcacctttagtttgcacaatttcccaaaattcaaatagggcatgcaggtctacataataggttacatagagtttctcaaggtattaggtgagacaagcctttaccctcccttgattgacgtgacagttcattatgtagtcgtcactaaccccctcggtaagagtaaatcgctgaataatgggtttaatgcccctcacatgtctttttagattcatttgcaattgttttctccatgccgatttttatgtgttgttataattcatctctgaatccttgagcccggtcttgacggctttgcctagctcctagagaggaacaaaacaccggatccctccggacacaactatagctcccggagggatctcgtggacatgtctactaaattcgtgacaagtttactttagatattcgtaaatacttccggatcttaagacttagttgccacgtggctaattattggactaccacgtatattgggtaaaaaacaggacaacatgtgctaattacatataaaagtgagattttacataaatatattatgtatacattaaaaaaaaaacttttacactttaaatttcatttatataaaaattaatttcttttatacaaaaatttagaaaattaataaaatcgcttgaagtgcggatttatttcctaattacataagaaaatattgtttccaattattttatattttgaacttattatttttcttattgattgttctgattctagatatagtttaataaatgtgttaaaatattaatatacaaaagttttacatctgtacatataataataatattgtttgataatataaatgtattaattaacgagcactattattaagtactaatagcatctatcactattataaaatagcgtcttaaaaataattggtaatattatataaaacttattatattaaattatgtgagtcattattttttggctaattaggatttttgccctttaaacattgacatgtacaaaatcatgccccatgaacttttatggtctttgaaaatgccccctgaactattaagattattgaatttaagaatttttttccaattttagtaaaaaagtctaacatagatgaaagttaagagcccataatttagtacatgttaaagttcgagcgccatgatttagtacataaacaatcacttaaatagtaaaattgaataaaattatataaaagtctttaaatctaacaatctcaatagttcaagtggcatttttaatgaccttaaaagttcagggagcgtgatttggtacatgtcaaagtttagggccaaaaatcctaattagccttttttttttttttttttgagtggggatcaaaccccttcccctaactcacacacacttcttatatactaatatgatttgacctcagttggtgaaacacatatatattcaatcaatatatataaaggaaaagaataggccggtgacatggcactctataatattttcaaaactatttttttcttctctaattaattctatcacttttttattttttattagttttataaatataaataacaaattttttattttctttatatatattttttaaaataaacttaaatatataactttaaatctttttcaacttttaaaatacatataactctaaacctatatatattattttaactttttgaaaagtttcgattccaagtacattctttttatatctcatttacatctttttgtatattaagtgtttgttgcattggtacattatgaagattgggtatacaatctaatttatgatgatgatgttgttttgttatggcttggttgatttttattatcaaaggattaatagaaagtggagagagcatgctatgctactgttccatttattttatttatcaattgatgtccattgtctttatatagaccaatattatttttaatgttcaatgaatagtatcaaaacatcaatttttaattggtattgtcaatatcactttatttttcctttttcaatttatatatataaataaatagatagattcttactctttttcttactcatgaaaatatttctccataattatttgagacatataaactttttttggatgtcgacaacttcactgtcatcaatgacttcgaattatttatgatttgctcattagcatgaattatttgatgtagaaaaggttattttttaatgataggctcttgagattcatgaaaagttatgaaaaggttattgtaatttttcctttctcattctcatgtgatactctccattcttcatt

SEQ ID NO: 70699 - DNA, 1521 bp, Cannabis sativa
  modified_base (475)..(483): a, c, t, g, unknown or other
tcaacagtaggtaatataactagcaatatgcatagaaataggtatgctcatatatttgcattgcctaattaggaaaggcagtgtgattacacaatatcatatacaatattataatcataacattcgacagtagataatatacccaatcttatgcatagaaatggatatgctcatatatttccattgcctaatcatgaaagcttgtgttataatgcaatatcattgcaccacctaatcaggggagcccgtgccataacttggcaccaatacatagcatcgtcttattagatgagctcgtacctacgcccggtacttatcatatgttactaacgcccatacgtacacctgatacgttgccaagaagaaacccaataatggtttcaatctatgccacaaccaggaaatttcatatcactgacgctcgtacctacgcccgatacgtcgccaggaatatcatatcacctaatcaggtgannnnnnnnntacgctcggtactcatcatatgtcactgacgcccgtaccaacgtccaatatctcgctaggtatatcgcacgatctaatcaggtgagcccatatgatatatccatagtatcatcacattatcattgcttaaccaataagtcttttcaaaatataacaatataaattaattcataataatattaatggtattacaatacaacgtactatgcagtacaatatacttttctttcctttaatccaggttcatacatgtcgtccaacccaagttgagaaccatccccaatgatctcgacccttaagctttccttctttaaagatttgctatccttctactattagagcttagatcgctaggtttcaggttgaaaataaaaaaaatggataaaggaggattaaggttttgttgaactaagagaggaaggttttgttcgtccattctttttttttttttgtatttaaaacatatcacttatatatatataaacgtactagaacgttttatgataatgatattgtaataataataatataatattaataagaaatctatattttcagggtatttagtcatctccaagtaccctaaaatatcccaaatttctaaaatcaacttatctcaataatcccatcaatatttctaactaaaactgttatgacatttttggcatccaatcgggtctccaaggtcacagaacttgaaaatatttttattttaaaaataactcatactatatctacatatatcaaataaaaatctcattaattaacaaattctgcttatttacccagttattggatctttagggtcgccgaacctaaaaatatttttattccacatatagctcatattatattcacacatgctatataaatcttcgtaatttataaattgcacttatttactcacttatataaaatttaaattttatgctgaaatagattagtacgatcacaatcccacttattaccttgattaacctgtaatataaatataaaccctaattatttaccatcaggcttattgggatattacaacta

SEQ ID NO: 70700 - DNA, 1554 bp, Cannabis sativa
atatataaccaagttgggttgttgggaattgagatgtgtcaaattctatgtatcataatatatataagatcaattttattgcattatatatttaagatatttccaaaacttgggctgattagtatgatgtttagggtttgaaaatgggtccattttggggtatatgatgtgagtgttgagttttggaccatcaatgtaaacccacacattaaacccatatgcccaattcaaccaaaatagagctttcattgttgaaaaaacttcttatatttttaattttttttttcttgtaaaaaacaatcaatgaatttatacataattacaaggactaacatgccaaagaaggtgacttttcaaaaagaaagattgacaaagcttgagttagattgtttagttgcaattcaagtggtgattacttctattttttatgccttctctttttagataattgtctagtactgaatgtcgtcttatataaaaaactttaaagtctgttaagattctttttgttaaacattttgtaaataaggttgtttattgtactgctcttcgttcttgtttctattcatgaaattgtgtttttttttaataaaagtactatttttactgaacttttatctattgtaataatttagattcattgattaataaaattattattctttttcaaaatatatatataccaaagaaattataaaagttcttctaatcaaataagttattcattatatttgcaactaattttatataattttttatttgacaaatatgaattagaggcacttagaaaaatctgagtaacaaacttgttaaatccttacccattgatccaagatcaaagaaacttctcttacactaaaaaaaatatgttttaataaaaaaaaaagcacaaaagcatgcatgtatattaccaaattatccttcatgaagaaaactttacgaaagttattttgagcttttatctaaaaaaagtttaaagaaaaaattactacttgatcacatatgagatagttataataagttaaaagcttaattaagctatcaaaattacattaagatatgtacatgaattgggtcccttcactaattatgtgtacatgttcctaagtgatctacaagcaacactaataattaactaaacaaattatttagtagtaattaatgtatcacaattatccactttcaatattatgttaatgttgtaatactagaggatacaacaatatttgaactagatgcaactagtatttaaagatggtcactttaaaaatggaattacacataccatttaaaaaaaataattaaatttaacttagatatttatatatatatatatatatatatttttgatcatttgatgcaaaaagagatatattttcctttaagttaagtagttaaattaagtttagaatgttaaatttttattttattattcgttattgaattaaaatttaattatttttttttaaaattaacatttatagttaaatttttttaataaccatcaataattaattaatacatgtattctatatatgtattattttatttttt

SEQ ID NO: 70701 - DNA, 1102 bp, Cannabis sativa
aatccaatcttccccttctattgagagtttatgtattagagatgaaaataatccaatcttccccttctattgagagtttatgtattagagatgaaaataggacaaataattagcagagaatgttctctcattcccttccccttaactattttaatacttttccccgtcctgcatatttgataagttcatttttacatataaaatttaatttatttttcatattttttatattatattttatgaaatttatttagtactatttttcatttacaaatataattacatatcgatttaatatcgttataaaaatatggtttacataataccacttttatactttttggtatttaattatcatttgttatcaatcattttaatattttaaattctttctaattgccattttttattttatttttatctaatctaatatgtatattagccgtttatcacttcaatggtatcgatcaatatatatcaaagatatattgcattaaattgttttacttttacgtttatcgttcaatcaactaataattaatttataatatcttacgaaatttattaaagtttgaagagtaaattatagggttctaacttgtttttagatacttcaattcaaataaattagtaaataatttaaatgattttattatacattatgttttcaactatatttgtgttgtattttttttattggtgtataaatatttaaaattattttttcatttgattcatctagtgataagtctataacaccatatgcttttacctaaaaattaaaagcttttgaagattattaataatttcgagggtgtgaatacttaaaaatgtaaaatactaatataaaatagcaaaataaattagcctctatataatttttttatgaaattactaagttatatttttgagtttgaaatataatttttatatttatttaacatgatctttcttgtaataacaataaatatagcatattttgctatattctacaaataaaataaaaaaagtagcaaaaattataaaataaaataaatttgaatttactatcaaaagtccaaaaatcaggccttgtcccaaataccaaatgaagagaattgaa

SEQ ID NO: 70702 - DNA, 1637 bp, Cannabis sativa
atacaatacaaaataatacggcgtaccaaacaaacctttaattacatattactaagcataatccacagagtacatatcttattttctaatttgtaatttttttatattattatactatatatattatataaataaatataatatagattacataatataataaccaatatattaatattttttttcaaatcacaatatattaaccttttattgatatataatattctattttaatctattgttaaataagaaatagtataacaatcaattcattattataaatcttcttcttcggaccgtacctttaattatttaaagggaaacacaatcgaaaccttatccaataatatctgtacggacgaagaaaacatatataaataattcagccaaaaaaaaagaatgaattgtctttattatcattagtgttccaaatgaagcattcatattcatgtggacgtacactgcatgaaatttgcgacatttcaacgtgcatgggacctacccctctctcaccgtgacacacatgcatattcaaacttccatttttattcgccatatgatattctgctaaaaatccactttttaaaacaaagtattggtaaattatatggttttttttttttttttacttttacacatatcaatatgtcaatattctgttttaaaatgatatgttactatgtaaaagtaatattttaaggatcagtacgctaataattattataaagtatcattaactatttaagaagtgttaataactcaaaataatattataacactaatgatacttaatcatttaatttggatagttttcttagaatcatgtggttttttctctctcttctctctctttcgtattgttctatttgttttctagcattattgttgcaggttttgtgttttgaaattttaagcaaaccagttaagaaaataaaacattaatttctaataataaaataaaaatagaagcaacagctgattatgaagtagagaacgtgaaggaagaaagaccacatattatatcctctttatatatatatatatatatatatatatcttctgcaaataataataaattgctttgcttttactgatcttttttgtcactttatgcattacaccgtccacgtttctagattctcattcttgtatagtcgaatatcattatccattttctacttacttctatactctgctttttcttttcttcggtaatgttttgctttctaatttttttatttaaaatttctttttctagattatggtaactattacaaatttttcatttgtttaatttttataaacaatttgctaatagcagtgtaacactagtattatcataatttaacatcaataatagctcaaacaatatctattctatataaaatgtgactatataacagaatttttagtttatgaaaaattattaggtgactttttttttttaaataaaaaaaataacaaatttctccccaatgatctgatatccttaaatgccatatgagaaatatgccccctaccaatccaatggtcaaatttctccccaatgattatacatccaaagcagcacatgcaaataagttggcctataaataccccagaaaaagcacaagagagggattttttttttttttttt

SEQ ID NO: 70703 - DNA, 976 bp, Cannabis sativa
taccaaatttgacatattaaaaaattaccaaatttgacaataaaaatctagagagagcacagacactgcactgtactaaatttgacaaaataaattataattttcccattaattatactctaatacaattactatattgttattaagtcttttttaaaaatatttaatttataaatgaatcatcattaatatgttaccttttttttttacttatttgcatcttaaatagcaaatatagcatttactgactatttctgtcaaatatagcaccgtatttagatattttggagatgttctaaaattaacaagtgctataattaaccggtctgataaatattcgagcttgaaatagtaagatccaaaccccaaatacttttcaatagattaagaacacaactaccctggaaaaatcatcccagagagaaacaacttaccaatttatgaaactcatcgatcattgtctcaactcctaaggttgacctctgaaaaataagaataattcatagagtgttcgaaagaacttttcttcatacctatcaatcattattcctcttacaaaatttcacactatagcacattaatattattaatttggctacttatcccctatagccagtttggcaagcacactgaaattctgctttatctgtattcataatgccctcgccttctcgtctatccaagaatataattgctcggcatatggcctccgttcttgactctgtccattcaatccaaattaaaagattgcagaatatcattccagtctgaggtaagctggtcataaaaagttggtgggaaacttggttgtattcgccattcgccattcgccaaatgccaagatcatttctcagcaggctcttcaagaattaattgagctgaaactttaagaagcactagatgattctttagctttctctttgataccctccttatctgcagtgctcgtttctgcagcctgcgactgacttgtttg

SEQ ID NO: 70704 - DNA, 1936 bp, Cannabis sativa
atgcaacataaaatgatttctaatttttattaattagtaaatctaattattttgaaatggattttatttacggcataaaatccaacagttactttccagaaaagcttttgtttgatggctattcattttttggcacaagaattaaaaacaacatattcatcatcaacctgcgcctcgattgtagggcgaattgattgtattgacacacttgactgctggagttcccaaccatttgatatagtttgtgctttcagagatatgatcatggatcgtccatcctccttcacttggatcaccattttaagtataaataccgttaaaagacttcagttaccacttttcccccaattttaaactttcatctttagcgctttgagttttcattgcattcttggagagttagaattgaacctagagccaaaacaacctaaatcaaactagatcatgacgtccagttttgtatccaacttctgctaaggattaaggctcaaaaatttccgaattgtcaacccccagtgatcgagagttggacgctaaaagaagttgtgactctagatttcaatgtataaattgattcgttgatcaccatcgtccattgtcttcacaaaaggtgtgctcaatttcctcaaccgaacccaacaatgactagcttggctccttctgttccattatcaggtacgtatcagttgatttttttgtattttgactgtggtttttggattttctgctatatattgtacttgcatgttctgttatgaatgaaattaggattctctgattgtacgatttatactgttggtagatttaggcattgtaagttgtattgcctttaggtttccacgttaggaatttttgggatcagccattttgtaaaaaagtgttggcaaaattttcctgtgctcaaaatccttctggttttgggtattttattgatttctattccattcctcttcttcgatgttcctgagtttctgtctggaacgaatgttccctaattttttttttgtttctagatagtaagtctagtaggaacctctcattgaagttcatgggagaggactttcttactccctttctatattaggtagtttgggtagctgaatgcttggtcttccttcttttttacaaaaaacaatgtctaagagcatcccacaagaagaggttaaagttgaagaggaggttctagagtagggggatgctccaaaactagttcttaatgatagtctatgggagatggactaatacgtcaataaatttaggatatataataacttaaggaagtacgagacccagcgagggctcagaagtgttttgggattgtactagaacaggcttccgttcatggagagaggccacgtaaatgcgtatgggggttttggcatctagacctgggcccatgtggaaatgggcggacaccttccgttgaggtgttacttcgccaacttctgtgccatagccaaagtcccaccgttccagtttattcctcaggtatattgccttttatttgggtggtatgtcttttatgcctagcacaataaatatgcaccaacgctggaggagatcttgtacttctacaagattaagtcccagcccattaggggccacaaggaaaaggttggcttctataggctggaacatcattccaagagtgtagcttgccccattagtttgacgaagtacacacacgacttctgggattactggttctacacttttggcttcccactgtagagagtccctacactcaacctgaatttcaatacaacaaataggtgtttcttcttttcataggtttcacttctcgttttcttccctttgttatattctaatgtacattctgtgtcttcaagattgccttccccaatcacctcagacttcagagctaaaggagagaataattttctacaattccttatcatccaaggaattgttggtg

SEQ ID NO: 70705 - DNA, 2758 bp, Cannabis sativa
caccaagtcatccaccatctctcattcctatagttcccaccacagtcctaccatcatccatccaacagaccacttccctcacagattccttacccagcagtccatcagttcttcctcacaccactgctgccagtatccctgtccaaccatcactgcatgtttccaaccctcccatccaccagaacactacctcaaacacaactcccagtgtcactacaacatccacacaccctatgcaaactcgactcaggtctggtataagaaaacctaaagccttatctgctgtgtgtgagcccaaaacagtcaaagcagccctacttgaaccccattggaataatgccatgaatacagaacatgttgctctcaagaaaaacaaaacgtgggttgttgttccaagacctgctaatcgagttcccatcggttgcaagtggatattcagggtgaaactcaacaaggatggatcactaaacaggtacaaagctcgtcttgtggcaaaaggttttcaccaaaaggccggttttgatttctctgaaactttcagccctgttgtgaaggctgtcaccattcgggtagttctaacaatagccataacaaaaggttggacaatacgacagctagacatcaacaatgcatttctcaatggagacttgcatgaagaaatctatatggaacaaccacctggatttgttgatcctgaacaccccgactatgtatgtaaactcaacaaagcattatatggtctcaaacaagcacctcgtgcttggtttgagaagctttcaaatgtgctaattcaacatggatttcagttttccaagtctgaccagtccctgtttgtgaagagttctccaacaagctgcacctatatccttgtttatgtggacgacatactagtcatgggaagtgatgacacacttgtaaatcaactcattgctgaactcaatagcacatttgctcttaaagatcttggtcttgtcgattacttcttgggcattcaagtaactcggacatctgaaggtattcttttatcacaaaccaagtaccttcaagagcttcttaccaaggctgaaatgcaaaatgtcaatacacaaaacacaccaatgaacagtggccttaaactctccaattatggaagtgaaccggttcaagatgtgactttataccgatccattgttggggcactgcagtatgccactgtgactcgacccgatctagctttctgtgttaacaaggtgtgtcaatatatgcatcagcctctcctatctcattggacagcagtgaaaagaatcttacgatatgtggctggcactttggattatggtctcttactcaaacctgtaaaggatttttcccttgaagtgttctgtgatgccgattgggcatctgatccagacgatcggcgatcgacaacaggttattgcgtttatctagggggaaacttggtcacttggaaatcacaaaaacaagtcaccattagcagatcatccactgaagctgagttcagaagccttgcaagtgctgtctcagaggtgacttggctacagtcccttcttcacgaattgcacattcgatgtccttcacctccttcgatctggtgcgacaatcaaagcacggttctcttagctgccaatcctgtgctacatgcccgaacgaagcatattgaaattgacttgtattttgttcgagataaggtgctactcaatcaaattcaagtcaagcatgtccctgcacaggctcaaattgctgattgtctcaccaagcccatctccagctcgcgcttctctgatctaagaagcaaactgtgtgtcgattctaaatccacactcagtttgaggggggctgtcaaggacactgttacataggctcattgtgccaactgtcctaacggttttactgttagttgttgtattaattctgttacagagttgttatgttggttattcagtctttggttatttccttctgtatatatactctctgtatctcattttcaacatatgcaataatacaactctgtcttctctctctcgttctctcgttctctctctctttgtaaattgacaatatataatcaaatatttctgatctgtatgtttttttaattagtatgttttgttagagtggtggaattaaactaattataggattagagaattggctcaggctgacttgacttgactatgcgcgttggttaattattttttgttatttttatgaagaatgatttatgcttaattatgttaattgtgaatgtttttcagttattaagatataacttaacccaaatgtgatcaagtgttgtcgtttcgatacatataatatacatatatatatatagtactgtaaaattggagagattgaattgcgtcgtttcatttgcatattaatttgtgaatgcaagaaccacgctttatagctaattaattaccaattatattatatatctttattatattttgtaactaaaatcatgtatatcatttcctcttcacaaaaaaaaacatatgatgacaattgaagctacaacaattatataatgtgtattattagttttatgttataaattattaatttaaaaattggtggcaagctcaacctacctaacccagtttaatttagcatgtatttttctaaaaggcaaacattagtagatcttttttatttattcttgaaatataatgaattgatatataattatagtagatgattcatgaaataaacatggcacacagcccttttacttctaattttactagatgta

SEQ ID NO: 70706 - DNA, 1276 bp, Cannabis sativa
ggagattacacagaaggttatgatatttcaagaatacactatttctttaaagtattttttcggatggagaaggagagaatacagaaaaatgtagtatctcttggggaccactacctatttatagactcattatataatgagttttgggtatttataatttagtccatcaacaaattataaattaacttatgatatctacacattatttctataataatttaatacccttttaatacttataatataattagtcacttaattgaatcaccatttataatagcatatacattatacatatgtgtccacaataaaatttttaatctaatataagtatgcattcagttcactttataattattttgtgaaacactagtgtgactcgttataaatttaaattttgagtgacagttttgatatttttgtaatttattttgaaatagtaacataaaccaaacatccaaggtgagagcatactccaatttaataattagattgatcgaacggttattaaatatcattaaaaattaaaatatataattaaatttacagtaagtaagaaatatatagtattgcaccatattgtggatattgtcccacattaaataaatggtaaagtattgagtcatatataagaacatgaactactctactcataaacaattaattttgagatagaatcatataattctcaacacaccaaaataagcttgtaagaccaccaattcaaactgcacttctaaaagagaagccaaaaccaatctctatccgtatgagtaatttttatatttaaaaaaaaactcttaattctattacaaatatcttgttcaatatttttaattacatacaagaatcttattgatcccataatgttttatttcacattctctaaatatgatacacaatagctaccaaacctatcaacaaaatttatcttcttaacattgttatttgttaaacctttatcgtaacacccaaactatctaagcaacatttcacaatcgttatagttatagttgtaatgcttgtatttgaaaacttactaaagaaaaattaattttataatattataattatataaccatggggtcgggatcccgaattttaaaacacagttaaaattacatttactaatacagaaactcttagtaataatttttttttcttacaaacgacaaacaactgtaaaatacaactcaaaatgttgaaagaccgaaaccctccaggctgcactgtcgcgatatgtacaatcactgccaagctccaactcactgctcct

SEQ ID NO: 70707 - DNA, 1401 bp, Cannabis sativa
taaattgtaaattttaatggtagttattatgaaacttcttttgtcttattattttttatatatatatatatgttactatttattatttaattaaattcattatttttaatttgattttgttaaaattatttgtatatcaacccctacaatagtaatatcataagaacaaagggaagagattcgtgtgcatggtgaaatcagtaaatgggttgagagtggaaaaaaaaatgtactttgctgtgtaaaagaaaatcgagggggtcattgtggctcccatgccaatcgcacataatcactctttcttaagctattttgtagttgagtttctctctaattgattgcatttggtataaataggttgggaaatttgattgcattttctataattaaccctttacataatttatagaatagtttaaatgtatttgtagtgttatatatgtacatataaatattctttgaagttgtgaaaaaacccactcatagtaaatgtgggagtatttataaattattttttaattcacaaattataattatttcatttacgtaagtaaatacttgatgcctaaattctcttcttgagtaataaacgcatcttcagtaacatcaccaaagccagaaaatgcatctattagagattggtcttcaattccatatgaaagacctacaaatgccaagttcaaaagaataaggatcaaaccaaacaaaatagaataaacccaccatatataacaatgttaaagttgtgtattgtctcatgtcatatatatatgctcatagaaaatcgcatcaagtggaatttacaaagccactcttcattgaaagagttagtaacttagtattgttcaattatgatggaatgctggaatcatttccagaggaatggcttcttccaccaactttaacatatctagcaatcgaattttttgaaaacctagaagctttaaatggaaaaggctttcaacaactaacatctcttcaaaacttgagtctttttggcttacaaaaactagagtgcttaccggaaggactgccccacacacttacttcggtgtccataggtggttatcctttgcccaaaactaaatgcgtgcctaatctgaagatagaatatatacttagacctcgctacatgcatggtaaaattcttaattttattctttcttttaagtactttgttaaagcctacattttgatcataattttcatattttcagttgtatttggattcttggacaagcaatttatggctccccaaggagatttgattaaatgggaggatgtcaactttttcattggtgaaaaggtgttgagatgtgaaaaggtctgtccaatccatacttgtcattgattgatttcttttttcttaatgtaaaaattaagtaccaatctttagcatta

SEQ ID NO: 70708 - DNA, 845 bp, Cannabis sativa
gtctccttctgctttagcctcattcatggatcaggccaccatttggtccaaggttccatactatgggtgtgcacaccagaagattcctttttaaattgaaaaatgccatgacaatttgagaaagagtactgaaaataaagagtttgaaacttattggaagttggaagaacacaataatatatatctatatgcagtgaactatagaatacgacatatataattgaaaaaagtttaaacttgcaagaataaattaatagaaaattaatacatgttctgcattacgagaatctggattaatgctgaggcatcgttcataagcattgacaaccatagaaatatagctttaaatctttagagagcagttatagataaacaaagagaacaattaaataaaatttacagcaaatgaagaaactgggtaggataaaaattgaagcgcccatgttaggataacaataatttagcttccacacaacaatagttattctcaatcaagcagtgtatttacaagaaattgggtctctaacgaggacacctataccgaggacatgtcattattatttgtattttcgcactagcgggaaaattcgcggttattgttggtgttaagtctctgtaccgaggacatttttaattccttttacctttcagctgctttgtcttccccaaacttacataatctaaaatcgccatttcagaccagaaaatccaaaattggagatcgtccacctccctccccggcgttttcttcgttctccagcgtctctctcacctccgtcggcttggtgctcaaagttacaaagtaagtttatcaatatctatatataactgattttttttttttt

SEQ ID NO: 70709 - DNA, 3370 bp, Cannabis sativa
aatgagaacaatatttgttgcattgacccctttgtgcataatacctgtgatgaagaaatctgagactgcttcacaaaaatccacacccacagtctccaagtagtgcttgaagaagataacggacatcccatccggtcccggggccttgtggttactcatagcaaaaagagtctgacgaatttcatcatgagaaggccctcttactagctctgcttgatcatcagcagacaatctatccctaatgaaaacatcaaaatttagctcctgctcatgatccgatccagaaaaaattccttgaaagaactctaggaattccttgccaatcaactcccgactggaaatccaaacattatctttatttaaaatacattctatagcattccgtctccctctgattgcagccgagaggaagaagaatttcgaatatctatccccttcctttagccaggaaatcctggtccgctgcttccagtacagatctttccgagcataggcctcattaagagctcgctaaatatcgcactcagcatcccagtctcttgatcccactgtcaatccctggatggcattgagtttaccttccagatctttaattaagctatcaactttaccaaactgggatctactcaatgcaagagagcaacccgagttgcaccaatcttcttgaaaactctagcgggagcccaaggataacacaccgatttccaggcgctatcaaccaccagcttgctcctctcatcccgggtccagctatcttcaaacttgaagcttcttttgaatttttcccccatgccatcagtaaagagacatagcggcctatggtcagaattgcatgtctgagaggagcacaaaacagccttagggaataagctgagacatgctccattaaataaacctttatcaagagcagacttgacatgattctcccttgctctatggttgtcccacgtaagcttgtctccattaataggcatgttaatgagccccctcgagttaaccaaatttgcgatgaacgggataaaggggtctctaccctttgaaccaactctttccgactcactcagaacaaagttagtatcacccagaatgagccacggaccccgaaacctatctccaaatttcatgaactcagcccaaaacgatctcttggcattacaatacggagggccataaacacaagagagaagccaagggttggtcggagggtccgaatatacaagaccagtaatatggttttgggagcaagcaatacattcaaactcaaaccctaacttccaagccaaaatgattccccccacattaccaacagctggaattagaatatgaaaataaaagtgaagtgaattgagtgtacgtaccagaggagtggcattgactttaagttcagtcaggaaaagaaagtccggtgagcgagaccggattagggacttcagctcccgaactgtagaggtctgccctaaccctctacagttccaagcaatacctctcatggctcctgtggaggagatataacattctcctccacaggggtatgaaagcaggccgacgctgaaaagctagcatcgtcaatggaaaaagtgccaaccatctgaagatcaactacatcatctctgccatttggactcccctcactcgggttaacagagcacccgatagaggtggaatggttatagaagggttcatctgacgccactttggaaacccaaccatggttacatttatcccaaggaaaatcacgaatgattcccgggtggtggcgaagtaacttgagaggtctcacgcaaaacgaagtagatgcaccctcaaaaattcctttcatgagaggggtggatctctcatttgtttcagaattgggtttgaccccaatgtcaccaccaaacttttttatctcatataaatccaagctaccaaattgtttagactcttgcaacaaagactcttggcattggaaaaaattggacaaggctaagacttcatcaagaaggaggtcggcctttttcccacaagcagagctatcccttgaaataatagccacaaatttatccttctttaacaaattttgtctaacattcataaacggcccattagactgcaaggagcccaaaccaattatcttagacacacgactctctatataaggcccactgaccaaactcttaaaacgtggcccaattaaagaagagaagttagggataggatgagcatcaacattacccattagatgctttaaagatttcggcccactatccccaaccttcaacagcccactggcccaaccaaggagcccgagttgactaagtcaaacaaatcaaccaccccctctctatccacaccacacggctccccataaaaatttgaaataggctctaaatgaggaaaaatggcaaactcctttctcaccaccagcatcttagattgagaaacatcacaaaaagaggaattaacgttcctctccgcctctgccacctttgggcgccacacccgacgaatcgtcccgttagcttttctcatagctggcagagatcgtctagggatcgaggaccgaggaatggcgaacggaagatcactcggaggcagcgctttcaacgcctgatcggaatcctcaatcccttccttctccccatgagcttccacatccaccataaccttcccagaatccccaatcctacccgagaaacaactcaggtaagaggaggaaaagaaaacatcaaccagtacactcactggaagtctcggagagaaaatgtcttctgtgtgaaaaatagcatcaaacatcccacctaacatcctgtacatagcagggtgtctagcatcttcaataatggggaagacattagtcctctttttggccaagttaaccaaatctctaccacttttgtgtgaaaactcatgagaaactgtggtcccagaagcagctccaagatatagaacattagctccatgtttaatccaaatcgcatcaacaccaccaagaataacaacaaccaacttagatcggaaagggttccaaatcctgtaaacaaacttaatcccatcttctttctgaacagagactctcttttcattgtacacagcctcacctggaaacatatttatagtaacaagagcatcttccttacccttggcaatgaacacaacatcatgtctatgaggctcaaccacaactttactaccacctttccttccaccaggtcctccatgaccacgggttggtcctcctcttcctcttccacggccaccatcacgtcctcctctggaacacccaactaagtctatatacattaactctctctctaactctctctctctctctctctctctaactctctcgcatcaaaggaagtcggtttcttcaaaatatatacgctag

SEQ ID NO: 70710 - DNA, 2318 bp, Cannabis sativa
aatcctcgttcatttcatggtgctcatttgagtttactattttgctaattctcctttatatgcttccaggcctcttaaggtgatgttgaaactactcacaagattttaagggggcaaaaaagaaagaattttacacccactaccaaaatctaccatcccaacatcatatactttaacattatattttaaaaatcttataaaatgtctttattcttttttaattataactgtattgtttccttttattatgtttaatattaaatatttaatatttttttaatgatattatttatttaactaagtatatgtaacatctcacctaataattgataatattttttagatatacataataataatcacacttaatagctaatgatattttttttcaatcattaattgtatcacttttaaataaagtagaaaataactaacataaaatttaatatatatagatatatagatacatagatatagattgtttaaataaatgaggagagtgcaactgcagaaatatttctaacgactgaataagtttaaactctacaataattatagttcaggacataaattctatttattcttaataataaaactgaataagctatatatctgtcaatttagtatataattactatattacccatcacattattggagttgctgagaagtcaaattaaaactgggacttacacacatatttaagtgtgttgtcggtcagtttgggcgacttgttacattgtcctccacataaatagcaccatcatttttataattataatatcactcttatatataatttcaatttcaaatccataaatatagattgtttcttctcagattattgttggtgtattcgatggttttgtatgaatttaatctcacagctactccatcaatatcaactcgtcaaagtattatcagaaacaatgttgtaagaaagtaagaccactaatctcaattaaattaattaactttcttagttatatatattgttctgataataattcttgaattttttaaatatatatttgcaggtttctttaattttttgatatcatctctaatgaaatgtaatataaagctagcttcactacgatttttcatttaatagcatgctacaattaatatgaactcaaaattagtcttataatatatagattttttagacctctatatatagtctgaatccaaatctaatagctcatagaatttaatttctggcatcaattacaattgtcttttaggccaaaatgaatctgcatatagcacttattttctccatattaatctgagaaattcttatatatttttctactaattaatttacgttatagtgaacgcaaaaaacctcattttatatataatatatagtgatcactgaactagaacttaataccagtccaatatgtgtcctgtaaatatgtctcctcaacttaaatgctttccaaaatttcaatttatatataaaaaaaaaagtagaacataataattttacgactaattttttaaaattaaataattaaataaactggtcttcatgcagttggccaacatataatgatattaatatatataagaacacgactaactgtaatttttttttgtgaaattagtcaattgtgccggcttacaattaatagttacagataacctaattaatagtaatctatattaagttaactatcagtaaaataattattcatccaacagccaaagatatttaactattttatatacactcattaattacattaacatttcattcaagctctctatatatatataaaaatatatattaggtgaagaatcttaacatttattttgggcagattaataatagatatagttggaggtctaatttgcagcagctgatatattcacaaaaaggtaattatatataacaactcatttatacaattattccaatgtcacaatacatatatatgtcaatatatgtatatatgaattctaatgatggcgcttatatgtatgtatgtatatatatatatatatctttgatatgtattataaatctatgcaatattgacatatgtatgtacacacttcgcttctaactgtagtattcatgttaactgatattctttgctgtgtttttattttaattttcttctttagaagaaaaaaatactatatgtatattacaatataacaaagaactctgtttaattaatgttggaaataaattattaagattttttggaagcaagaactctctgctctagttacagttatatataatattagagttcattacacaattaattaattaaaagattagtgaagatggccaagaa

SEQ ID NO: 70711 - DNA, 2145 bp, Cannabis sativa
tctctctctctctctccctctcaagttccatttccgacatcgaaagccccccaccgaagccctaagttcttctagcaccacctcttctcccatctctctcgcatcaaaaccccagaagccacaaaccttcaaaagcacagactcccagtggttctttcgtgtcatcaccgtcgatgactcaccaaactagaaccttaaaggttgagaaccattgacccttgtctgttgtcgccaccattgagaagaggaaccaaaggacaacgatctgtagtaatttttttatttatttttacaactattagtttctcgataataatcgcaaaaacatagaaaaactatccaaaaatcatcgtgaacatgaaatcctatcgataatttgaaataattaatagctaacttcgaagttaacttctatcaaacacttgtcgaaaacctatcgaaaaatcacccaaaatgtctgtaaaacaatgtcgagaaaccatcgagaatgatcaatcgagaaattgttgataaactattgtgaaactatcgaaatatgtcatccctgacttttagaaagcccatctaggaatatcgtcgagaatcaatcgaaaaagcatcgagaaactatcgaaaaaatggccaaacggtagaaagatatgtcactctccatgcatgctcaaaagtcactcgacatgcatgctcaaattcactcggcatgcatgctcaaagtcactcgaaatgcatgctcaaagtcgctcggccatgcatgctcaatgtcatttggcaatgcattctcaatgtcactcggccatgcatgcttaatgtcacttggccatgcatgctcaatgtcacttggcacacatcttccaaatgtcactcggcatgcatcttccaaatatcattcgacatgcatctcccaaatgtcactcggcaagcatgtccctcaactcactcggtaagcaccattccacaactcacttggcaacatcatcccacaactcactcggcaccatgctccctcactcactgagcatgcatcgtgcccaatcactcactcgacatgcatattttcgagtcacttggcatacactttgtgcaggctaatcgacatgcatgcctctctcatgggaagctcctggatcattgggttgagtttctttattaccattgtatcttggattttgggggccccttttgtctactggaacattcttgtgttcccaggttgatcatcctgggattcgtaagatttccatggttattacccttaggagtttccccatgccttatggtcctcgaacctctaggtcttccccgaggtctcctaatggatgtgtctggttggttaagaggtgcgtcgctgtgtgcaacccttacagccgcagcctcgtgctccaactcaacattccttagatttaattcagccagtcgctgtcgaagttgtctatttttaaattccactaatggaatgtatcgaatgggatcataagcatcctcactacgcctttctaggattccacccccagattgttcgatctccaccatttcctccccctgagcgaggagtctcagtcgtatttgtcctgtgggaattctgatgctccttccctggacgttaagttgtttcacttggttgatatcttcgcttagaggagtatcatttgccatggatggaaggttcaaaacagtttcaaggagggtatttttctgagttttttcttacaaggctctcaatgaaagcaccaaactgttaacgcacattttcgttaaccaataaataagcctttttgtaataaatgaactctagaattaaataatagcaataataataataataataataataataaatggcaagaaagttttaatatggttttgaagttaattcttcatagtccacgagttcattttattttgagatttaataaattgtatatataatacaagaaaatattgatataatatctccttttttctcaaattggccgtctcttgttccctgagttctttccttatttataggagtttagggtgacagttattcccttagggcctgtttggtacgcaggattggactggattggactagaaatgattgaatggactggacaagattggattatgctgaaagtaatcctatgtttggtttaagaatggactgga

SEQ ID NO: 70712 - DNA, 729 bp, Cannabis sativa
  modified_base (52)..(54): a, c, t, g, unknown or other
atacaagtcaataccaaacatattattgtattaaataatactaatacaaaannnaaatggatataaaattataagtttagatataaaattaaaattctaaaaaaacgagtcgaattagatccgatctgatccgaataagtcaggtcagatttgatctgatcagagtatctaatctagcggggtgggacagatcattacatgaactaaatcaggttggatcatagctgaattagatctgactcaatttatttacagtcctaaacttaaccaaaaaccttcttttattgaaaatatcctagctacaattgtgttgaatggccttctgagaattaaagctccagctcccaaacacacactatgctcatcacgagcaacaacatccacactcgatacttccctattgttcgaacaaccttcatcaacgttgatcttagttgaaccagcaagagggggacgccacttaatccattgctgctcagagttcctccttgtagaattttcctctacaaagttgaaccagaatttttggcatcactgaatcagctcacatggtttgggttcatattcacccactttaaccttgttttgaatgtgccatatctttcaataaatgacagaaaacatttaaaatcctcctactggtcactgaccgaatatggctaatattgaaatagttgttgtagaaaataaaaggaacaaatttattgaataaaatctaagttgagtcac

SEQ ID NO: 70713 - DNA, 774 bp, Cannabis sativa
cccactttttaaattttgcattgaaatcataaaataattaattaatgatcaagcaattataagcattaaacacgaatgaaatagattcacataagaaactagaagaaaactataattgtattaaatcataaagtatcaaacaatattcattaaaaaccctaattaggagtttagctcctaattgtatttctaaacaattgtataaaactagttgaaaatataaaatcaaagataaaagaaagaaactttttgaagatcaatagatgtaacctccaaggttgcttcttctctctatttttgtcctcccaaaagtcccaatcaaaagcctctgactatttttttgtagtaaacaaaagctacaacttgtgacatgtcaaattcttttgatattttacccttccaacaaggtaaaatatcgacaaaatcattgaggatggacggtacttcgttcattatatcaaaatcattattgagcaagcatttaatttactcaaattttagttaaccacttcaagtcttcaacagtgtcttgctcttcatttttaggctcgatctattctatgtattcaactaaagacgtttttccattattcaaatcaaacaactctcataaacttcattatttgagttactgtccttataacattccaaattatacgccactacattatcacatagagatcttatcatgtctgtcaagtgattaataatttttctgcaagtgattgttcgtattcctattcttcaagtggttgggggaagaaacataataac

SEQ ID NO: 70714 - DNA, 631 bp, Cannabis sativa
gcgtgggtgggtgtcgagtcgactagtcactggtgtgggtgagtcgacggtgacgacaagtcaactggtatagtggtactggtttaagagtgtatacaaattcacatttaatttcaaagagaattgactcaatactgggaagagaatacgaatatatttactatttactacatatagataataatatattaattattagggccctatcacagtatctaaaaatttgtgaaaataaattagtaattacttattattaatttaggggtgcacaccacatttattactaataggcttagcttctctatcaaatgctgaagaataggaatagtccgtagactttttctggaaatgatattaattattaaattagtaattaagtattaatttcttattaaaaaaaattataatttcgggttacgggttataacccgacaaaaaaaaaagcaaataatcaaacccgaacccgaaacccgtttggcgtctttttcgagttgaacccgacccgacaacacgggtttttcggtgatcgttttttttggcgacgggtcggggcgggtagtcggatttttcgggtttacgggtctaaatgtgcacccctagagagctttggtctggtcgtagatcgtacgac

SEQ ID NO: 70715 - DNA, 2098 bp, Cannabis sativa
actctgggcttcctaaaatgcatcaactctgaatgtgttatccatgtcatggtaagggaactttgatccttccttgtgcatcgctctatgttatttatgaaatataagtttacgaaaggagctttagcccctccttaagcagcactcactcctgtttattacattcttcaccctaacaatgtgcgctgaatgttttgtattttataaatttgatatgagttgttggaatttttgaatgtcaatgtaggaggtatcattcatggtttcttttctctttgacttctgcataggattcttggagatgagtagttactagaggttgatcatagagtattgatggtggaatgtatggatacatttccatgattcggggtgaccttttgttttcttctttaaccattgaccgtaatgctttgcattatttgatccagtatctcgcataagttatttccacaggcaatatctaacttcttaacttgggtttgtttatttttcttaccctcattgtatgcctcttacaacactatttcttgcaagaggtaagcttgaataagaaatgttgtcatctcgaacctcaagcaagatgtaaggttaagatacgaaggctttgtgagatgccccataagagatgcatgctgatgggacatatgttgttgagatgcatgttgtcgagatgcatgcgatatgatgcatgtttttcgaaacacatgatgtagagatagatattttcgggacacatgtgatcgggatgaatgctgatgaaacgattgctggcgagacacctactactgggatgcatgccgttaagagagattctggcatgatgcatgatgccaagacacatgctttagggaagatctcggccaagatgctatagggaaaaccttggtcttgttatgggtgtgatagcgggtagctagttagaaacaatctcgcagatatagcggaatcctctactaatcaaccctccaccggtacaagtaaacctgctccacggtcaaggaccaaattcgtgggggtttattttgaggcgagtcgtatcgcttcttcttttgaaagcatattccaagttagagatgtccttagagctcacgagctcaacttggtgtgggacggctatgcagagccctgactcccaccaaacgtaactattgtcctcctcatgaaagcatgtttgcgtcggacatttccttatttatggtggggggtgcactcccactattcttttattattgggaaatccttggagcctttgggatggcttccttccagctatcttccaatagctatcggatcttggctgggcttaagtccctttatcacatactagagcttggagacccaacacccgtggaagtgttgtacatctaccagtcaagggccagtccaacttggagggttaaacccgacgatggattctactacctgagctatttgactactctaataattcttgatggtctccctaacaagctgcataactaaaaaaaaatgagttcttctgggtatggagcacatttgacaggggcacccacgacttcaagcacataggtaatacacgttgcactttagcttcattcaattattgttgttgattatatttctctttgtaagtgttgacttgcctttttttctttttaggggccattcccatccaactgtcggattggttgaacgagagggtgagtcttatccaaagcattgacaaatgtaagaaaaatcttcactttctcctccatgacgaccacctcagggtgtgcggtctattacaagatacggggatgaccgcagatgttgcccttcagaaagtcttatttaaatgatatttactctctatatgcgcagcaattactataaattaatagttgggcatggtatacatattttaattgtagtatatataattttgttagcattgtatatacattttgagtattaatttactaattttacttttgttaaaagaaattgggggtatataattttattactaagattattaatttcttttgctacaacatatcaaatatttttatatatacaatatatatttaataatatagtatatttatttattgtaattataataaattaatat

SEQ ID NO: 70716 - DNA, 678 bp, Cannabis sativa
tatatatagagttgaagatggaaaaaaatacagaatgttttcaactgtgatgtgacatactaaaactttattaaaagggaatgatttttatatgaaattttgatcaaattattgttttcttttctaaaaattctcatgaaatttcaatcaaaagcaagataaaatactgatgagcacatgggatttacttctccacttagccaaaacatatctgcattatttaaatttgtaaacacacagtgaacaacagaacaacaaaagcaaagagtaaaaagaaattattgttgatacatgattttacatacaaagtaaaaaagaaacttcttacatttctacagaaatcaataaaccaaaattaaaaagaagaaaaatgagggagagaggcaaaaagattttttcttaattgttgaagaggatatatatagtcaataaaagatgaacagatatgctagccgaaaatgcaatattttgtggtataaatctaaaagttagagcccacaacaaacccatgaatacctcttacatgtggcccaactaccggacgatccttgatttttttttggatgtactacaattttgaggaaattacactctataccctttttatattgtcttcttttatttttatcctcttttttaaagtctatcatttttatctcttttttttaaacattgtac

SEQ ID NO: 70717 - DNA, 1096 bp, Cannabis sativa
tgtttgttttgttgtatatacgtttcttttctttctttcttcttttttttttaattttttatttttggataaactaaattcaatattcttaaaatttttgttgtatatacgagcaatcctttgtcagcaatcagtaaccttgttgctccaacaaatcagatttgtttacatcctcagccatgtcatggaggacagtatatggtcacgcaactgcagccaatgcaagcagaccatagaatatcagctgattctggtttctatggtcagcaaatggctggttattgtggccacggtcagcagcaagggtcacaataccttgaacagcgactttatggtctctctgttagagataatgggatacacaactcatgcccggtatctacttcatcatatgtgccacctagcaagtctttcaagccagaagataaactgttcgacgatcttgttgacatagccaaatttaagtcttccgttactaaatccccatccagcagagctggtagcatgtgacatcgttaatggttttgcactgtttctgtgttttaaatactctgaaatttctcttctacttttcattatttggtaatcttccaatccacatgctaccctgtttcggcacaaaattgtgctgtaaagaaaacatgagaaaaagggtaatgattgtagttcgacatttggattatatatatatactttattttttaaaaactaaattgagcttgtttgctgctcttgtataatggttttcaaatagtcatatagtataatggttttcttgtggttgtattaggtctttgactctttgttgggcatattttgtatctgtaaggctgtttgaactgaattgagcttgtttgctggtattgtggctaataatcttacagagcaagcacattccttattgtgaaaaaggaaaatggtggctgcaatggttgaacacatttcatccaaatcatgggcattcagtttcaggtacttgtcacaaaactcagttttgttaagctctcgtgtattctgttccgaaagcagggcaacctcaagcaacgaggttgagactgtttatggcagtataaatacttgaaaatatgtgttttaa

SEQ ID NO: 70718 - DNA, 1382 bp, Cannabis sativa
  modified_base (1295)..(1300): a, c, t, g, unknown or other
ttttaggcaatacttattttgtgtttttattagtaaggacatagcatgttgtaaagtactttaactttgttataataaaattaaattgtattttctaacctttaattttattataatataattaaaataatttctattcaaattaattctttattttcataattaatttataattattattcactactaaaaattcatatataataattaaaatatataaaaaataatattcaaaaactaataaattaaaaaagaaaaaacttacgtcttcgattattatgtaataagcaaagacaaaaatgagctacatctccagttattacataataactagagacataggtctcccgccccacacgattttaaaatctactccacctatgtgtttggttattttgtaaaaactaaagacataggccccttttacgtcttcaatcttttcgaaacctacgtcttcgcctgaaacgacttcaacattgaatattctttaaaatcgaagataaactgggataaatattgaagataaaggtcatattttctagtagtgtcatgctaaacgttatactaaatttaacgtaagatataacattgtgccaaatttagcatgcaataaatgtatcttttttaattacaattttatcattaattattaatgataaactttaacatatatttttttttaattacaatattttcataagctattttttaaaatatataatttattgttgatcattagtaatggtttaatttttgtcataatttatattttaaaatactattatgtaatagagcacaatatgtagcaaatataacatttatttatttagttgtgtatcaaatttagcacaatatttaaatcttgtatttaaaataatcttacttctaatggcacgtttactacccagtatttagaattagaataaattaatagagaaatgtaacgaaataaattaatagagaaatgtaacggaataaataaaaataactggaatcaatatttattatatgctgtttagtaaaagttcttagaaatagaataatagtgatttatcttgtttactttattaggaaacgtaattagaatatttaaattgactaaattattattttgagttaaactatagtatatagtagttattttgtaagacatgtttaaaggataaaattgtcattataagtttaatgttaaaaaataaaataaaaattaataatatcttgagttattacataataactaaagacataggtttccctccccgcacgattttaaaatctactccacctatgtgttnnnnnnttttgtaaaaactaaagacataggccccctttatgccttcagtcttttcggaacctacgtcttcgcctcaaacgacttcaac

SEQ ID NO: 70719 - DNA, 1181 bp, Cannabis sativa
gagtcccaaagcaacgggccaaactcgttaaataggcagttctcatatcctggtgatttgagtgcagcaggcatgggttcctcttctagttcttgtaggtttgagagaacgcgaagctatcatgatgatgtatatcatcggaactacaactcatcgggagggcactacgaggctgcgagggaattcattccacaggctggtcctttaccatacgtaaatgggcagattgacgggttgattccaaaccagtggcagatgcctccggcgtctgatatgtcattagttgtaatgaggaatgcagaatctgaaggctacccttactataatccagactattcaaatttggcttgcggcgtgaatggttatccaatgttccggccttcaaatgggcattaaaggtaaagcaaatgatggagtttggccaccactgtgaattagtaggcggatggaagggccattgtccattgtaataatgtactagaaaagaaggaaacgaaaaactgttggtccctttagatttggagtgaggttgtaagctttttctttttttaagaaaacattttgtaaagtgtttcttcttttgttacccagccattttctcgagtcgctagaaaatgaggcattttatttgtttgttcttaatgggggttttgggcttataataaaaatggttgaaaacgggcatcttacgaaacctatagccacttgttctcttcttcctctttaattgctctgctatagctaaactggtctcaatcatcctccaacactagattaacacaaatgaagtgtgctaagaccattttatttccttattttcttgaacggcacgataattacatttaaaatgtagctcaaaatggtaaaatgatttttttttatcttctcaatattaagacgatactttgcaatttaggggtgttcatctaatttaatgcaaaagtatggattagatcggttattttttaacattaaattatttaatacatattttttttcttcacataaacataattaacaataacataaaataaattattgttgttttaagtcttcaacaataaattacaataaatcaaataacaaataataaattcaaatgaagaatattaaaaattataggaaaatttgcggcaaaagtcttcaaaaagttcagtttgatatagataagtttccaatct

SEQ ID NO: 70720 - DNA, 2010 bp, Cannabis sativa
agaggtatgtttcaaataaatataaaattagagataaatttaattaattgattaataaaagaggtatttttcaacttaccccttaattattttagatatggcacaaacgctagtggcccatgatccacgtacatccattcatcattgatggactcacggactcaatcaagcccatcctttcgaaaatcttataccaccctatccgatgtattaataaaaacaaattgcgttctccctcctccaaaaacaattaacaagagattatttattacacgatatattaaaatttttaattttttttattgcaggaattttttttaaaaaaatattgtgtaagttttatactatatactatattaaatttttactattgttctacaattgtcttattaaattttcactattgttctacaattgtcttttagttgttccactattgttttaattattatgttttattgtttcccagtactttataaaaaaaaaaacaataattttacccaaaatctaatatttttgtaaaaataccttattttatagagtgcttgtataatacactcttataaaatgggtgcactgatgtatttagaagaatttttcattctaattttttttatagtcgtgtatattatagttatttaagatatcatatcatgtaaaattttaaaaaatgtaaaataattaacaatacagaaagcagtgtttatattttatttcacacgtaaaacataaaagagtcatgcatgtaatatactatttgaatcctattttggtgtgttaaatttttttgaatttctaaaaattttacaagatgttttaattaactataatgtacacaatcatgaaaaaaattagactaaaaaattctctcaaataccgaaatagacagagctatatcggtacaccccttttaggcgtgccccttttaggagtacattataaaatgttcttattttataaatatacaaaaatgaaaaaaaaaaattacattttaatagatctattgtttttttgtttttattacatttttgagaatttattttattatttttataaaaaatatggagtgtttttttttttgttatttttaaaataacgttgttttgacgttattgctatgatttttctattattcttctgtcatttttttttccaaatataccaagtattttttataatttttttcaaaataatattgttttcgtgttgctattatcagaaagtaacataaaagtaattttatttttctgaaaagataaacaagtaaaaatttgtaaaaagatagatcaattcgtgaaaatgtaaataataaaaagtatataaaagtataaaaaaaattataattttaagtgtacaaacttaacaaattcagaagaaaaaaaataaaaatttctaattttaagtgtttggtgtaaatttctctacaaacttaacaaattaaaaagaaaaaataaaaaaaaataaaaataaaaaaaattgatgccatagacaagagccacctactcaggtaatggttacttctctaacctatgcattcccctttatttttcacatggaaattatgtttgtcactattaataacttactaaaaccaaataaaaaacaagtggtttttctataaaagttggttagtttagtccatatgaaaattgaaagttgcagtttgatttacaattctgagatcatcatttataatgcatacattaatttaggataattttttttaattttagtgtgataactctaatgtttaataccaaatattatactatatatcccactaaataaatatgttttacttataagatctttcattttatattatttaggtttataattaaaaatagttaatttgtgatatgattatatcaagactaatggtaagaattcaaaatcataaaataatatttatttaattaatgtggtatataatttgatgtgtattattaaaattaaatagtatgaagattctaattcaatttggttaaaataattcaccattagagatgc

SEQ ID NO: 70721 - DNA, 1653 bp, Cannabis sativa
acaaggtcgccaaatagagagaggtcctccttatggttcgctagagcatatgtgatggttttgcaatcggtttcgacttggtgaattggaaagttctcttcgatgcaccaatgaagcgaaaagagtaaaaactttgcttcaatggtagctacgtccccatcgccggtgtgaggggaagcaatagcatcaaccacttcccatcactattgcatatgactcccccaaaaccttttgtagatcgggtcttcgagacgttcgtattcaacttgaaaagctcttgagcaagggatccaggtagtaacaacagaagggcttgcaccaataagggggaccttgtgagcagctactggagatttatattccaccaagaagtttcccgctaaatccaatatggcatgagtctgatctggagaatggttcttaattttcttgttcctattgtgccaaataaccaagcaacacaaagaaagaattatacttcttctttgcttaaattaatataaataatataaacaatataatggaaagaaacaatatttgaaaaaaatataaaggtgaaaaattgtaccttccaaattttttgtactctcttgcaaaagaacagggcatgagtaacagattcagtggcatgaccacaatgggaacacacggaggaatggataatcttcctatgagcaaaattcttgtttgtcggtaaggttgaggtggaagctctgtacgcaaaatgttttaatttggaaagtatgttaaggtgccagaggtatttccaccatttggaaggggaggaggatgagggaatgtcaaatggggaaatggtcgagaaactaaggtggtatagtatctagttttgaccgaatatgttccagattttgcgagtctccaaataaggctatcctcagtggaaaagacggggaggagaatggtgagaatgttttgaacaatacggagagggtaacactggttaaggcgactagtatcccaggtcatgttatccaagatgaaagaggctacacgatttggaactgggttgtgtggggtgacgcgactatggcataggatccaaaaatcgtgtgtaggagaagtgttatgtccgttgtcaatttttgagataagagctttgtagcaactattttttccaacaaatgctacgacaaacaaaagagggagtgaccaagagagcaatttaaaaaagacatatttgggtgatatctggcaacaaatttttttgccacaatggagtttggatgatttaagatacgacaagcttgcttgccaagcaaaacttggttaaagtgaattaaggattggaatcaaggaccccttccctttttgacttgcaaagcttttgccaattttaccaatgggtcttagcacgatttttctcatgaaaccaaatatttgccatgatggattacaaagtatggcaagttgcaaccaaaaaacgtaaacaagccattgtataagtaggaatcgtcgaatttgagaaaaaaaattcccacctttcaaaaaaattattaaattaaattttataaaataccatacttaattctccaactactaatataacacattggatattagcattttttgaaaaatgggacaaggaacatctcacatgagtctatagtctataccatattcaattataccaaa

SEQ ID NO: 70722 - DNA, 1184 bp, Cannabis sativa
tactaatgatagtattattaacattggtcttacactgacattactgtgaaaaataaacgttattattaagaagttaataggtaatgtgagaattagctatatatgattaccgaaaatttatctatataaatcgatcactattaatccattcaaaccaaccagtgattaaaaatgccctattttagttgaatacaactttaataggacaggatcaactgatattttctatgctaataagtgtatattttcaataagctccaattcttgtaacttaatcatgacacttgattatgataattaaattactagatctgaactagagctatgaaattcggaaggcaatttgtaagagttgcagatatatatatatatatatatatatataaaaataaatattactctcttttcaattagaaatttctctcctataagaagccaattatgaaaacagtttatgaagaatttaaagaaagaaaaagaaacaaaaattatttttaaataatttatttatttatttttattttttaaaattaataatttgaaccaataaaattttaacacgtggcgattaacaaaaaaaagtaaataactcagttaaaattagaactaacggacaaataaaaagtatgacttgaatattattaccgttattttttaaggttaggaacttatatcaaattgaactttttgacgactttactacaaattttccttttatttttataattagattgaattggatcggtcgggtttatttgattgcattagatcggtccaatttaattggattaaatactaagtagttactactcaatattcttacacaacatatggtgaggacactattagactatagatgagtgctaatcacaatattttattataacttttagtcaatttttacgtccaaaattatatattaggatataatttttttttaattttttatggtgttatttattatagttataatattattcttttaaatttttaaaaaaatctgaataatttaccatatcaaaaactgttaatattccgtatgttgaaccaacttcaaatttatttttgacattataaattattttaatttttctaaaaagtttaagaaaacagtaacatataccttgactaagagattgagattgtaataagaaataatggtttgactaacaagcagccttaac

SEQ ID NO: 70723 - DNA, 2105 bp, Cannabis sativa
caatccaatggacagatcttgccccaacgaagatccatccaaggcagcgtatacatgaagctggcctataaatatcccaaaaaaggacaacggcgggaggaccttctttttcagatggaagacccattctccatcatcccaagaaaacacatgtctgtaacccttttattaactccaaaatattccgactaagcttcctcttcttcaggatgaacacggcgggaagaagtcttagtccattgtatctttatttgtataaacaatgatcgaccaaagagcctaataaaaggactcgtggactaaggatagttaacgcctaaaccacataaaaatctcttgtttgttatttcactatttattccattgttactttcttaagatctaaaaatatttagttgtcgaaaaactcaataaacattttggtgcttttgttgagagttgaagaaagaaatatgcacggtagttaccgacacaagcccgtcagaaagagaacccatgcgagaaaagaaggaagacctcctgatctcttactgagttccggtcgaaggccaaaaatgtgcagatcgaaggcgttgcccagagtaagatctgatgccttcatctgcaaaagaagaatacaaagtacgaacgcatgcggtcttagaacgtctgctgcacatatatctgcccttagaagctcagatctggccagccaactccctgtaagggtgactggccaccagtatctttagacatgtatctcttgtcgttcaccaagacgtaaccacacaaatacgacgaggtacaaggggtgttggagccagatgaagaagatatgacccgatgcagttatgacgaataactcatgaggggtcgtcagatgcaacgactctatctagctcgagactccggcaccggtgctggtgtgagtgctggatctgttgtccgacaactacttcccctgcctttgcactaggtggaaaagttgttcagaaattgatcctgtaatagcagcggctaagaggagaccatcaataccgtcgacgtctgctgggccaccagtcaggcctggttatggtactgttggttgaggcaagccatttttagcatagttcactcagaaggcttctgtttcttggtgtgactacaaccctggaattacatcagagaaagcaactcgagacattataaaccagttaggaaggtcatgttggtccactgcttatcctattgggagtccgagttttttccccaaaaaccattagaggccatgcacttcaccgaaggaaacagactgcccaggagatccttgggcgcatgcatgcaacccctaaagcttcccagagctcgagagatgcatgcacattgctttttgcgcgtgaaagatcattgggtgtgttgcacgtcttcaaccctccttctcggaagggaaggactgcttgaagtatgctttactctcactgactctttcaccctttgatcttttcaagtgaagtctaagcttgaatttttatacaacttcagccttccttcgcggaagtcggagcttgccacgtgaaaattcaataggactcttgcatgcacgctgtgtttttcgtgcaagaaagatcactgggggtatggcacgtcttcaactctcctcctcggaatggaaggactacttgaagtctgtcttactctccatgatgcttttttcctttgatcttttcaagcgaagcctaagcttgaatttttatgcaacttcagccttccttcgcggaagccaaagcttgcctcataaaaattcaacatgtctctcgcatgcacgatgtttttcgtgcaggaaagatcactgtgggtatggcacgtcttcaaccctccttctcggcatggaaggactacttgaagtctactttactccccgtgatcctttctccctttgatcttttcaagcgaagtctaagcttgaatttttatgcaacttcatccttcatttgcggaagccaaaacttacgtcataaaaatttaacaggactcttgcatacacgctattttttttgtgcaagaaaaatcactggggtatggcatgtcttcaaccctccttcctggaatggaaggactgcttgaagtctgtcttactctccatg

SEQ ID NO: 70724 - DNA, 1571 bp, Cannabis sativa
taattcttctagctctccttttccttctgctacattttgtacaagtaacactaatccggtttctaatgttactgcttcacatggaaatactctgagggatgttcatcctgaaaccacagcttctccccaatgtaatatgcttgctactcaaaatgaaagatcagttgccacgaatactactgctgccacaaatgctactgttgccaatgaacaaactcctattcctgctgtgcctgttgaaccaatttaacctatctctcaaccaaatatcagccaaacaacacaacaacctgagaactcaaacaatgctttacacacccaacactagtcaaatttgccacctgataatcacacagaactcatgccatgacaactcggtccctaaacggaataagcaagccaaaagtttattgtgctacaaaacatcctttacctgaagcattattgccaactgaacctaagtcagtaaaggaagccctcaaagatccaaaatggcatgcatcaatggcatcagaaaataaagctgttaagaaagctagaacttggactttagttctaagaactgatgatatgcaggtcattagtaacaagtggattttttgagttaaactcaatgcggatggatctcttgatcgatgtaagtctcgattagtggctagaggatacttacaacttccagggattgactatgaagaaacattctccccagttgtcaagcctgtaacagttcggactgtgctttcattggcagtttctaacaattggaaggttactcaacttgatgtgagtaatgcttttctaaatgggggactctaaatgaagtggtgtatatgcaacaacctcctgggtttgaagatgagaaacatccagattatgtgtgtttactacacaaggcaatatacggattaaaacaggcacctcgtgcttggaatgacaaattaaaatagagtttggagctgatggggtttaagtcttcacgagcagatacctccctattcatacatggttcaggacacaatttgattttgttacttgtatatgtcgatgacacattagttactggaccaaaccaggagctgatttccaaattggtcactaatctcaacactcaattctctcttaaggacttgggggaagtccattactttctcggggttgggagagtaagatctgaaactggaatgcatctatctcaatctaagtatattactgatatcctactcaaggttcatatgggaggtgctaaaccttgtcctaatccgagtaactctactttgaaattgagtttaaccgagggagaaccatttgaagatccaactttgtacagaagtactattggtgcactacaatatcttagttttaccatgcccgatgttgcattaattgtaaataaacggagtcaatttctcaaagcacccactgtggttcactgggaagcatgcaagaaacttctaagatatttgaaaggcactataagtgagggactcatccttaaaccagaaccaaatgcttcgattgaatgctattcagatgccgattgggcaagatatatagatgaccggaggagtaca

SEQ ID NO: 70725 - DNA, 1908 bp, Cannabis sativa
  modified_base (89)..(124): a, c, t, g, unknown or other
agaatttttttactaaaattagactaaagtccttaaatttaacaatctcaatagttcgaggggaatttttaatggccaaaaaagttcannnnnnnnnnnnnnnnnnnnnnnnnnnnnnnnnnnnaaaaattactaattagccaattatatctgattacaaaatcgatctaatttaattacaaaatttgtgtaaatctcaaaattcaattaaaaatcgttctaatttaattatatttatatatattagaaaattatttatatatagaaaaatatgaaaaaattaatacttagtttgggcgaaaataggggcaacaagtaatatggccaaaactaattacgaaccgacataaggagggctaatcactgaaattaattatatcaatggacattacagtaaaagtcagtaaatataattctataattactaacagttcaattccatatttatagtagagtaatcataaaattaataaacatgattatttagttgataagattcaataaataaatctagtttattggaccttagaattataggtcatgattctcggatcgccaccttgaaatactatcaagagtagagataaaagttgtatatggaagtttgaaaaaatttattttgatctgtcaaaatattaattatttgttttggaataaataattaaattttcaaatttattagttaaataaattagagaaaagataaaagttgtatggacaaaagacactaccaatatcttattaagacataggtgacgccactatcattgtgtcctaacacagtgataagtgcctattatatagtgttgttcccactgtatttatttttgggttacttaagtaattcaaaaaacaaatattaatataaatttgaatttaaaaagtagttatagatatttctattaattgagatatttagttgagagattctctcaattgattatattatttattcaaataattaaatataatttaataaatgatttgaatttaaataattaattaaataaaacttttattgatttttatttaaatataccgtataaaccaaaatctaacaaggtattatttttaggaaagcctaaaaaagattaactagttaatttttttttctctccataatcactctacaatagttcttgctcatgttttgagaaattaatattggtatacactttatcctacaagcccacactaatctttgtgtgtggtggaagattctaaagactacggtgtgagtacttcgagatcaaccaatgatacaacatacgaagagattcgaggatacccggataggctcttcaagaggtaaactttctttttgtctatttactttatagatataatatatagaataattctatagtatggactctagttttgtccctatagcatggagaccttttcttaacccttccttcacatgacttttgagtgtacataatatttaatgtgtactagtgtgtatcaaattaaacgttaatttttaaatatatagacacccaaaataaataaaaaaaaagttagattatttaatataaaattttagaatgacaaatatcagttctctctctctctctctctctctttctctctccttctttctttagcgattaccctaatccccaattttcatctctttctctctaatttctattgggaaatttgattttctatacttaaaaaacttaattttttttattcttaaaccaatacattttaaactacaaaaaatatgacacttttttcaaaacctcaaaaatacccatcccataactcaaaccctttctctctcctccctcaaactctctttgcatctatggccgtctgccccaaccctccacgcagccccccaaccatcatcacccacccacccaccgacttccccaaccctccacgcagcctccc

SEQ ID NO: 70726 - DNA, 3376 bp, Cannabis sativa
gtatttcatatagacaatctaacatagggctctcataataacaattcaaatatggtaagtttgtttatattttaacattggatagttgaggttgatttaatgttgattcttcacaaaataacctcatcaattcaataagagttggttaaattttttcttaacaatatcaaaacacatggttcctacatagttgccaatacgctgtttacgcattgtccaatagttgtcttaaaaatatcttataacaaaaaatttagggaacagaatttgtaatgcatttttcatataaagaaaaatttgttgtgttaagtttatttacattagcaaggggaggttattctttattttcaagttgttcaatagtttcctaatagaacatatatcatagaaatatttgttgttgagcttgtattatcaatgctctactgtgtttcagttgctttatagtttgctaatagttgacagtccatacttgtcatttcaaaattttaggaggcagaaccaattctatttttgatacagttcaatggaaatttcggtccggaatgaattatataaattatgaagccaaaagagaaatcctctcaagggattacaattatgaagaacttgtacataagttgaaacaagtattatatgcaaccaagaaaacacacaattgtaactgaaataccaagtaaaagaaggttactgtaatgccctactagattaggcacacaatcatcttttttaaattactatgctaaccttttctaatcaaaggggtttagtgaaaaacgtgattaacaaaaacattatcataaatataaactttaccaattatatagatataaaagtttacaaactccgggatcccatttcattttacaaacacatcaaacacattaaaccaaaagtgtcgcccaacgactaatataaatgagcccatgttgtctcgaagaacagatctccaggtctaaccatcttgatatatataatctttctaggtctccacactcatttcatttaagctccatcttttaactacacacgaaagtatatctatgagtcgatagattcagtaaaaaaaatataaaatataacatataactgaccagtaactagatgcccatacacctactcacaagtctaaaattgagtaagtgtacaacttgtttgtaccccccaaagcactaataacctctttaccatattcactcattacttgtaatgtactaatatttgtagggttagatcattatgcttgtaagtactactaatctctttactacattcacttagtaccctgaaggtacttgtgttggtaggattagtttgtgccctttgaaataaaactaacctctttaccatattcacttagtacctttaatgtactagtgttggtagatttagtttgtacttcctaaccgctttaacatattcacgcagtaccttaacgtactagtgttggtaaagttagttcgtacttcctacccactttaccatattcactcagtaccctaacgtattagtgttggtagggtaagtttgtacttcttatctgcgttgctgtattcactcagtaccttagtgtactcgtgttggtagggttagtttataatacatgcatgcaccatgtatatatatatgtgcatcctttgcactaatcttacatttactccgcaattaggtgtgccgatcaacctgagtagaatatgctgctgaacgactgaaggccctaagtcacatttacatgaaataggtaagtgtctcgcttaaatacttttaaggatataaacttaaaactataagtttttctatcaataaatagcacgttaataccgtaaatttcgacaatataagaaaatcaatgtaccctaaaaccaccccattcagtccaccaaatccccaaacggttcaccgtttattgggatcatgcaaaaccaaacagttaactcgaattttctcactcttttctactcgaaatataacaataccttctagaaaacctaattgcaccatcataaatataattcaacagaaaactgcatcatcaaagctcagaaaatagaaatgctagtagttaaaaatcatcaaaaataatcataataaacataattaatgctcccaaaatagtttctaaataacccaaacctcaatagaacaaacttcaccaaaatcacatatcaaaccatgctttaacttaaaatttaaaagagatatggatcctagggttacctttgatcttctcttgacaacacccttaacaaaacttttgtgaaatcaagcttgaaatgggtgaataggttttaaattatatgttctttgtggctgggttttcgctgagagatacgttagagagatgtttaatttttgatttataagaataactataattctttttattttattcctatctttattttagcttataacacttaagtccattactaataattccacaaagggagtaataaaattaaactttaaataaaaatatccaaaatgtcattatcttacagacttaatgcatagggaaaaataatcataaactattaccctgcacaactctaacattccaaatatccataaacatgccacgctaattctaaaatactttaccatagtacggtgatactaatggctaaatttttgtattccaccgttacctgatataaaatataaaaataatgtaattcatatataacatgtataaaatacctaaaaatcaataaaatttctataattaagaaattatttctacacctatttctgacaataggttccatttctacttaagcatgcgtaaacataattaatatttattaaactattaatccaccactaagttccatgtctaaatatgaggtcattacagttaccaactattgaggataaaggacgatgccatcctattctcttacatacaacttaaacttaaagaatccgacttcataatatgtatccattgtgtgtgaacatgatcataacacaacaactaacaacacctcattttttcaatgacaaagtcaatggttacagaagtcccaataacagtactaatgattagaaatggatcgagagaagaagaatcaactattcaacaaccaaccatggaaaaaatatataatgagtcaatatatcttgtacacaatcataagacattttattttttttattattatttttcaggattcttacagccaaaaatattttctttaatcataatgcgtttggagatatcatatttgacacattaatgcagagtttaaaatagtttgcttctacattatcttatattctgtattttcaagggttattgcacgaaaattgtatatagttgaatcacatatgatatatagcaacgtagtttgtatttgcgtattacgctataaag

SEQ ID NO: 70727 - DNA, 1004 bp, Cannabis sativa
acaataaaaatgtaaccattgaaacctcttccatatatatttatatatagaaaatataatttaaaataaactatatttttttatatacaatcattatttctcttttatagaatttgttatttttaatttatttattttaatttcgatattgttggagatataaaataataatattttgtttgttttattttgttgttactcatgtaaaaataatttttattttaataattattaaataatttaatatcttttttttttttgaaaatttaaataatttaatattaaaaaaagtaactaattcaaaataattaatattatacttactattgcgaatttgaattgattgaattagatttaaaatataaataccactcagtgcaaattaaatgtactataaataaaataatgcggattaaattgaataaatttttttttatttctgtcagcacaaatttagtgtatatataaatgtattttcttttgaaatcctcatggaaaattctagatcatcattttcttaattaaagaaaaaacacacacaatcatccaatgactctctttactgatatctttcaatcactgaaaagctctttttcattttattctcttggccactagaagccttgaaggtcatttgacattccaaagcttgacaaagagaaccttattgcttattcttattcttctgaggaagtgaccttataattagatgtgtcaatcttgtaaaatttctccaggggtatattttttatatatatttatttaagaaaatatcaataattaaagaatgtaatttagctgcattatgaagatatatcttacacgtttgacacttcctagcctattctcctatccaaatatatattagcactttaaaaagggaggtctttacagaattgagcaagactaatcttttgatacgatgagtacaaaattgaaaattatatgtagtttagtaaatgattggatattaacttaaataaaaggttattgcatttcccata

SEQ ID NO: 70728 - DNA, 1293 bp, Cannabis sativa
gttgcttcctcttacctgctgcttgagcttgagcttgagcctgagccgaagccgaatgagttgacgacggtttacacgaatagaaagcttctctgtcttttctctttcttgagggtccaggtgtcaacatccaacgagagttataattcatcctgtggccctcaaatcatgccatgccacgtcagaaacgaatgaatttggtgtgttgtcgttgtggcactcgaggagggtaaaaaagcgtcaaatcacttttctcattttcactcaagagggttaaatcagagaattcatgcacagtaacaaaatatcgcctgcctctgtctagactagtcccacaacgaacaggggcaaaatcgtaacattaaagatagacctttcgaaaatgaacaaaaaaaaaattagtattttaattgaaagataagaatgtatttgaatggtggggtgagattaggtctaagtcaagtggtgaaattaatcggatcgcgatgactgatgcggcggatctcgtcagtgagggaaaggcggagccgctgagattggcggagaacaaaaacagaaagagaaatggacgaaatggagaaagaaaaagaagatgtatttatagtgagagagagagagaaggggagagaaatgaatatgaaggagcagcgtggtgggtctttctctttatatcacatttttgttacatattaagttctctagtttggggaaatatcgataatgccattctcaactcaactgctaattacataattctccttatattattatttattagttattacaacagcttttattttagagttccaaacaaagaatctccttcaacgtttttgttcctaattgaaaattacattttccaaaattgtgttctgttagttagtttttttagatattatattataaaatatatcacacattttgggatacaaataaagtaataagctaaaaaattattggcaattggtattgtctttttgccaaacttgacaactttgacgatgattaatacattttttttgataaattcaattttaaaaagaaacacattattgataaatttcagcctttggagtttggatgttgaatctcttggccatgactgaattgaaagataatgaaacagaccaagaacaaaagagaaaaagattgaaagaaagttacaaagagaaaaagaaagagagtaaaggaagattgatgaagcaaagagcaatttcattcatttagtgttaatggtacacggttttatagtgacagagattagagctagaaatgaaagaattagttacaact

SEQ ID NO: 70729 - DNA, 827 bp, Cannabis sativa
ttgagaaatatttttgttctatttgttaaacgatcgttgaatatggtagttcaaaaatttgctataacttgtatgttatatcctgattgtagtttcagtttaaagtttgttccaactgaattgttaccgtgtttggtagcagaagtttatacttaataaaagtattttccatttaaaaaagtcacctaaattaaaaagaaaaaaatatatataatgaaaccaattatattataactaaataaatattaaccactaaaatcatctagtttagaataataaattgtggaagattgaagatgttgctttattagctaaactaaactttgaagaatgaagtaatgctcaaaagatgtatatggttaccaaccttgaatctcgtagggttgcagttgagcattggatgacaccaaatttttctaaaatcataggtgatttggctataggtgtgtggctcgaaattcagctggagtggttctggaaactaagtgaggaagcaaagatggcaatcttgaacctcatgtagttgaagcattgggcatcaaagagacttattaagttggatcaaggctcttggatggtcaatgtgatactcgaatcaaatagtcttattgtggttgaagatttgattaataataaaaacatggtatggctgtgcaatttcaaattgtaaggctattattaataatttctttgtattttgtcaaattaataaagtgacatatatttgcgcaatcttctcattataagtctaatcatatttatggttaaggacaatcttcctttctatgtttcatccttaattttgggtgatattatctaatgaagtg

SEQ ID NO: 70730 - DNA, 1375 bp, Cannabis sativa
ttaaaaaaaaaaaaaactaatataagtgtgctaactcactaattacttttcttaaatactattaatcatgtggacaatttttttatctttaaaatattttcaaattagttgatgtgttatatttagattgatttaatatactataacagaagctcttaattgatgtaaaaagtcaataaaaatattaaatttttattcaaaatatataaaaattatatttgactcaaaatgagttagttacattagactcaacttttacaataatatttcaaaagtaaaattactttttttataggaagatgcaaataaaaagtcaataaaactattaatttttcattaaaattatataaaaatcatattaattatataaataaaatgtaaaaatttattaattacatttggtatttatttatagtgtaaaacaagatgatgcaagagaaattgattgccatgaaaaaggcaatagaaaatgcgggcatccaaatggattccaccacagtcctgtccgtgtgggaagggactgatggagagcctactcaacctgaaagaggtcggaaacaaaatagtagggagcctagtcccattaggtatcctccagaaaagcctaccatgaagtgaaatcctacggccgtgcctgaaaaaaacaaaaaaacctatgatccacggaaagtttgtttcgatctcccaaaagggaaatgttcacagggggtagatttcccaaaaggaaaactagtccgtaagatcggggagattaaaggagcgtatccgtgcattaggagtcgggaaaataaaaaggctctgccaggaaagatccacatgttgatccaagacacaaactcaatgccaaacacggggacctgagcacgacttaaacaaataaagaaaactgcaccagtttctgagagtatccttaatgaaggaattttggccgaacttgcagttctccagaaggatatagcaagggtctcccaaaaacaaaagggagatgactcggagtcagattgcgaggatcgggagccctgcatgagaaatatactagagactgagctcccaaaaaacttcaaaatgcttgaaatgactatgtacactagtgacacagagctaagcgatcacttatccaggtttaatagagtcatgacaatcatgagggtcatcaatgacgctaaatgcctgtgtttcccattaacattaggaggatctgcagaggaatagttcaaaaatttagaacatggatctgtagattgctggaataaattgtaaactaactttaggaggcaatttgttgtagccagaaagataaactttgaagttagtgccttaactaacatcaagcaactactgatagaaaccttgaagaacttcatcaagaggttca

SEQ ID NO: 70731 - DNA, 1090 bp, Cannabis sativa
  modified_base (1030)..(1046): a, c, t, g, unknown or other
tagctaactttatattttgtttgttaatggtgtagatatggctaactcaagttcaggctcagattcagaccaatgctgaaaggccttaaaaactaccttaaaatcccaaatttgtagtagtgcaattaaaattagggttgagttgcgaattagggtcgctctctttataagaccttcgtaacacttgctaaaactgtgcaagtagactatcaacctcgtcatccccaggataaaacaaccctgtcgaaaacactgtattagagctttattgaacgataaagaaccttcaaaataccacactcaataatcatactactgctcagaatacatatataatataaaattgtatattattttctttgagaaaagaatgggatgtctttctcgtgttggttctgatgcactatacaggaacacacataataaagtaacgtgtaatatcctaagctttaatagctggattagcaactctaactagattaattatttattaattaggaaatatattattatataatttaatatgtgaaattattctagtttgttgcatacctcgttgctgtgttaggggtatttttgtaattttgactcgagaagggtaaaatcataattttttgatataatgtgtttatggattacataattatatagtatgtttcttttgtcattctgtaggtatattttgacaagtcggcgcggtatagtcacaaccaggtatgttggggtcgaactgggttcggggcccaaaatatatttttaggatttatttatagaatttatatgataaatgagaaaatttgatttattgtgatataggtgtgtgtgttgaaatgacatgtttgcccttgattagatgtgtatggttatatttggccctaggggcattttgataatttcaccacttaaattattatccaataaaaatatttttagaaaaattagaaaaccattttttttttgggtttgaacccctcttagctatgagttttggaaaattaacgttttcgagaaaatgggatggaaaaatgannnnnnnnnnnnnnnnnaaagtggggcccaatccaatacacatggccggccacttgtaatg

SEQ ID NO: 70732 - DNA, 855 bp, Cannabis sativa
  modified_base (602)..(602): a, c, t, g, unknown or other
tttttttttttttgacaatatgaagctgacatcagggaatggaaattgtgtggcatacctgctgaaactgatccattgaaatagggttgccatgaagggagaggttctgcagtgctttacagtccttcaaaatatttgttggtatctgttcaattagtattacaaatattaacacaagaaatatccaaacaaaaaattagtagaaatttttcaagaagttgactcagcaataagtgggaacatgtcagtattcacaggaatccgtaaggcagcaactaacaaacaaaacaataattttaagcatttcatgcctaaacatatacgaattatctttcgagttatttaccactatcaaattgcgtcttctaaagttttggttgttttaaactgaactattgttcagtctataatatgaaattctgctaaaaatttatcccatgtaactaacaaaatattgatgtggctgtgtgtgaatgacatatcaatatgtataatttaaaatttgaaaaatgtattctcttatgaacaatttataataaaattagtttatttttatttaataattgttaataaaaagaaagtaaataccattttagaccctntgttttgcaaaagttactaattagcccttctgttttgttaaatgataaaatggaccctatattttctaaaatagtaaaaataggactctaagctcaattttcaacaattttattttttaacattaccaactttaatttctaaaacaaacaaataaaaaaaatataatcaattttgtcataccatctcaagagcagattattaataagttttattttgactaaacatcagtttagggtcctatttgtacaattt

SEQ ID NO: 70733 - DNA, 1159 bp, Cannabis sativa
gtggtgtgctgtcaatacagtgtttgtgtggtcccaatataacagattattgttaggattttattgattgtgtaatgattaatttgttattcattgtaaaaaggtctaggtcattatttgtacggcacagaatcttttgtctataaatacaaagcagcagccaatgatttattgtgctgagatttatcccttttgtttctcctctgttatacctctatttccctgctctgttttctctgatttcaaactggtgtgatatctgtaagccaaaaaaatatggtggattggaatttaggaatattgagcaatggaactatggagctttgggaaaatatatgtgtgggatatagctaaaaaaagggataatttgtgggtcaaattatggattaattccgtgtacttaaaagaccgtgattggtggagctataatgctccacaatgggggcattggtattggaggaaaattggagaagtaaaaaaggagattaaaggcaaaatggattttgatgaattcatttcaactaagttcagcattcctaatctctgtctcaagctttggcctatttctcaacaaacttggaactctttcattttgaatcggtttagtgctcccaagcacaaatttatcacttggcatagcttgtaaaaaaagattataaaccagagataggcttgccaagtttggtatcatttctaatgatatttgtctgctgtgtaattctaaccaagaatctcatggtcatgtattctttggttgctttttccgtgcagaaatttgcaaaagtctattttgttgggcaggaattcagaccaagaaggaaaatttggaggattgtttgaagtgaataagagatgtcaacattaaaaattcaggcgaaaagtatacactgctattattaatgcagcagtttacaatatttgggaggttcgaaatttaattcttttggagtcaaaaatgtatgcacttgaggttgttgttaaaagaattatgagagatatttgtgatagattttctctttttaaaagagagaaaattagtatagtggatagagttttgtttaaaaaaattgaggattcttaactgatttgttcaggatgtatatgactcttgtattttggttcttatgcaatgtacttctcatttacaaaaaaaaaaaaa

SEQ ID NO: 70734 - DNA, 2623 bp, Cannabis sativa
  modified_base (91)..(113): a, c, t, g, unknown or other
  modified_base (2247)..(2247): a, c, t, g, unknown or other
attttatcctttctcaagaaacccaagtgtaaggccgttttattacgacccacaatatttggcaaacccaaatatgtgctatcatcacctnnnnnnnnnnnnnnnnnnnnnnnacacagatgttgcctcacctcgtttacaatattagtgcttaaaaatatagaggacttctgtagattgacttgttgtcctgaggccttctgaaaaatatttaacatttctatcatgttaatagcactatcctcagaggctttatagaatagataacagtcatcaacaaaaaaacatgtgagataacaaattttgtctaattattagttatatatatttaaaaaaaataaattaaatctatatcaatatctaaaagttaatttttattttattttattttattatatatatttgatttttttttttttgatgaataagaatcattgtattgctcaaacaaatctttataacttacatcacacttccatcatacttcttttagctctatatcaaacaattatacaacattctatctatttctaatttcagcctcatctaagctttacaaatggacattacatcaattatatttcagtaattacaatttttgcatgacagttagatcctcaaaagccattgtttgtcttcttctttgaacttggttgacagccccaaaatcttgagcttacattcctgctgtattctttgtgttgataacctttgtatgccacagtttttgatacaccagcccgacaagcattgttctcagaatgcttttcctagcagtcgataatgctcggctcttgctgatatttcttgctagctactgcatactagttttcctcgttccccactgcagccaagatttaatctccttcaggcatatcctgctatactgacattcaaagaataagtaactgcccaattctctctcttgtccacataataaacatgtcaagtctatgcttgtattatatttgattattttttaaaaatacttataatttttattttataattactttcaataacatatataattgaaaaaaattaaaaaagtattagatttaatatttcattcataattatgaaattattttttaaaaaaaaacatatatattctaaaaaaattattaaacccgcgcgaccgccatcctaatctatatatgtatatatatatatatatgaaagagagatatgaagagacgctctaaaatagctttattctaatttattctttttttccccttttttcacatttttaagtaattaaatattaaataatctaaaaataaaaataaaatttcattaatatcaattttttttaaaaaaaaattaattattattattattattataaaaatagtttgaaaaattaaacgtgaaacttatataaataatatacttaaaactctattatatataaatcatattactaaactctatttctaaataaatgtatagtattacaaaattaaacaattcataaactctctcaatatatatatatcaaactatttctattactttcataatttaatttactaccttaactttctttaattttatttatctaatattcttttcttaccgaattaaatagtaatataaatagttagaacataaagattagagtttgtagaatgtgaaagtctcttaatttggttaatttacgtgttaatgataacacaatactctcatgtatttattcaattataacttttttagttaaaaaaattattaactttttttatatttaaattttttatttaattattcatttttatattctaatatttttatacaatttctatattatatatagatgctattggatgttaattatgtggtgttggtgatattgtgattgttgaaagaaaaaaaagaaacatcaaagttaacaaattagtttatttgtttttttttttacttattattaagtttattactttttatacatactttagtcacaatgaagataactttaagaaaaaaattgggtgagatctgttagatatttatatgtataaaatgaaaaatatgtatgtgtatacaaaaatacggaataaacgaatatatacactatataacttaaggatcgaaacacctctagccattgattctttgagcttcattgccaacaagttttgatctgcaaaggaaattgactaccatgggtaatcgggctttctcgctctctcaactctctttagatagaattttgctgttatgaacataatgagtgaggagctcagngaccgacaccctatatttataggtgagatactctatcagtatctgcgctacattaattatcagaatattttgacaattaattcaggaaatcaaatcgggtaataaatatagaaatctgaccatatatagaatgttaagtaattaatcttgtacaaattcactgaatataagatattcatttatcacaaaatcaattatttattttattttcttaaatagaattatatttcctaataaataaatattcttatattctcccacttggtcagtatttagactaaaacatttaaacccaatatttctcattatataataaacatactcaccgtagcgacatgtcctcattatgagtcgagtattatcttccatctattac

SEQ ID NO: 70735 - DNA, 1141 bp, Cannabis sativa
cataatatagatgattagataccaaataaaaaagaaaaaggaactttttaaaaggctagaaaaattagtataataatttaaagacaatacttcatgtctcccaaaatcatttagcttattttataaagtgattagggaacatagattattttataatgcactttgtaaaatgatatatttgatacttttttttcaaaataatttatgtctagaatcaaaggaaggtatttagagccaggggtgtcgaaaattattttgtgaaagtttaacgaaataatttcaataaatatatacacactactaattaatttgctaaacaccctctccttcttcttcttattattataagagagaagcttgcttaaacttatgtcaacaataaataaatgcatgaattttagactagcattgccggcccatctattcattaaattcaatatttttatgtgtaattcacatgttaatgttctttgataataattattattattgttttgttttttaaatgaaattattattattgttgttgatatctcattattcaaataacttagattggaccaaagtgctttccacttgcttatcttttttagaaaaggtccaccaacaacatgtacatattaataattcatagtcttaatcaatagcttagataagatagaagaaccatagaatagaagtgtgtatatattatatataaatttgtagtcaattttttctagtcaaataggatggatgaagagcttaaaattcttaggactcaaatttttatttcttttttgccaaacatctcttcatccttctccctccacgcctctcagtcctttctcttccatctatcaaacatagtgcaaaagataaaaatagtacataactaattataatgtagctttaatacattaaaattatgcatgctacatataattgagacaagtaccttccaaataacaattaagataatacatactaataataataataattaagaagatctttagcttagatttaaatcttatttgcaaatcttttaacgtgtaagtgcttgccaacaaaattggccaacacccaccaatgaccaactttttattatttaatattatttttttacttttaattagtggcatactgctatactaatgtc

SEQ ID NO: 70736 - DNA, 1183 bp, Cannabis sativa
atctgcaggaacatctctcttagcaatgggcttattttttgggatagactccaaggccccccaagctaaggcattgccatgggggccttggcttggtcctgacccacgaaagacctgtcaacagacagagtaggttcaccttcgacaaacatggctacaccggcgagggggtcttggtttaaatccatagctatgaagggaaaagaaaatccttttgaaatgaaaaatgggtacgatgatggagtttctttcgtgcacactatcctgctatacgccacgtgaacagttctagccctaacctaagcaagaaccttcttgccctaaacgtgaaatgaaaagaaattcagatagggagttagtgcacttacttgtcaaattaaaaggataagtggtgtgcccaagaagcctgcttaaaatttttagagtcagtcgatgcaacggtcacagttaacctaaaaatcaaatgttccccctgaagaaggaattcgctggtcgaattgaagaggagcaatgtttgggaagagttctgtgcgaatgatgagtaaacgctagatcagatcctataatgcttcttgcatgcaaaagatggcagaaaaagaaaaagagaagttacagagaaaatgtgaagttttgaataaaaaataataaaaaataacaccgccaaagacagtttttatttcaaaaagaagaaaggactatgagagatcaacggttcaaagtgtttgcagtaaatccaacggctagggagatgagaggtcccatatgattggtttggggcccaccaaaatgtcaaggtccctttctgcacgtcacccagtcgccagttgcgctccaccttttttttgctaaactcaccttaccacatacgaaaaggggccaaaaaaaaatgcctcctggcatgttgcgtggttaccacgcaagaggaagcaaatgccgtttatatccttaatagaatacagctcatgtggaggtgtgtccgcgacctaaatctgcagcacatgtcaaaagtcaacaccggtaacagtagcaagcttctgtgatccaagggatctcaaaagtttggggtaaatgttgtccaagttttcatcaatcagacaggtgtcataatcaactaggaggatacggtcgatgtacgagctattcgaggcaatcaacataaaggatgactcccagacctagaagg

SEQ ID NO: 70737 - DNA, 980 bp, Cannabis sativa
tgagatttttggtatttaattaataaagatattggggaatcaaaaaacacatatgccctcatagacatatacatatgtgtgtaacacattacacatacactaccaaaacaagttcataaattttaagccttggtgaatgtaccagggctgcgactattttaagctttgagaaaagcaacaaactcaacacccaaaatacaatactaatctgactcaaagtgttatgcaatagtttctaagcccagaagagaatgtaacgctcacataaaacatagtagttatcttcatgctctaattaacacagaatcaataaattacccatattcatacttgaatttcattttctgaccaagagccataacaaatccaaggtcaagttttgaagtctatattttacagtaaacaacaagttttgaagtcaccatagcgatttaccatcttaagaattccatcaccatcatcatcaattctagaaaactatatatgagctcaaactctaaaattctaattcagaaattaaaggagagagcatgattcatacttcaattttctttacaatctcaattgaattaaccaaaacccaaccaaaattagctccaacataaagaaatttgggttcaatttgataaaaaaaaatgaagaaaatacaaagatatatatacatatatatatatataaaatttgggctgatggttatgatcacttaataaaatgtggtcaaataaccattttaccttccattaatataaatcaatatagatagagactaaaaatcattctcattataacacaaccacataaatataatcacacatatttataaataaccataacacataatttcacctatttggaccccaaatccaatttgtgccacagtattttacaaaaatactgtcacacggtattttttacaaatatattgtcctggacttttttttatttcttttatactgtgtataccccaagacacatacaaa

SEQ ID NO: 70738 - DNA, 1363 bp, Cannabis sativa
ttttgtgtgtgggtttttatcttagtagctttacagaaccaatttttttgtcttaagtttttaactagttgataaatatagccgatttttttatattatatttgatttattatgtgttattgtttgtgtttatttattttgttatggaactaattcttttcaaatttatgcttcaatattttttgaaattgatttccattttttttaaaaaaaaaaattataatcaaaactttatgagatattatgttacagaactggttatatttcaattataaccgttttttgttattagtttttattcataccggttatatttttaattatatctgagacatctacttgtggtgacttttctagtgacttttctggcgactgtgacttttctggcaacggtgattttttcagcatcactaacttttctggtaactttttcgacatcggtgaatttttcaatttttccggcaaaacttattgttgttttataaatatgggatttccacttttttttttttacaaaaatatggcataaataaacccatataaaaaaaaaacaacctataatgttgtttttttatgtcataaaaaaaaaactataccctcattttccatatttatgaaaattctccaacatccaaatatatataaaagatattgaaaagcacaaaaaagtgctgctttaagcgttggcaatcagcgcctaaatatataggtttacttggcaagaaaattttgagaataaatgtaggtgtaccttggaagataaatgttcctctggacatagtctgactgtctcgatcagggaagaagccttgcactccgcgaatcccatgctgaccttgtgcaatgtatggttcacacttcagaatggagggttgtgatgttgctgaggacgacttctcaggcagccattggtaggagattaagtggtcatgctgactccgcctcaactcttcctcccgaaccactgtctccattgtagttctcttccttttatttgtcatgtcgttgttaaaatcactcttcatacctattacacatgaacatctacaacaaattcaactaagaaaatagcaagaccagaaaacagaacaaccaaccagtccagagatcaataagttattgacaataactgaattgcagtcacagtcaaggccggttttgagttgaaataggcgcaaaaaaaaatttgaaccctttaaatggtattttcaaaaattataaaaaatatgtatattttttaaaatatattttttttattaggttcctaaaatgtgttgatcctaagcgcgggcctaacccgcttatgcctaaggctggctgcataacaaaaaagtatagctagctaataacattagatcttaaa

SEQ ID NO: 70739 - DNA, 1238 bp, Cannabis sativa
gccatcaacaatgagcatggagtttagaataatatcaaggatgttaataatgctttccttgattactataaaaaaatgccttgctcaaagatgagtagaaagaatgtccttgctagtgtgattagagaaaatttgattcttcatgaagatcaaatcaagtttttctctagtccttacacaaaaaaagttaaagaggtattgttctccattcctgataataaagcccctagtccagaatcccgatggcctcactaatggtttcttcaaaaagaattgggaaattgtgggtgaagatgtcattattgcggttcattttgctcttaattctggtaagattcgcgagatcaatgccactactcttactcttatccccaagagtacttgcccatatagtgttaatgactttagacccattgcttgttgcaatgtagtttacaagactatcacgtgttatgtgctagattaaaaagagtgattcctgatattattacaaataactaaggtggcttaatttgtgcatggtaggtatattggtcatactatacttatttgtcaagacttggttaaattttatagtaggaaatgaaactctccttcttctatgatcaaaatggaacataaaaaagcttatgatatagtggattgtaattttatccatgagatgttagaagctttacattttcttaactctttcatatcgatgattatggagtgtctctacccccaagttctccttactcatcaatggcgctcttaatggttatttccatcaaaagacatcttcgtcaagaaaatctcatttcttccctccggtttgtaataggtatgaaatatctttttagattgatggctaaagttgctaagaaggataatttcaacttccatctaagatgtagaagtataaatcttaaccatctttattttgctgttttctaaaggagattcaatctgtgatgctcttgtttaggacttttagcgcttctctgaaacttctagtttacaaaataatcctagcaagacttcaatttattgttcgggtatgtcttatttggatagctcgagttttactcttagctcccttcctttaaaatatacgagcatttctatttgtgctaagcgtatttctaagtctgattgatggatgtgttttgattaagttattaatattggacaaaataatttgaccaaaacccaaaaccaacactcatctttataaacattgatatatatatatatat

SEQ ID NO: 70740 - DNA, 1047 bp, Cannabis sativa
  modified_base (871)..(871): a, c, t, g, unknown or other
aactggaataaaaatgtaaaaaaagggccaaatttagtatctagtgtaaaaatctctataatatatatatatatacatattaaatatgtgtaatatattaaagtgtgtatgataaaaatattataatcattttataacatatgagagttatttattattacgagtaacttttacaattatcactaatattaagagtataaaatgtattatacatcataatttaaaaattttaaaaattattagaattatagctgtttgagaatgagttttatacttattttttaagttaaaatttcaaatagtaatatcatatacactaattaaagagatctaaaatattcatattgaaataaaaaaatttatcaaaaaagtactttgttaaaaaatcttaaggcttgataatttccaaaactatttactagacaacagtgcttagagatatgagaaaataagattttgaacaaatgtgatactacatgttcacaagtcatggtaatctccattaatttatactcaaagttgtgagtgattgtatatatatatatattattctcttattatatatatgtgttatataatatattttgtgcatctttttttttttttttacatttttatttgtatatatatatacataatatatagtgtatataattgtaatatctatttaatcaatttttcaataaaatctctaacacaatattctattgttattattatatgaattatataaactagttgattaagtcttatagagctagcttagtggtgagggagggatgggaaaaagggagaggtcatgtcatgggttcgaacctaggaccttgaaactattaaatggttgtaaaataccattacgctacactcaaanaaaaaaaaaaaaaaaagtcttatagagctatcaaaaaacatatgtatatgaatatagatgagtatcactatatatatttcttttatattaaatagggatattggcggctaaaccacctaaactttacggtttgtaacacttaaccaccaaaactgaatttttggcggctaaactac

SEQ ID NO: 70741 - DNA, 748 bp, Cannabis sativa
gcatcttgctaactttgaggagttgtgcaagaaatttaagatgaatagggttagcgatgatgcaattcggttaaggctcttcccattctccttgagggatcaagcaaagagttagttggtttctttaccatctaactccatcaacacttaggaggaattggccttaaaatttttctctaagttctttcctcctgctaaggtttccaaattgagatctgagatcaataactttatccaacaagataatgagtctctttatgaagcctgagaaagattcaaagacatgatcagaaagtgtcctcattacaggatagaaaagtggatacaaattcacaacttttataatgggttgactagtaccaaccctacactcattgatgctgcttttggtggagcctttatgaagaaaagtgctaatgaggcttatgagctattagtgagatggtcatgaataactaacagtggccaagtgagagaagtcaatcaaagaaacaagttggttttgcatgaaaatgatgttattactgttggaatatattttaccaggacctagatttagtaacaagtatgtttttaacatcctaaatatgaatctctaaaacgatgaaatttaaacacatataaagtatgagataccttacattggttgcagcgaaataaaatgactcattccgctcagatctttaacccttgttcctttctgtcgcagagtatactgagtctgacactccttcaattgtttggattc

SEQ ID NO: 70742 - DNA, 2624 bp, Cannabis sativa
  modified_base (37)..(64): a, c, t, g, unknown or other
  modified_base (2202)..(2204): a, c, t, g, unknown or other
  modified_base (2391)..(2406): a, c, t, g, unknown or other
ctttatatgtatttaatttatcgttttagaaaattcnnnnnnnnnnnnnnnnnnnnnnnnnnnntgagtagatctaagattttggtaaaataaatattccaacacatttgtcaacccgaataacatcgccaggaactcataatgaccataccttgtctgaaagcccgtctttgaaatgtcgttctcccgaattctcagctgatgataactagaatgtaagtcaatcttaaagaatacagtcttaccctggagttgatcaaaaaaatcatcaatcctcggaaatggatacttattcttgatcctcaacttattcagttcccggtaatcaatacacatccgaagagatccatcttttattttcacaaacaaaactggagctccctagggcgatacactaggttgggtaaaccctaaatccagcatcttctgaagttatatttttagctccttaagttatgctagagccatcttgtatggtgccttagaaacaggttctaccccaggtgccagatcaattatgaaatttatctcttgccgtggtggcaatcctcgtaactcttcaaaaaatacatcaagaaactctcttacaaccttgacatctttaagcccaaatgtttcaggtctgttggggtcaatgacaactgctaaaaatcctacacatccactgtgtaataaatccttagccttttaactgaaatagtcgggatccgagaaccttgaacatatccaacataaataaatggatcttcaccctctgcctggaaagttaccatcttttgtttacagtcaattctggttgaataattggatataaaatccatccctagtataatatcaacaactattagttccaactgtactaggtcaacacttaactccctattttcaatcctaactggcatagacgtaatcaaccttttggagataaccaattctctgccagatagtagggttataaaccctttcttaataaaatcacaaggtctacccaattggttaattactcttgacgccaaatataatgtgtaaccccagagtcaaacagtacagtaaaatatgagtcattgacaagaagttgatctgttaccccaaaagggttggctgcaacaacagcttgaataatggcaaacaccccagcaggtgtttgagggtagtctttcttaaaatgtccaaccatgccacactagaagcatgtattttgattgaactctctagaatgatgtttcttacaacgagggcactcagggtaagaataaccctggcgtctagctctaccttagttccctcagaaccttttgtttcgttctgaaccaccagatgttgagaaagtcttcctcttctgatcagtagtagaatcaccaccatccctaccatatcctgaagtaggaagaataaccctggcgtccacctctaccttagttccctcagaaccttttattctgtctcaaaccacaagatgttaagaaattcttcctcttctgatcagtagtagaatcaccaccatccctgccatatccgaagtaggaagagtggtggtcccatcaacacttggagtctctcgcggctcctgaagaaatgtcacggcaccctcagctcgaagagccttcaaaaccattacagcataggttgatgtatcacttgtagtaattaccagatcatgatttatctttgcatttaaacccaccaagtatttctctttcttgctgaagtccgtgggtactatagccgaagctaacttggaaaattggttgaacttcgttttgtataccgttattgacatactttctccctgaaccaattcagtgaactctttcttcttagcactgccgaccgccttattataatatttaacattaaaaagttcccaaaattcttcctaggtcatagcagtgatgtctcaggtgagggatactaactcccaccacatgagtgcgtcttattggaactaaaaggtggtgcaagtcactcgatcattctcaacaacacccataaaaattccagattctttctattacggtgagccactgctcggccttcgtgacatctgggcctcccaaaaatactagaagcgccttgtaacgccctaaataattaggcacgctacccaagatacttatgaaaccctaatcctctaatcgagattactaataaaattagcacgaaaattaaactttaatcataaacggaatgaaaataaaactnnnaataatttaaactttacaatctaaatgttacagaaattgggatcccaaaaacatttacaaaatattattacaagtctcttttccttcagcccacctaagcggcaaaaacgagtctcaaaaacacatcactggtagaccccaacccgcttggtctagtatggcccggacatgtacattcttcgtccannnnnnnnnnnnnnnnctgatcagcaatagtcttaccctttcctgcatagtagagcacccgtgagcgaagcccagcgagatagtataaagcatatcaataatatgcccatcatataatataaacaacgatgccattcaaatttgcctgtgtgacacagacctgcatgttgcgctcacatgcttatttatgtctacgtggcgtagacctacgtgtttctctcacacgtctattta

SEQ ID NO: 70743 - DNA, 1143 bp, Cannabis sativa
tcttgataaaaacaaacataacattcttagttagcagcggttagagattttattattacaataataaaaaaaaaaatcaagatactattattctattgcagtataaaatacaaagatcaacaaataaattaaataaatattactacatcagtattttttacactctatataagaaaatatattgccatttaagaaattaaatacatggccattcgggagttagtcatgtgtctaatggacccgcaataaaagagaaatgattcatatcaacttccagatcataaaagtgtttgggaggcatattggtatgcaggagcaaataatagccctaaaagagttctcaaaactaaattcatagtctcagcctccgggaggatgatgaccttccagagcctcaaacatctatagatcatttctactcctgataaatttcccaaggcaaagcactgtagatgactccttccgtgcaggcatcaaaatggattaggacataaaaaaaagatgtctttgagatatatattttttttggatgaagtttttaagatttaacccttatttttctgatattatgttttcccataaactcttattgtactgtcccatcaaccgcaaatacgtctagtcttgtctcaccaaactcctactttagatcatacttgatacaatcataactagaaatcatttcttatacctaggaagagactagggagagcctagggggaaagggacgatgcactcgtaaccctgatatgcttccccattctggcctataaataggggaagaatgtaagagataaaatatggggtcaagaaaaaattaattcaaacagagccaactctataacagaaagaaagactcgattgtaataacaatattacacccataaattcaagttactcatggactaagattaattaacacctgaaccacataaaaatatccttctagacacataattaatttctcaaaataagattaaatagttaccgaaaatctcaggcaacattatggtactttcattgagtgttgtacaaagctttcaccagaaattctttcgttgcgatggtggtcaccagaaacaaagaacaatgcatgccatctaatcctgaagagtgtctagaggaagaagtagcctctcgtgt

SEQ ID NO: 70744 - DNA, 1349 bp, Cannabis sativa
gtaaaataaattccaacattttgaatcccgtctgcctggtgcttgtttggttctcaggtcttttgacccgtgttcgtgcgactgggaattctcgtggcctccatggccaccgtggccatggtggctcctcagagctataggccacggtgagcacatgttggtggccgatcctccccattgaaccctacttaaaatatatgtatatatatgtatatatatttggatgtatatatgtatatatataatatagtgaatatacaatgtatatacactataaattattatataattttttaatataaataattaattattattttggatatttatttaattttgaattcaaataaatattatagttataaatttaaaattaaaattcaagttaataactctattaattattttatgttaaataataaatttttttattattttttaataattaaggcaaaataatataattttgtgggatatttattttttcaaattcatatttgaattaaataaatataagttgattttagatttaaaattcaaattcaaatctataaccataataagacaaagattgtcttaaccctaattaaaataataaatggtagacaaaactaatttgataataaagttatcttaatacatgttttaaataaattactttaattaatttaaaggttttaaaagatgtcataaataaaaggtttatttaagaataattaattaaaattattttaattaattttgaggcttacgatgatcctataaaattacaaaaatgcccttgcaacgattgagtttagttttgtaatattttttttaattttttaaaggttgaaaaattaaaaatacctaattattacccggttcatcatcattatttatttattattttttaaataaaatttcattaatagttaattaataacatgatcatgcattagtgaataacatgccatatataaaaatcccacatagttttattatcatgcatctaatagtagaaatatgatatattaggattgtcctatgtgtttaccgtttttgaaactgaaagcatgtaaattgactaagattaatttagaattaatttggtaatttaaaattaccctattatttaaaatagttttaatttatgaattaaagagttaatttatatttaataattattatgggaaacttatttataatttgaggcttttattataaataaattaataataattattaaaatagttaatatgtattagttccgtgaattaataaaataaatacattaacttaaaatagagagtgggagaaggagtacatgtcaatgtaacatacgtcctccattattggtcaacactgaa

SEQ ID NO: 70745 - DNA, 1203 bp, Cannabis sativa
  modified_base (796)..(796): a, c, t, g, unknown or other
attaatgaaatgtgatatttttatttttttacaataatgattagacttagtatttctattcttgagtaagaaaatctctgtaccaaacagcccctcaagcctgtaaatatagtgtagtattacataaatattacattctaactaacaccaagttattatgtattgagattatataatttgctacaaataacgttttcttttttcctttctttttttttttttgaaataggaaatcttcattattgaaaagaaaacttacaaaggaaatggcatgtctttggagaatctttctttggttgctctaaactcatagatgaatcccttacaccaatatccaccaaggcctttggaaatcccatgttctactgaattcccaatgaaccacatcaagcaccttagacaccctttgattgatttacagagtcttgttgtctataatttcactactatttgatgaccaaagggcagcaccacaatgcatgaattatgtcttctttagttccattaattttcactcttgaaaatttaattaagtgtgatcaagaaatataccatctctaccaatatatgatcaaatatagtatagtattttgatatttaataaacaaaaacgatgtacactaatattgaagcaaacgagaggaaataaattagatcaattagtattagcctctagtcaaataaattactaatgaatccttaaaaaaaatattacattatcaaatctcaaccaaataatacatttggaatgccaaggcatatatattgaattttatacaaaaataaataaataaanaaataaataaataaaaaataaaagaaaaaaaataaaagatgaaaaatgatttggtcgaacccattcaatcatatctcattaaaacaacacatttatacacgtgcgagctattcttcaacatgaaccatgcataatatgttatttatatattattttagtaaaaaataatatttatttgaataattaataattttatcttttaaatttttgacagtgttgattatatcccttagaatataagatttgttaaaaatttatcctgaacttttacatttatcaaaatttagtcttttatttggttcagtctttttattcagttaaatgctgaaatatctttgtaaattagcaacatgaccctccaaatatatttacaatttgatcaaaagggacatgattatgtaactgtt

SEQ ID NO: 70746 - DNA, 1015 bp, Cannabis sativa
  modified_base (48)..(51): a, c, t, g, unknown or other
attgttttagaaattcatatttgggatgttaaataacatacatggtannnnatctagatcctggtaaataatccccaacacccaggcctttacaaattcatgataatcttatttggcactataatatgagtgtttattatactgtgaaaattggttattggtatgtgttacccatgtttctggatggaggacatgtataatttcaagatggtttcaactcaattgctccaggctcaattaagatagtggactagatccattagtgaagtcaagccttccaaatgctggacaaatgactcgcctacataaggtgcacctctgatacagtgtgtatccgaatggcatcgaataggtctttcgaataagtaattagtgggcctcccgatatctaggtccatatcatatcaatttattatcaaatcccacaatattagagctttatgtaacgccctagtccataggagcgctacgtgtgtgatttaataaactagtttaatactaatatactatttaattattaaaaactacgatgatgataaaaacttaactaaaaaaaacaccaaaatggatattataacggcagtaaaaaaatattctactaaaatgagtactccactatttaatatcgtttagccaagcttgaaggaaataattgtttcacttctattcaattatagaagctatagattttgtatctatgattagcactcccactcaattgtactaccatgttctcaagatgtaagtatctgaaagattcaattagtcaattttaatgaacaagtcaaagaacacaaataacacaattgaaccagaacctaaccatcttaggatcgggatcattgatctaagataaactaagtgatattaaaagatataatggtaagtttatgatatcttatccaagttcaatattaatctagtccgatgtataagaatacatccaatccaagcttactttaccaatgccttagaaaagacataacactacccaagtgtaagtaaactatattgt

SEQ ID NO: 70747 - DNA, 1674 bp, Cannabis sativa
  modified_base (304)..(306): a, c, t, g, unknown or other
agaagatgcgggggacgggctgatggacgaaagaagataagattaggttttgttttggggtttttctttggggcgggctgatttgtttaatttgggggttataattttttggaaactttatttacactccaaaattttttaaaagagctccattttaataattttaatttaatataaaatttatatctttaattgtattgaatttttttaacttttttcttccaatttatattcttaaaaaatatacctattaaaaaaaaagtatattttaaatattatgataaaaaaaaataaaataaaaaannntataaaattttcttagaaaaaaataaaaaaaatatacatgaattagaaaaaaattatgaaaatgaaatcaaaataagtattaaaacgaacatataaaataatgtgaagaaaaaatttaaaaaaaaaaatattaagagtaattttaaaaaaatatttaagtttatttttttttttttaataatggagtgtatttataagtttatggggtgcaaacagaactcccctaattttttaagaataaataatatttttgtcccccgaactttttactctaccaacttttgccccctataatattttgcttgttaaaaatactcttcaaactatttaaactaaatataatgtcatcagtctaaaatacacttttgttaaaactgatgatgtgacattttttatgtaaagaaactatgcaatggcatggcattacaatctatctatatatctatatatatctataaagaagaagtataagacgatgatatatcagtctaaaatagcctcaaatacctttattcattatctccttaattctctcattttttattttttattctatttataaatattaattaattaattaatttacaaaatctattattttttttttattttttactcaatttataaatattaattaactaattaattttttaaaaaatcatatagattcaaaaattttaaaactttatatacgatttaatcatatagattttaaaatctatatatcaagtataaggaggtggtgtgtaaaatagcctcaaataccttttattcattttctccttaattctctcattttttttattttattattctatttataaatattaattaattaattaatttacaaaatctcttattttttttttactcaatttataaatattaattaactaattaatttttttaaaaaaatcatatagattcaaacattttaaaacttcatatactatttaatcatatagattttaaaattttatatacgattcaaaaaaaaatgcataaataatcacactaaccctaaacctatatataaatgcataaataatcatcttcctcccccaatctctttctagccaaaattctctcaatttattaaaataacgtataatactataacacatcccttgatcataatccttgatcttcttcttttttttttccttaaaaaaaatcacatccctcatcttttataaacattattattattctcttcacttcaagtttttatattattttgagtatcttacactatgtacactaattattaagcatatttttattttgattattttgatgataggtattacaaaattacattgcaattcttttattcatttcatatggcttgtgttgttaagttattaa

SEQ ID NO: 70748 - DNA, 1046 bp, Cannabis sativa
  modified_base (481)..(485): a, c, t, g, unknown or other
  modified_base (994)..(1021): a, c, t, g, unknown or other
ttagttaacatattttttagttattatgtttatattatgttctgataaaaaaagagtagattcttagtttaatgaattatctgactaaaagaagtattatttcgaccataacagaattttgatgtatatcggcaccataatttatggaaaaatcacacaaaaacaaactataagattttgttaagtaaaaaatttaaaaaacaaaaaataaaataattgctgaacagaccttatatatatattcgaattttgaactcttaattattttcactctatttttcaatggttgattaagcaataaaagtatatagaaataaacataataaagtatatcaattggtcaagtacagattaaaacaaaagtaagattgataagatgtgcttttgaaaatacagtatactaaggtaaataagaaacgagatgaataaagataaagattaaatgaacattcatccaattttatttttttttttatttttnnnnntttatttatttttttttttgcaaaatttgggacaacgactccttattttttgttttcaatatgtattatttgtaaattatatggtaaagaaatataatctaactcaaaattacgaagaaaaataataatattaaaacctctttaacaaaataaaattaatatttgtcccaaataatttattttttcttctttttttaaattttttttttatctccacggagtacataatatataattatttatacataaattagcttcagcactatcatttctataaataaatcatatattatatgctccactataatataactataaaataattaaaaaataatttattattttttactttataaatatttttgtaaatataaagattcaaagcttaaaaaataaatttttttgtatttatattttttaatttttagtctattatataaatatttatttttaacggtgacaatacaaatttcaatcgagaataaatttattgttataaaataatatannnnnnnnnnnnnnnnnnnnnnnnnnnnaagaagaagatgaagagagaaagag

SEQ ID NO: 70749 - DNA, 744 bp, Cannabis sativa
tttgagaatggatgatatcccgggcaattctttgtctgaggttattttcaatctcattgctcttttggattctgaaggtagaaatcggctgctgtgctgtactggaattgtgatggactgtatttggaaactcagaaattcgctgctgcattcccctgttgttggtccgaatttggacaaaattagaagggatatatgctgtagattcaatgaaatgtcgaatcaggatttgggggactacacaccagctccttctcgcttgtctatcccctcatttcctgatgagcgttcgggcaaatgtttactggtggatggttcttttattggaggcaagtttggttgtgcaatgttggctctcgaactacaatctacgaattggtggtttgggcactcgtcaggtacctgcgaattgagcttggaagctgagatgaaagctgttctcttcggtttgcagtgggcggcttcgataggatgggataatttctctattttctcagatgcaaaaatcctggtggaggcaatcaattcaaaaaaatcacctcactggaagctctctgctctattttcctctcttatgaatttgttgtcttcgttttcttgttgtttggttattttctgtagtagaaactctcttacttatgttgatggcttggccaaggctgctcgtttgaattcatttcctgcgcagacctttgttggggagggatttccccctctgaatcccaactctatttggcatttaat

SEQ ID NO: 70750 - DNA, 1183 bp, Cannabis sativa
atgttgatggagaattttttgagattgaaggagtactagcaagttatctccaaatgaattactaaactagtgactggcacatcagtgacaaatggataaagagcagagctagaagcacaacaatcgaaagatctcaagacaaagagaaaatatcaaaggctctacaaaggtaaagaggcaacaacttcaatcacttcgtacggagtttaaaacacttcaaatgaagatggaagaatcggtgtcagattatcgcactctaacaatggtgatcgtgatgacaagatgcgcatccacggtgacaagatggaggatgttatcgtagttgaaaaaaatactatgaatgatgatgccaaaatttaattatgttgtttgttgtgtagaagaagttcataatattgatgacctttcagctgatgaattgcaaagttctttcttagttcatgagcacaaactaaaccagcaagagaaggaaaaggaggagcaagccttaaaagccttagaagacaatagttaaaagctaagagaagacagaggacgagctagaagagaggtcgaggcataggcagaggtggaaatgatcacggaactcagcaccaataccaaaaccaagacaataattctcatgactctaatggaagaaaaacaaggacgccaccaaccaaatgggaatgctacagatgttataggtacagattttataaatatgaatgtcgtactaatttgaatagacaaagtggagaaataactaactttgcaaaagaagaagaagaaagcattttctgagtagatgaatcgttttgcaacactgtcaagtttggcaataactccataatttttatcatggaaaaaggacgggtaactattcaaactaaagaaaactttacccatgctatctcaattgttctttttgttctaaatttaaaaacgaatttgcttagggtgggtcaactacaagaaaatgggtacaaaatttctattaaagatggagtatgttgaatagaagatgcaagttgggctttgttgacctcatatttggtcaactgacaacaaagtcgtattaatgctgatgatttctacgtgttacacagtaagagcaagaaagtaaaagaacataggattttatagagattcggcccccttagttagcgggcaacgacctactcccgttttagttgtattgata

SEQ ID NO: 70751 - DNA, 1027 bp, Cannabis sativa
ttagtgtacagtcattaaaaagatatactggtgataacacaattacactaaattaacacaattttaacttactataaataaacgatatcaaatctttactattagtaacaaatacatttaataacaaatcttgataattattagttttgagtactatcatatcattttttaataaatgtggtaacaatactaaatctttgttaatattacagtactgattaaagtattattactatataaaatcatttaaaaaaaataatatccaaataatattaaatttatgtgcgataaaatttcaagatttagtaattaaatgtaattattatcaagatttgcttttttttaataaaaaaatgtatgttgaataataaaatttcattttctaattaatagatattttctaaaggaggaaatttgtgtttttgcttactaattatttttagttaatttgaattactttttgttgacttagtgattagagtcattcatgattagtaatgtaattcataattggggtagaatttccttgaactaagataactcatcgtctaaccgaatgacatattttgtcaaaccataggctacagaatttttatcaaaagtcacatggaacaaaactatcctaaaaatttagatattaaagttataatattctcaaacagcaccctatcagctcattaaaaaaataccttcttttactgatagctattaccgaaaaaagtgaatctaaataaatctctttaatttaaattactttattgtctaaatttttgggagcagttttgtctcatgttatttgttgattttagccgtttatggtttgacaaagtatgtcattcggttagacgatgagctatccagattcaaggagattcctgtgtggtttgcgaatgtcatcttgattaacgataatttctaaaaattattatatttaaattatataggacccaatatttaattatatcaataacaattattacttatataatttcttaatttttatcattaattaccattgatgatgatt

SEQ ID NO: 70752 - DNA, 998 bp, Cannabis sativa
gtttctcaacagttttggtcgtcttctgtgcgatagttaatattcgtcagtcatattgattaaagtgaaaactataaatattctaaacaacacttacagctattttaaatattttctaattgctcatgtgaatagttaatcctcttattcacattttagcttgcatactatttattaagacacgctaggaaatctcgtttatagcacatgctatgttatgcaagtcattatttatttagattgcctttagcttagtgttggttgcaagaattaaaagtctcgattgcaactcctattttcatgtttgctttaggataggttcgaattatttgactttatgctattccgtaccagctttaataaaaaactctctttttacaaatatatatttttttttcattttctaggattattgaacctaattatttctaggcaccaacgatcctagttataattattttctaggcactatagaacatgtttatttctaggcatcaacaagtcaagctataattgaaatatacttataggcaaaacctagttattgtatattcatatgcccccaaagtgattttaaaggaattaaaactttatgattacttgaaagatacatctttattaagagaaatgacttttttacattacaaaaataaataaaatacaacaaagcatgatattggaaataatgccttaaatgttcgctattccaagtgttttttatcagtgagccattaagccaagacaatttataaactcctgtttccacgcaagcttatataatgtaagggtcttcctagtttggattaaatactcatgttgtaggatttcacgtattagcatacatgcatcttaacacaaaatttcctactttgtagagtctccttcgaatccttttgttgaagtgtcttgtgatttgatgtttataagcaacatttatgattggcgacttagtgcgattttcatcgagcatatccaaggatgtttcgagtagttcctag

SEQ ID NO: 70753 - DNA, 2515 bp, Cannabis sativa
tttttttttttggcaactaggcataggcctagtttgccttaagctagggccgacactaactaaggataagaaaatatgagttcatttgagttagacattcaaaactcaagaaggatatagcttaaatgattagccatgtgagattcgagtctcttatgagtagggatgctcattttcgctatggaaatgggccctgcccctgttagggtggagacaagaattattttttgtcgccgaatgttaaatgggatagtggtgggaatgaccctttctgtcttgacagggatccgttttatttataatttttttattaatattttataatatgtatttatatttttttaatatatgagtgtctttttataagtttttaagttgtatttttgtataataaatagtatattaaataataaataatatgtaatattttaatttttatataaattaataattttataaatttaaaattttaaaataaattttatttttacattgagggattctccatcccgtcccgtccccgtaaattcttaacaaggatggagacagaggagcactcttcacaaatttcccactatgtgtgcatcctaactcatgagtacttacatagcaagtttttataggatgttttctcaagtatagagctattaaatctgaacttgtattgggaagaaaactaggttcatcttttatggtgttcgatgttattgcaggtgaaggcctacaatggtagaaaagcactaatgcattctctaagtgacactaaaacagtagttactcaattggacaaattggtgactgttattctcgttgtagtgactatagtaatatggcttttgctcataaaaattgataccacaaaagtactagtctttttctcatctcagattatagtggcagcttttgtgtttggtaaagacattgtttttgtgttcataaagcatcctttcgacgtcggagatcgttgtgtcattgatggcgttccggtaattttcattttagcttaaaatttttgttttaatgctaattaaagtttttgtctcttgaattttgagggttgtcataagtttcccaaaactaatgaaattgttcgattcaagaatttctgtccaattttattaatgaacgcttgatatggataaaaattcagggaatacagttgggtacatcaaagtttggggggacaatttggtagatagacaatcgtcacgttagtaaaaataaacggagttagacacaagtttttgaatattaaaattcgaggaacaaaaaatcttaattagcttaaatttaatcacaccaaacacaatatttattcaattatcaaaatcctaatatgacttttatgtttagtttagagtaataaaaacagagaaatctactcttctttctttcggaatgtttgtttcaatgctttgaattcttattgagctccttttttttactttgacagttggtaagagatgaacatcttaacaactgtgttcttgaaactcaacaatgaaaaagtgtactatccaaactcaattttatccacaaaacccatcagcaactactacagaagtccagatatgggtgattctatcgagttttcgattgatttcaaaacatctctcgaaacaataggacagctcaaacaaaaaatcaagaagtgagtttacttactaacactaatataatgtcaatttttttgttcatcaatttacacattttggttttgttttgttatttttactaggtacatagaaaagaacccatttcattggcatcctgctcacaatgtggttgtgcttgagattgagaatgtgaacaagttaaaaatggctcttaatgttactcacaccataaattttcaagaattcggggagaagaatcgacgtcgaacagagctggttatggaagttaaaaggatttttgaagagttgaatataaaatgttgtcttcaacctgaaacaattcatgtcaatcccattggattggattcggactcgaatttggttcaaatttgattcttttttagggtttatataaaaatattgtgttttaacttataccatttgaattttatatttttaaaattgagaatttgaatctttatcctcttaaattcattaataatgcatttgtttataagtaattggaatgacttagaatacattgattaagaaatcgaattcaccatcaattggattgatgaatcgtgtttgcttgacttattggaatggaaatccaactaagtaatatttttttgtgtttattttacttaaaaatcggaataaattatctgaaattacaaaaatactctttattaaaattttatttgagtttttataaaattttcttcaattaaaagggtgagaatacaacggtaggagcaagaatttattcaagaataacattcgctattaataagttttgaatacaagtaggattttttggccaccaaaccatgcttttaacattaaacagctcaagtttagcccaagtatagacaactccattacaagacctatta

SEQ ID NO: 70754 - DNA, 1827 bp, Cannabis sativa
  modified_base (54)..(54): a, c, t, g, unknown or other
  modified_base (1780)..(1780): a, c, t, g, unknown or other
gtttattttcatcgttttagagattcatatttaggatgttaaaaatatacttgntagtaaatctagatcttggtaaaagatattccaacacgtctccaccatcttgcctttgcgtttacggtcaaggggagggacgatttctctttcttcttcttcttcttcttcttcttcctcatcaatcaagacaacttggttctcgagaagttcagtagaagatcttcctagagtcaccaccacatcgcgtggctcgggcaggccagcttcaggactgtgtgtacaggcaagggcatccaggaagtcatccattggcttcgctgttcaaagataaacaaaggagttagaacattgccaaaaaaccatgcatgcaagagtaacataatgaaactaatcctaccatggtgatttaattctaccctagcaaatgtatatattaaaaaactggtgtcgtcgtcccctagaaagctatccgaggggaggaaccaacttgaagtcaggtatgaagaatggtccaagaggattggtacaggaggaccagaacccattcgggaccaacccaagaaatgactaaggttggaaaaataaaaactgttggcattataaccccatcgtgaatggggcatccgaaacctatgcaaccgactgtcaaattccactagccttaggccaacataatcttgaacagaaaggacatgatgaataatcaatggagacttacaagttccagaagtgctgacatcaggagccccagagttggggaccgggaaaggaaacttagggcaagtaaggacttgttccttccctgcctcctcccggaggatcctcccgaggtagcctgagcattaatataggccatctcctgttccttcttgaatttatactttttgtatttgtcttctgcagaagagatgatgtcctctcagagcgccttttcagttttggggtttcggatatgagggcaaagaaccttggacaagttgaagtcgtgcaccgactagctttccgaaatcaacttggccctcatgcagttggtggttgtgaccagatcccccatgttcaaactcatccttattataacaagcaaaaacttttgcatggttaagaaagagttaagtgggggcgttacgatgcatgggcagcaccctggcccattcagtgagcgactccagacatttaacagctttgaaaccggaggagaagaaaaatcggtgacgatactcctttacattcttctagaagttaaaaggcaccggaccatcgttggtagggtgggcctggagtttgtaaaaaccattcttaagtttgtcccctttttcgggacggacaggagttcataaaaatataaaatctcagccggactgggcggggcccagttcctagcaacataaaaaaatgtacaagcctaaaagcaggcgataggcttgaggaatgagttgataaggcgcaaggccaatgaaaactagaaagtctataaaataatcttgaagtggtagcatggctccggacatcaagtgggtttgactccatgctccgaaactgccgtagttatggttgggcatttctttgtctctcggaaggcgatgaaaaaccccgacagtagaaggcttaatcccagcaatagtgacgatcttctccagttggtgggcacatgtcagggtcgagtgcagcccatctgcctcccagccattggaccggcaggtgaacttctcataggccaccgggcctttcatcactatgaagaatcaaaggggctagtgacggctccattatgaagaatcacatnaatcaaggaaggataaagattactctcacctaatccctatgatacct

SEQ ID NO: 70755 - DNA, 1131 bp, Cannabis sativa
tttttttttgaagaagaagaagaaaagcgtgtttagaattaataaaaagtagttacacatcacggtcattacataaaaggtttacaggtatggtagaaagcgggatacaaccaaatctctggtgaataaacggtggacagcaaaattacaaatcctactaactttagaaaaaatacaagtcctcctaactagctctatcttttaattaatttaattttttcctcataaaatatttgtggtgttatgttatttcatgtatatgcagagactttacaacttgggtgcaaggaaaattgttgtgttaaatgtgggaccaattgggtgtacaccaagtcagagagatgcaaatatattatcattagacaataataattgtgctatattcccaaatagacttgctcaaatattcaacatgcaattgagaaaccttatcacagagctcacaaacagtcttgaaggctcaaagcttgtttatgctgatgtttacaatgttatggaagatattattgagaattactcaaaatatggtattaattattaactaactgcaatatttgcttaattaagagaattataattagttgattttacttaattaattaatgaacaggttttgaaaattcagactcttcatgttgctatgttgttggaaggtttggtggtctaatcccatgtggtcctaaatcaaaagtgtgtttggagagaaacaagtatgtgttttgggatccatataatccttctcaagctgccaatgaaatcatagctaagtctcttttggatggtgacactcacattatttcaccaaacaatgttaggcaactttttcagtcttgatgttttgttcatccaactactcatctaattatatactctacaaaagagttttataacaccaatttcaaggtattctctctattaatttttttatatatatataaataactagaaaaataatttgaaattggttgtgtttgcttggatgtgtaaatcatgtaataggactttgtaatgtaattaaattgtcactattattgtgtttgcgtttttatttttgttgttgtaatgggcataatattattacaatggatggtgtaatagccattacatatataatgagaatatacataattg

SEQ ID NO: 70756 - DNA, 2683 bp, Cannabis sativa
  modified_base (2556)..(2589): a, c, t, g, unknown or other
taaattgtgatatataagataaaagggctactcctcccattgccaattggttttggaatagaacctcattcatcttattcctcaaattctaacaattctcaacaaaactagataaaagatgacatctgaggttggcattaagtccaagcaaaaaaccataaccgagagcattagttcttgaactagggcacagctttaattttaacgactgccatacaagtagtttgataaacaaccttggactgctctagcaatagcacagctcttttcaaatgtattgttggggagcttctgcagtgtattttgcaaattaaagtggaatgtgtttccatatgagcggcatggagcaagtgaccaaatagcaatagcattgcaagctgttacaatcagcacatctacaagtgtcagatcctattcttgctttatcctatattacgttcaagaaatcatctttagcttcataaatcatagacaagcacaaatgccaataataaattaataaagtccttgtacaatattctacaattatcctacataacatacaatattagatcataccatgaacaagaaaataaacttagaaaacatcttagaattaatagtaccggcccatacaaattttagaatttataggaaagtaatccaaatttaatcggtggatttcttgattgtgtttcgcttcaaataacacaactcaaaagtttaaactgaaaagaatttctttactcttggttattaaaaattctttaaatgttcactacaattgagtctaagcttaactaaacaaaaataacaactcatgcagaaatacaagtcaaacatttttacaagcatataaatagcataattgaaaaaaatgaagtcatgttgtaaagagccttacttgaaacaagatttggtgaaattgagatacccttaaaatccaaattattaaagttagttagtagggtggagtgacagttaggaagttgttagtgtttgttagattctctaacgttagcttgtcttctctatttcttcaatctctttctctctcaaaaataatatggtatcaaagctacccgattggtgagctattttgcttccgcatcttcgtctagtttttcttcctagcttctagttctttcatggtgcgaggaggaggtactcaaactcccagcaatcccagtcaaagtgttgaagaatcaaatcattgttctgctctcaatgaaaatggcatatttctaaagagtgatccacgtagtccttattacctttcaaatgctgacaatgcatcctcatctcttgttctgaagatcctggaaagtacaactcatggaaaagatcaatgatggtggcattgctagctagaaataaggtcaagttcgttaatggaaagcttccaggtcccgatgaggatgatgaagattatgatgcgtggatcagatgtaatagcctggttatttcatggatcttgaacactgtatcacctactatagcagatagtatcatgtatgtagaagatgcatctcggatctggtctgaattacaagagagatttcatcagaaaaatgctccgagagtgttcaaagttaagagatctatacagacttgaacacaaggatccaattatgtcacttcgtactatactcggcttaaaggattatgggatctattgtaggaatataggccacaaccagtctgtacttgtggtgctatgaagatcattcagggatatcaagatgaagataaagctcttgagtttctaattgatcttaatgaattctatctcaatgccaaatcttagattttacttcaggatcctctaccaaatgtgaataaagcttatgcatgcataattcaagaagaaaagtagacaggaattattattccacaatctaaatcttaaaaaccttctactgaaaattcaggctaatttgcaagtagtgcacaaggcaatcgtgggaataattgtactcacaatcaatctaataatcgatatgatcgatctaataattgactagtttgttctcattgtggtatctctggacacactattgctaaatgctatagagttcatggttatctacctagccatcgattgatggaagtttcctggagagattcctaaataggaaatcaattcgattgatcatcagctaatcttgcagcagacaatgacactaatgaggggatgactaaggaacaaaatttagctgctcaatgtcaaaagctcatggctatagtagcacaaaagatgtaagaagactctcaatagactcaataacctcaacaaagtgatcagcctgatgtatcaaatttctctggtaatgctaatctcatttctaaatctagttggatcattgacactggtgctactcaccatgtgtgttctaatcctgactagttttcttctactcaaccggttacaaagttaacacatgttagattaccaaatggaactaacattaaaatttccttaattcgaactgttaaattactcagtataacccttgaaaatgttccttgtgttcctgagtttaaactgttgcaatatgttttaccaagatctagatnnnnnnnnnnnnnnnnnnnnnnnnnnnnnnnnnntgaatttctaaaacaatgtaaatatacacatataaattttcaaaaaaccttacagtgggtgcagcgaaatattaatggctcattccactcagat

SEQ ID NO: 70757 - DNA, 2535 bp, Cannabis sativa
  modified_base (28)..(47): a, c, t, g, unknown or other
  modified_base (1196)..(1205): a, c, t, g, unknown or other
ttgtttttcaaaaataaattttttaaannnnnnnnnnnnnnnnnnnntttgtgattaaaaaattaaaaaaacaaaagtgttaccaaacaacacctaaatatataacttttcacgtaataaatatacagcaagatttaataataataataaatgaacacaatatattttacgtgattttgtatttaaaatctatatactccacgagtccttattcaggatatttatctagatacagaatacagttctctcaataaatgtaaataatagtttctctcccctattttccttggattatgtccctatttataggtgtatatatgatgacaattatttttcattgggatctattcatttacaactgtttatgaaacgtgaacattcctcacctttcaattttatgcacatgagataatatccaataactatccaaccgctctttgtctttatccttaagcggttatgctgactaagaaagttgtttctcgctaaatatgtgagttatccttcttcaccatctttataggagaagatgctaagtatatatttacttctcctctcattgttcttcatattgtaatgatactagcgaggtggttacttcgtgtagagggcgagatggatgcacatagctatcttatccatgtacaaatatatgggtcaatgagtttcaagcttcttgatgtctcgtcttataagcttatattatatactctatttatcccgagatgaacatattgtcttgtcaattatattcgttcatagttattattcttatctcgcatatgcttatgtggcagcgagtttaaatatttctatcaactgtaattaatttgaacgagttaattaaaccgtatttaataatgcaatttagttattataatttttgagctgattcatagtccttttgtagtatatgtgtcaacttctggtgaatagccgaatttcggatataacactttcaaacaaaaataaaaataaaataaaagtcaaaatgaacaacttgaaaaaagagtgacgtgttctcttctcgtacagagaaatctgcaactacaagaatatagattaataaacaccacaaaaaaagactacctttagcgacaactttttagttacaataaaaaatttttgtgactaaatgtgatttttagtcacaacaaaaaagttacttgtcactaaacataatatttagatacaannnnnnnnnnatttagttttagtcacaaaaaattgtgatttttatgactaatattttagctacaaattttttagtcacaacataagaatgataatttataatttgctacaattttttaacttttaaattacaagttttgtttaactaaaaataaaatttttagtagtgagaagaaatagtagaagagagtctaccaaaaaatataagaaatttttaattaatgaagatatgattgaaaaataataatattgaaatcagataatttagcaaaacaatataataaaaaattaaatatccacttgatcattacactattttacaaattaaaaaatttgtttgtataaaaatatctataatttaattttaatttttttattacaataagttataaaatattataaaaataataaataatattttgtcaaataataatatattatgttagaattaataaaaaaactaaataacaacctttaaatcaaaaaattctattacattaacatattttatattacacatatcaaaatcaaataaattagtatcaaaatagtaaagtaatgcaaagaaaccagtcacttatcttaagagaaaataaaaacaaatttaatattcaacaaattatatatcttacctattatataaatgcctatctaactatttttgttgtgcatttaacagattcttttattttttaacagaatattctccaaaaaaaagttaattttaacagaagtataaattacaaataacatttcttaagagttgcatccttccacatatagatacaactattggcaaataagcacttattcgcacaaaccatcttttatatattgtcatcaatgtgtacatataatatctgttgtatatttgtaaaacacatcttttcatccctcatagaattccttgaatcatacactttaatgttgcagcgagtgttcaacaaagtgttagaaggagagagttatatataggtaaccctgatctaagaataatagtgacaattcttccaaattgtataattatgtttttactcgattggaaagtcatcaagaacttggaatctgtcgaaaactaaggctccaatcgaaagcatgtcttgagccgagaaacaaacttatacgcaattctatagatgccaaattgccactatttatttttttattttattttattttttttttgtcaggatcacttagcctcagagtataggaaaaaaatactggatttaaattattgaaattcttcttaataattcatgcaaaattttctgcccaaaatttcattagtttttggttgggctaataaaaattgattgaaattaattcaatctatgggga

SEQ ID NO: 70758 - DNA, 775 bp, Cannabis sativa
aaagtgaaatgaattgagtggggtggggacctttttaatacatgtttttgcttgtttcgcatctttttagcaaaaagctacttttgttgcttatttggacatgcatataggtggggaacaacccataaactattactctctcatgggactacatgcattatatatagacacatcaatatattaattatatgtcatattcttggttattggttaatgcgaaaacttgtcatctcattaatattgttgttatatatattgtatgtgttttcattcgtatatatacaatgtgagtgagtggaagtgaaacaaatatatgtattgatttggtgaatctatatttcgaatatttatcaaatacgcatcatatttaggagatattctaaattttaaataagagttttattttttgtgtcatcatcccaatagtccggaagaaccctagctttaacaataatccactatatatgcagtagctaagcttattttctacttagtgcttcaaggattccaaccatttttatcacaaagtttgtttacttttatttaaacaataatcccactttgagcattatctttatgaaaacaatagatttaaagagtatttatttgtaattaatcaaaatggtgcacttcagtattttctattagtatacttgatagttgatattgttgaaccaagaagaaaagtgaagaacaaatcaaatacagtataatatggagttctagttatttgctcccattaaggagagtgagaattttgccatgtatttttttt

SEQ ID NO: 70759 - DNA, 2087 bp, Cannabis sativa
tgtctctcttaaagactttagacctattagtttgtgttcgactttgtataagattgtggccaaaattattgttaataggctaaagactgttttgagtgatatcatttccccgacccaaagtgcgttcttgtctgataggcttattttagacaacatattcattgccaatgagatgatccatgctatcactcataggaagcaagggaaacttggatgggttggccttaaacaggatatggaaaaagcctttgatcgtgtggagtagacttttgtcctagtgatcattcataaactcaactttcctcgttcttttattagacttattagcaactgtctttcctctgtttgcatacggtttaatataaatggcaatgtatctaaagaaatttttccttctagaggtataagatacggggaccctctctcaccatatcttttccttctttgtgctgaaggtctgtcctcagccttaaagatccaagaaagaaatggctttttcaggggcatctccattgctagatcagctccatcaatttcacatttgctttttgctgatgatacccttttattcactgatgcctcctttgattcttgtgatgctttaaaagaggctctccatttgtaccatctagctactggtcaaaaagttaattttgctaaatcttcgattttattttctcctaatacttcttctcagatttttgattattttcactctaatctaggtttagataataagccttttgtgagcaaatacttaggtgtccctcagtgctttggtcgttctaaaaaaaccagtttcaactttatccttgatagagtcagttctcatctgaatgtttggagtaataaacttttttccaaggctggtaaggaagttctcctaaaagctgttattcaggctattccctcctatgttatgtcttgtttcaaacttctcgtctctatttgtaagaaaattgagcaactcatggcccagttctggtggggatctatgggaaattcctctaaaatctattggaaagcttggtcttatctttgtaactctaagttttttggtggtttgggtttccgttctttgattcagcataatcaagctcttttagcaaaacaggcttggagagtcttccttcatcctaactctctcttatctcgtattcttaaagctagatattttaagttcaataccttcttagatgcaaaaaaaaggcattctccttcccttacttggaatagtttactttagggaagagctctcctcatgaaagggcttatttggaaagttggagatggttgcaccattcgtactcttcaagatatttggattccaaatgtgaaataccttagatataagggtgatcattctccctcttctgatagagtcattttctttattaattaaaacttccaatgggatattgacaaattggctcagttttttgacagtgacatggtggataatattctccaagttccaattggaggtaatgacaaaattgataaacttatttggaatggagaatcttcaggcatgtttactgtcaaatttgcttaccacttagcaaatgctggttctgttccccctcctcttccaatattatgaatatgacacattggtggaaaaaattctggaacttaaacctccctccaaaagttaaaatctttggttggagagctttttatcatattctaccagttgcttctaatcttttttccaaaaaagttcttcccacaccatcctgctctttttgtaacagcttaaatgaatcagtttcccatgcacttctagacagttccaaggcgagacaggtatggaactcctcctcttttaagcagttttattctcaaaataaattcaaagatattagagattttattctatctggttttgctgatttaaacaagaatgattttatgttgttgctgtgtcttttatgggctatataggagaataaaaataaaaagatttttggtaaatctcacttgtctgcatttgatttagttaattggactattaggtacttgatggattatcaggaagctcaactcaagaaggtggatagaagcaaagtgaccaacaaacccat

SEQ ID NO: 70760 - DNA, 1001 bp, Cannabis sativa
tctcgaaactcgtctaatttaattacccctaaactgataagtgttggtggtatatatagacttaggataaagattttaattcggtagatgcaactgttaagctgttaagttattacaacttaacaaacttaacaactcctcgaaatagaatctccatgtcagcataagataacgtgcttccagatgagatatacgcttctggaatagaagaccgaagcgtatgctgaaggaacttcctagataggaaaagagtcgagtatgcgaaactcccttccagcagagaacaagtagccacctggaactccttttcggaaaaagactggctttccttacagacccttcccgcattgacaagttagactcccaggagcggagacagctaactttccataaccataactacatttggagatcttttcatttaaaaaaactataccacatatctattttgataaaatacaaaataccaaataaatatttactcaaaagaaaaaaaaattctaatgttatattttatgtgaatatgggatagttcttagtgatgcttttcaggtttggaactcgtttttttatattattatttctcattgaaattgggctactataatggcacactgctcatgctcttaacttgctatcgcgatggaaattggtcggggcttcctaattgtatttgagcaatgatgatcatgtgcaaatatgagaataggaatgagaatgaaaataggaataggaatggaatggaatacaaattaaaatgcataaaaaaattgataaaaaaaaattattaaattttttcaaatcttgcattgaaatgatctttccttccattttaaaatggaatagtcattccaccaaaatgatggaaaaactattccatcgaaatggtattccaatggtttttattgagtattcagtattaagttgtgtcctagtttttaatctgttgtaactactgtcgttctttcctatttctttgcttaatgtcagaatgttagtta

SEQ ID NO: 70761 - DNA, 2139 bp, Cannabis sativa
acatgactttatagagcattgaaacagcttcaaaatgcaagttgaatcgcgtcaatcgaatcaatattgagtgagttatggcccctactgcatattgaactctacctttccccgtaggaagtgaacctatgagattgattccccgagacggaaaatggccagagagattgaatattcttgagtaaatttggggtagtttgtaacgtcctaacacctaggcacgctacagtaaattttcaattatagttcacacatttgctaatcaaagggttttctcaaaaaccatgacaaaattaatattttggcttaactctaaacttttatagatatatacatatttttcgtacaaaaaagtcgggttcccgcttttaaaatttttattcactttcaaaataaactttacaaatatgtcacatagtgattacaaaatgaagcccaagtcgttccaagaccgagctctccaggtcgcaccatcatgccatgtacaatcattcccgagctctagactcattgttgttcagccttagcctttcctttacctacacatggtaaacaacactagtgagtcgatatactcagtaagaaaatcatagaacatatactgtaataccgccttgtatataggcactcatacacctatttataaggcttatcaaatggtcaataacattcttaatagaagtacgacctctatactatatacacttaagtactcgtcccatactagtgttggtagggctgaaccgtactctcgggtaccattaagtgttgtaccacatgcactatgtactcatcccgtactacagttggtaacactattatatacccttagtcattatacattgtaccaatacactccgtaccactactttactagtgttggtagtgtataactaacataaccaacatgtaatttatatacatacacacatacatatacatatcttatgttaatcttaccttgtttctaaatttaattgtgccaatcgacctgaatggtaaatcacatgttgaacggaggccctatgtcacaatcacataaatggataaacaacttgcgcaaccttctcggggacctaacttaaaactaaaattttcactatcgataaataatacaataatactctaaatattgaggaaacacaaaaattaaggctctagaaattgcccaaactagtaaactagattttcaaaccggcagatcggttctcagggccctgcctagagaaatggttaaccgattccctacaggaaaccctaaaaaccatgaaactcaatcaaagctttcccaaacccaaccaaactttgcaaaatacatgtaatgacattaaataatagtttccaaacaacataacctcaaaatatagagaaattaaaccaaagccctaaaggttcagtgagaacctaaaatcccaaattacctacttaaagtcttaaaaaaaactcaagaagaaaaggagtttagggtggtacctcaattattattcacttggcactcaaaacctaggtgagattttgcaaaattactaagaaaatgaagatgttttgatctagtttgtatggtttcttatggagtagagagagagagagagaaatagcaagaaatggtttgctcttcacacaaagctttggcctttacttattttccataatcaagagataaattaagtttatccttagccaataatgactagctagagattagtggaataatccacttgccactaaaataaaatatacaaaaattaaccttattttagtgcttaaataataaaatagcttaagaataatactccaacaccataatcccgcctaaccccgatatctcgaacttaaacatatgattgtctcccaaaataaaaggttctcagttcacacatgtgactctatcgaccattcttcattatttccatcgtcgtcgagctaaaattataagaattataaatttcacatttagcataaatcacacacttatagtttaataaaatctctagaattaaaaaattataactctgctctccatttcctaaaaatggggcccactacataaatattcatgtataatcataaaataaagataattaatgctaattgtcttactaatccatatcttaatcatgttggattttatgccctaaa

SEQ ID NO: 70762 - DNA, 1633 bp, Cannabis sativa
aatatctaaaattaaattaaataattagagctcggaacttgagagcttaggattgtctttttggataaagtttaacgacttgggataagtagggactcaacttgattattgagtttgattttatatgtgttggataacattagtcatatttcaacttttataatttataaaatatttgaaaaattaaaaacttaatctgcataatttgtttgggctgttctggggcactgagtgccaagaacatttttgtacaaatatttaagtaggttataatttttgagtctattcaaaatacaaccgttatgctgctggattttccaaaataaaaggaaacatgttcttctattattattattttgcctattttttgttattctgatgagagtcatgttgatcatgatttgtgcatattgttattttcacgacctagtctctatgttattataggtagattaggtgttcagtcacctgtaggtgaaagacctagaatctatacagggagtgaattgaatctgagtctcggtattatagtagttattaggtgcaactacctaattttggatgtcgttttatataattggtattgagagctaggtgtttagtggacggtgtgatatgcatttgaagcttgactttgtgattatttgtggtctctctattttctctattttgtttatatattttgacaatggtgatgatatattttattttttttaagttaaccgtgcaagagtttttaataaaccaagggtcctttgatattagttgttttcctactgaactttataagctcacctcctattttcaacccattctaggaactcggttgatgctagtggaagaggatggtaccgttgaggaagaaagtcgttattagtttagtcttattttatttatcaaactttccactgaaaaactgattctgtatttaagcttgagtgaatggtttggatgacttaaattagctatgtacaagttagaaatgaggaatgatggatgctagatattattttaatattttattgactcactaaatctatctatccggtgactacataattatggggatattattattcttttatgtttctcaatgctcccccaccccccttgcagcatactataacgaattatcttgatgcagatttctcctcttcggatgtatgggacttgaggttaagagtagatgcctcagttttggatggtgtggctagcacaggattggttcaatgtgatgttgatggtgaagtggccatcacggtgatgcaatttgttgaggtgtgtagtgtcctggaagttgaattggttgccattcataaggccctgcaagttgcagttgaagaaaattgtagctccattcttataatattgagtctgattcgactgtagcagtgaaggctttattcacgagagaattaccctttgcttggggttcttatcctgattttcaaagaatgtttatctttttcatctatgttttctcgttgtaagtttgcttttgtgcctcgtgcagaaaatacagttgcagacagattagcctatctcgctagaattaagcgcatttatacgaggattgttttaagggaggtagtcccctttgtgactactctttagactcttgtgtttctttttt

SEQ ID NO: 70763 - DNA, 811 bp, Cannabis sativa
  modified_base (26)..(35): a, c, t, g, unknown or other
accgtatttttgttgtttttttgttnnnnnnnnnnatttgtgaaattaacccttataaaaatctgtaaaaaaaaaaaaaaatttaagtgtatttgtcccacattattcacgtgaataatttgtaagatttatatcacaccaagtagttacatgataaagttttgataatagggtaaatactattaggtaagttaatagaacactccctaaaaaagtattttagtagacctcttatatgatttgacatgtagaagagttttttagtctaatttttttaataattgtgtacattataattatttaagaccacttataaatatttagaaaatttcaagtagtttacaatgtcgaaaataaaatttatatactttattgcacacatgactattttttcttatacacgtggtaaatagctatttaaacataattttttggtatagtaaaatattcaaaattttcttaaaatatataagtaatcttaaataaactataacaatgtacgtaatcataaaaaaaaattaaactaaattttgtaaatagaaaaacagataaaaaaaaattctactaaaacaacattttaattttaagaggtgtactacaaaaaatttcacagttttagtgtcaataaatttagagtaatttgcgacataaatacctaagtttaattcccaattacaaataaatgcctaaatttaattttttacggtaattatacctaaattataattttgaaacttttgtaagtacttgattaaataaattgtcacgtgttaatccctcattggtacaagtcactaaatttttattattt

SEQ ID NO: 70764 - DNA, 602 bp, Cannabis sativa
aaaataccacaataacaagatataagtaaaaacttcaaatagaactcaacaaagaaaaaatgaaacccaaactaaagataaaaacaaaatacaaaacaaagaaaaaactagccaaagggatttggctagtaaaagaaaccataaaaactcaataaaaaaacatttcttcaaaaggagaatagggtaaggcatgacacatcaaaacttgatacaaatgcgctcaaaactgtataaccaatggctaacgaatttttctaaaacgcccatccacattagataaagcaacaccaaatactactcaaacttgaagctagaaaatattttaaaatcttgtacacatcaaaaaagttaaatccacaccatgtaaatcgagcctaatactgttcaaaacttaaagttagaaaatttaaaggcttaaacaaatcgaaaaaagtttgccttaaagttaaagcaatgtctaacctttgagaggcttgcataaagctgatctcacccttttatcttctgaaagataatagcccctaagccaactgaacttgtattatcaatactgctgcatcaaatcagggaatatggctgagaaactttgtcactaggttgcg

SEQ ID NO: 70765 - DNA, 2763 bp, Cannabis sativa
  modified_base (2492)..(2492): a, c, t, g, unknown or other
atttttggtgatgctaagaactcctttttttttttttatgttttcttaatgtttagggtattggtaccctagtgatcaatagagaaaatttcagtgatgaattaaggacctagaataggttaggtcaagttgattaatcattttttttgttgtgacatagggtctgggatcgttgaccattctccatttgggtcgatcaacatacttgaattgggacttgaggtaagaaaagtacatctgtaccacatagcatatcaagatatgattattatcttttatgaatcgattatgatcgggataaagatacggtgattgttattgagcaagagaaaatcatcacgtcaatcgaaaccattgttaggttttgtacattttagttgtcttataagacaatgacaaatatatgtggatgtcgggatagggcattagggttgtcttattagacaacaatggaaacggttactctatgaaggaacaaatatggcttgtcttattagacacgtacttgtgcattactttttaattatattattttgaattggttatctgattgatatgtgtttatatttactttttttactgagtctttgcaactcacgggtgctttgtggtgcaggtaagggcaaaagaaaactaaggtagccatgagatgacggtcttctccaacaaatttacatatcgacttatctggcttgtgtggtcgagttgtcaagagatgttttagtgcttcacctaattagtattttgacttacttttgtgtctagccctttcataaaaaaatttataacaagagattcctgaaacaaatttttaccgatgtaatcttattcatagctatgattttattttcatgaagtttttattattattacggattttattaaattttttatctagtattacaaaactatgtttcaaaaatacacacgtggcctcgctaggagttagggtgttaaactaggcattaaagttctaactcacaaaagaataggtattataacacttaatatgaaaagttacatagaaaaagtcatagagaaattttctatgaaaggtgccatgcaaactaagcagcctattcgtaattagcactatctaagtaaacaatagtgtcctacgactatagaaagaagctatgagtgagatactttattctattgctgtgggatctataatgtacctaatggttagtaccagaccaaatttagcctatgctattagtatcttatgtaagtttatatggctaatccaggcaagacacattgggagactatgaaatttttttttatgtatctattgtgatgtccagaattgggtttaaatctcaaaaaaagggaaaagagtgttatgatcactaggtagtgatgcagattatgctggagaaaaagatagtagaaagttcaattttacctacttctttgctggaaagtgcaactgcaacctgtagttgcactatcaactatcataacaaaggcaataaaggaggaaatttggctaaaaggattgatggaggaactaaagctacttgaaggggattctatagtgttttcaaatagcgaaaggtgcattcaactctgtaagaacccaatgtttcatgataaatgagtgcaagtgctttacaatgaagctcaacataaggaatggtgcactatgtgaagaaaatgccaacacccattaggaggaacaatccaagtagtagagaactagaggtccaaagccaactaaagaaatgcaccaatagaccaactttgagaagaggatgtttgagagggtaaaatgtcttcagttaatgcaacacatagtattttgtcatgccacaagattaatactccctagatccacccattatttgtatagaaaccaatttaaggtaagtcgacctaccacacacagattcttcggtgataaaattgtaggtgttggacttacaattacgttgagagttgcaagatagatggagcagtatttacatcctattttacacttgcgattggaaggggcggaggtacatatctacccacagtggccctgacgggcccctctaaacatttgaagttatctaatgtatctatggtatttttctaatttatttatttaactatacattattcctttcaaaatttatatctatcaatgtgtagttttcgtaaaataactttacaaaaatttttattaataaaataactttctatggtcgcaaaaacgaccatgagttacactgtgcgatcataaacgactattatagtcgtaaaacaactatagatttacacagtgcgactatcatagttgtatagaataaattaagtaaaattattttataagttttgttattttaaatggttagtttattaaattccacgtagttttctatgtatctatatatatagtgggcccatagaaagaaagaagagttaaaaagtaacattaattaaaagagttaagattttatatttgttattctgttatgtggtgtttggttgggaggaatganaatataggaataggaatggaatgggaattggaataggaatgaaatagaataaaatttaaaatgcatacaaaaattgataaagaaattttttatttttttcaaatcttgcattggaatggtctttctttccatttcaaaattaatggaatagtcattctaccaaaattaatggtggaaaggccataccattggaatgatatttcaatactttaatggcatgtttactaataagtaatgggaatcaatagtaaggtaatcattcccttacatt

SEQ ID NO: 70766 - DNA, 1658 bp, Cannabis sativa
gtgtgtaatccatgtgggagtattaagaattgattgaattactaacacaaacacaagaatattacatatatcatttttttttttgcaatattatcttgagactatatcatgtatcaacaaataacgttgaccatgtttagtagtacctttcttataaaaaaaaatcatcccatatgttataaaattgagagatgtgttgtattattattggtgcaatttaatattaaatctcacttattgaactttaataacgactataaaaaactattaactattttataaaatgcttatctcataagagtgctaagcactatgatgtcatatagcaatgttctaaaaaatatgggaacactagacatatcctaaactttttttttaaaaaaaaaaaaaaaaaaaacttagatatcctaccaactccttctgttttcatttacacacatctttaattttataacgttctttgttatctctctttggttacattttagttctattcatttttaattgcagtttaccaagcattagtataaatgtgtgttcattttctaaacatatcttacctaccgcttctttttctttcttttcacacatctttaagtgctttgtatagaatatgtattagcagcactaatactactttgagtgattgaagaaacaacttcatcaaatgctctaagaaggtcttcaagattatatatgattgtaaaagttgtttagtgtagtgaccaaatcaatataagaaagatagatttaagcaaaattttacactaacatacaaaatgtaaagagaaaagtttgatgggatataatatatagaagaaaaaatatgacactttgaatctttgtttgatctcttctcttcatatatagtacataataaccatatatatatgtaaagatataatgttaatgtttgtatgagttctctcacttaagaaatgctcataagaaaacactacatctgtatgtcataatttttccaactcaaatattttcttacagaaatttatagtaaaattggtgaagaattataaataattgttgttgttgttctacctttcaattcttttcaagtatagtcattgagtttatgtatttatagatgttgaacacattgtaatcataagctactttgaaaaataaagcttaaaccattcaaatacttttcactattgagttgtgtgaattgagttttgtggtgtgtgttctccgattgttcttggagttgtttctggcatgtgagatcgagctcgagtttcaacatattctgtgttaggtcctctctaattgacactttctaatataaagctatagaagagtgaattaaaagagattgttagttaactcaatcaaatgagaattttagagttgtttttgttacttacaacaagtataggcatggagaattaataagcatgtatgttctattcaggtttctatgaggtttattcaaataatttaaaacatataaaaagaagaaaaaaaattgagaaaatagaatgtagaaatagctttatataagagaaatgctaaaaaaaatagtgtctagcaccctcttaagtgtcatattactattggtacaattaagaattgtgtcccatataatttaatgtaataattttcaagaaatatagctaaccactcgtaagtcgccacct

SEQ ID NO: 70767 - DNA, 1101 bp, Cannabis sativa
tgataagggcagacatttcttcagagattgctatgttgaaggcactgttgacttcatcttcggcaatggacaatcactttatttggtatatttatatacaattgatcaaataattagcacgagtattaattagggttaacacagaaagtactcatcctattaattataacacatgttgtgattttaccatgaatatgtatacatatgcagaacacaacgataaaatcagttgcgacgctgacaggagtgatcacagcacaagcaagagccaaggtttcagaaaagagtggattcacttttgttcattgcaacatcatagcaagtggtgacacttacttgggtagggcttggaaagatatgccaagagtcatatttgcatatacttatatgggcaacaatattgatgctgatggctggtccaatggcatgtggcctatccaagctcaaggagataacaataagtacgtattaattagtataaatcatgtgtttgtgatatgtatatatatttttattttactaattacaatattatgaatttttcaaatttagagatgtgttttacggggagtacaagtgcatgggacctggtgcaagtacttctaggcgtgtcaagtatgcaaagatattaagtgatgaagaaatcaaacctttcatgagcatgaatttcatccaaggcaacaagtggcttattcaacctcccaaccttaaacgttgaacccaaaaattataagggttaatggaaaccaagaagaagagcctaatgaactcagcacacattatatatattatgcaattaatttactctgaagcaaaatttgtttatttatgtatatgataacactttttttttggccaattgttatttgtatgttttttgtttgataaattaaaattgattttcaatataaaatatgaatccaaccatagtgtcattgaaagattaactatatatgtatgcagtaaacttagaagttaacagtttatataagtcgatccatctcttataattgtgagtgttagcttattacaagattagtccctttattattatatatatatatatatattttgacaaagtgattaaaatcactcatgaat

SEQ ID NO: 70768 - DNA, 5700 bp, Cannabis sativa
ttgaaaacatcctgcaaaattttaaaatttttaaaattatttacaatatagaaagcagtgttcaaacaacttatttaacacgcctataaaataaaagagtcacgcgtgtaacaaatttttgaacactatttttcgacatgttaattttttgagtaatttgtggcataaatacttaagtttaactcttgattgtaaataaatatctaaatttaatttttaacggcaattatacttaagttatatttctaaaactctataggtacctagctgttaaatgtcaagtaattatctgcgtgtcattttcttattcgtatatttaaattattttttttaaaaaaaaataaaaaattcataacttggaccaatcaggaattatcacgttataatttacttaacatttaacaactaaatacttataaaatttcagaaatataacttaagtacttatttgcaatcaggagttaaacctaacctaagtatttatgccgcaaattactttaattttttttttcgaatttctcaaaattttacaagatatcttaaacaacaaaaaaaaaaaaaattacaagaccatgaaaaataaaattaaactaaaaaaatctctcaaatacatggtagaattttcatttttttagccatgataaaacgacgacgtatttatttttattttaaaaataaaaatccgttacacaacgtcatcaatcatccaacatcaacggttattattccaccaataataacagtccaaactccaaaagctaactacaaaaacaaaaaaaaaaaaaaactcacttatttaattacgaaaatcccctcgttggacctttcttcacttcgtctctttctcctcttctgcaattgtgttaacctacccaccaccacccccaaaatcttcgcgtgtaatagagaaggagaaagctatggcggtgtctggagatttgagggtctctgcaacaatctcttcttatcctttcaagcaccacaatttcggaaactctcttattcccccttctaaggttttgctttcttctccttttttcatttggatttactgcttcaattctccaagttcttacgcattttattaaaatgggcttcgtattttggcattaatttcttccaccataattgggtatttttcaaattttgtttaaaatttgtgtggtgtggtacatgatttgcttgattgtttcccggtaaaaacccagactttactgatacagtatcatctaatgcaaatctaaaatcgagagggaaataagtgaaattgtagaagatgggttgaactttcttaaaatgggttagtaaagttactctctcatttgtagagaaatagaaaattttgtgtgcatttgctttcccaaatgctgtttgtttcttcttaaaatcccaatcttttattattattattattattattattatatacaatactaataattaaatatggaaaattatactttaatgcaataaattttagattttgagaaaaagggtagttgttgaattccataatcttaatagttcgcaaaaattatggagtgtttgaaaaagttcgcacgtcaacaaagttagggaacaaaaattctaattaaacttgttttaaattttgaggaataatgcaataaattttacattttgagaaagaaggtcttatttttcattgtaaaattggagaaaattcattgaatctaacaatttgttcggggagaattttttagggactaaaaagttcagagcatgatttggtaaatgatgaagttcgagtacaataatcttaattagccttgctttaatttgtagaactgtcctaattatgtggtttttttttcctccaacgttgtgaatgtttgaatgtttaccatattatgcaggtagcatttaaaggtttaaatggtggattatccactaattccaaagtccttttcaaatggccatgtttagatcttgaggggaacaatttaaagtgcaattatcaccagtcatttggtgtttccagaaacaataatctttcacctgaacctgcaacacaagaaaccgaaaatcttatcctcaatgctgtgaatatgaactttcttgagcgtttgaatttggcatggaggatcttgttcccatcaccaactacaaaaaggaaaagcgttgcaaacattgctaagcaacggttgaagatgatactcttctcagatcgatgcgctgtaagcgatgaggcgaagcagaagattgttagcaacattgtgggagcactgtctgattttgtggaaatagattcacaagataaagttcagcttagtgtctcaacagatactgatttgggcactgtgtactcagttacagtcccagttaagcgtgttaaacccgagtatcaagctgtggatgagtatgagaatgggaccataacaaatgttgattacaaagacaatggagaagcatctggttctgttgatgttacctttgatttcttcattcctgatgaaaattctagtaggtattaagagtcaaatctctcttattattacttgtttgttgtgttagtaggtgaatgagtttcattgtatgccaagccaaaaaagaagaaacttcctgagatgtcattgtttgtttagcttcctgagttttgagactagctttttgtaaatataaattttccttgttattttttattgagaatatatttctgaaaaaaatctacaatacaccacttaaaataggtttactgccctttatatattttggtatatgggtgaattttttagtttaattttttttatggtcttttatgttataattatttttcgatattttataaaattttgagaaattcaaaaaaatgtatcatgccgaaaataaggtttaaaccgtttatttaacatgcgtataaaataaaagagtttcgtatacaatagactgtttgaatcttgtttttgaatttttcaaaattttacaagatgtcttaaatagttacaatgtagatgatcaataattataaatagtgtgtactaaaataattggtggaacgaaaaaagtatattaatttggagatagtagattttcttttgtttatcgacaagttccttttcaagggtgcattagaaaagcattgtatttttttgtggtttaatgtagcaccaaaactagaagaacaattttattaatacaaaaaaaattggggatagattttgagatatttgtaaagtattgctaacttagtaattaaaagttagtccaaaagtaggtattatataatacctaatatgtatgtatatagaatagatatatatattgtttttttcttttccttctttacaaccctcgaacctttggcctcaaggcaaagtgtcaaagactctaccgtcaaggagggttgagggttgtgtcaaatgagaagctaaaatattatattaaccttatcattgaatcacctcccaaaaattgataaaaatccaaatgcaacattggttaatactaaaaggaatggtattaagcatgcccacgaagtgtttttggagtttgtccttaaagtttcaacattttaataaaggggtggtccaaagctagggaccttggtattggtaggaagattattatggaggaatgatatggagaaaaatggtggttttcaacccagtttgattacttattcttgtttcatcagaaaatgaaggtcaaaggttgtactccaactgttgtcacttacaccattgtgatttttatttactatgatcattcacaagagaaggaagctctgaagtttgttgcaaacgggcctaaggacttatgctccttttttggtaaaaaacacagtgttcaaaccctttattgaataataatttgttatagctttgcaggtctcacctttatattcaagatttaacttgatggaaaaactgttcattgattaagataattagatggtactcacagcatctgttaaaacatagtctttgctacaaataaaatgaaaattacaacaagagaaagtactaataatccaagaacaaatgttggaagatatcattcacatcttcaatttccaagaacaacaaggtcacaaatcaacaacactaattccagataatcgattcaatatattgtaaaaaacttatgaaggatgacagctaaagttgaggccagtgattaacttagctagtctctatccctatcaaatacaatgttacaatttctcgaaaaagaaggtttgaattcactataatagctcaatgtcacgaaaactaatggaactgtcgaaacaatatctgccgccaatcatccaaaatttgactaaaacaaataagcagaaaaactcacaaagatggtgcaatgcgtctgaaaacagcttggaaagtctgccccccatttctagcaaccttctgtccttcctcggtggctgaactcaagagttttatgaccgggtcaactttaagctcttcgtttgtgagagcttcaaacaaagggtgattctctaagcaagccttcatccagtctccgagttcttccacatctgtgatagtgtatatgatcccgccaacttgtagaacataagcatactcgtctagcaagtgtggactgatcaccctacggcgatgattcttctctttgaagtgaggatcaggaaatagaaaaaacatctttgaaagctgccctttctcaaagtaatttggaatgtatttcatggaatttgtccgaaccactgatacattttggtattgacctggatttgtaccccttagagctaatatcctttctttgacatactctgtcaccttatctcttagctccattccaatcatcaatgtctcagggaaaagagttgaaaggctgattagaaggcctccaaaaccgcaaccaatatctgcaaactggattttcttagacccttcactccgttctgatgaaggaaataattggggatagtgagtggaataatcaacattagccggggagataggaatgggaaagtgagaatcactcagagggttgctgtgggctctagctcggtaaaatcgctttcggggcaagccggttgacttgctaagagttgggtttgtttcattgtccaacataatttgttacttttcacaactgtagagttaaaacaatttagaattgtcagttcatcttactcttaccaaaaacttcatgtgaaaaggatatatagatatgtaattgaaagaaaaagaagtataagaattgtaaacaactgcttcaaatttcaatgtcataatgaaaagtgaaaacccagcaatttttgtatgcctatcaaaatcaaatactaaacctccctacatttttttttcaagtccatagaaaaacaactgaatttaagaaagactaaaaaaaaatggcaaatcaacacataactcatctatctgagaagtctttcaagtgggcaatgttgaattcatcatatgagtaaataaatatatgactttgcctcttctaagaggaattactacaagcagttggagagcaaaggcaaagctatgaactttgaagtgcccaaacagtaatttgtctatattgtttcaatatacacgaaagaactgtgaatttataactatttgggaacaaatagatgatcatattcttctatatactatggagaaatcgattctacaaaaaaatttgccttaaatttctttacaaggatttcattgtgagttctaaatctgtaaaatgtgcaataaaaacagatatggaaat

SEQ ID NO: 70769 - DNA, 1086 bp, Cannabis sativa
taccatataaattgaaacaaataatgatttgaaaatgaaggaaaggttaaaaacttaagtagtgcaaattattctaatttgtataaaagggaatttgtaaaggaacccaaattcatcacgtaatgctatccagcctggctcgctcaaacttatccctaaaaaataattcttttccaatatatatactccatccatttataataaatcaccggaaaactgcctttactaacttccataactgtacgactcaaaacgggaaactaactcacgttgataaattctaaattaccgagattttagttctaattttttcttaattaataactgaaacctcaacttacgtgtcaattcgaaaaatattaacattttgtaacgggccaccgcgaaataccggtttctttaacatccattaccagattcggttaacccgctatatcagttaccctaatactgtcttatataaacctctcttatttattctctcaccatataatacagaggcgctctctctctctctctttctcttctccttccccaaccgtttcgtcaaataataaaataaaaaacattctagtcatttctttgtttctccattaatggagtctttattatcgcgtaaggtaaagggaccatggagccccgaagaagacgagaaattacagtctcttgtcaaacaacactcagctaggaattggtctgtcataagcaaatcaattcctggaaggtccggtaaatcttgccgtctccggtggtgtaatcagctctctcctgaagttaaacaccgtccgtttaccgctatggaggatcagatcataatcgacgcccattcaaaacacggtaataagtgggccaccattgctaggcttctcgaaggtcgtacggacaacgcaatcaagaatcactggaactcgactttgaagagaaagtgttcgtcgtcggaaaacgatgacggcgacgacgatgaaacatcaaatccgtctaggaaaaggtttgccagtggcggcggtggcagcgatcgtccggtttcagtacagggaaacccttgtagctcaggcggtagcgaatccggatcggatgatgcttgtg

SEQ ID NO: 70770 - DNA, 2424 bp, Cannabis sativa
tgagatagagtgttagcagaacggttaatgtgggtgatacgggcgtcggggagaagagataaagctgccttaatttcacgaatggtgtcaccaaagagtgaaagatcttctttggggcttgtcaaggcgtcagtaactgtcttgcaatccgtttccacctgatggataggaaaacactcttcaatgcaccaaagaagggatgtgaggagagcttttgcttcgagcgttgccacatcgcctcctcctaagtgagaagaatcgatagcagctacaacttgaccttcgctattacggatgactcctccaaaacctgcttttgcactattcttcgggattgcagcatcagtgttcagcttgaggtggccctgaggcaggcgaacccagatggatgctgggggggacctggtcaccggagactgaagctgacgaacttgggaggaagacttgtactctgccagaaaactattggccagattgaaaattgcatgactttgatcctgcatttggttcttgatagctttgttcctgttatgccaaataagccaagtagcacagaggaaagaatctacctcctctttggttaagttagtatatatcatatatcatggaaagaagcagtaaaattaggtaaagagtaaatatagcgatagaagactatacctttccagacacttcgaacgctctaacagaagaacagggcatgagaaaccgtttcttcctgatgaccacaacgttcacaaagggggttaaggagatttttcctaaaggcaagattctttctggttgggagtgtatctgtggaggcgcgataggcaaaatgttgtaccttaggcggaatgtggagatgccacaagattttccatcagggggagggagaggatgatgaggggatatctgggggtgaggtagatgaaaagcttagatgatatactgatttgactgagtaagttccagattttgtgagtttccaaattaggttatcatccatggggtgaataggaagggggatagaaagaatatcttgtacaatgtggggtgaataactgttatgaagactagggagatcccaagtcatattggtagagataaaagaagctactttatcagggaccggtcctataggggtgaccctattatgcccatgaatccaattgtcaagagtagtagaggtgttttgcccattgcctattcttgaaataaggcccttgtgtagcaactcttttccccaaaaaaatgctacgccaaacaaatgagggggaatgtcctagggagcaggtcatgaatgtggaattcgagtggtatctggctgctaagactttggccatagttgagtttgggtgcttgaggatgcgccaggcttgtttagcaagcaaagcctgattgaaatggacgagggagcggaaatcaagccccccgtgactcttggatttgcagagtttatgccagctttgccaatgaattttggggcgattgttctcattaaagccccaccaaaagttagccatgatagattcaagggaatggcatgtggtgaccgaaagacgaaagtaggtcatggtataagtggggatttcctgaatgactgacttgagaagggtttccttacctcctatagaaaaaactttatgtttctagttgttgattttgatctttgattttgttcatcatattgggatcccagttagggctactcttagcttgttcgagatctttctcaaggtgagaaatgcgccttttaaactgaaattttttttttgtggttccagtcatttaagtgagcagcacatttagtttgagtagcaaccaggcgggggatgacctcaaggttactggaagggcacttccagttcgaattcagggtgttatcccaattgggctccgagagccaaacattttcaaaaaagaatcgctttttatcttaatcaggggaaggcctggttgtgcctttggtaacaagctcgagagcatgatgatcagaaccgaagaaacccaaatgtgagaggagagcattcgggaaaaggttagaccaaatcggattgacaatgcaccaatcaatacgttgttgaatgttttttggggcggctacgttattgttccaggtgagaagggggccttttggttcgagaggggctaaattaaaagagtcgaggaaacgtctgaaatcaagggaaggacctctgtcggggtttcccccttgcttgtcatccaaattaagaaaagcatcaaaatcccctattataagccaaggatcagtgggattattgtccccaattcggtttaagattctccatgtgtggggcctttgggccacaaagtattgtattagtattatttgatctgggtcctggtccctggtctggatcctgagtcagggtccgagtctgatatcgggtcagggtccgggtttgggtttgggttcgagtt

SEQ ID NO: 70771 - DNA, 1259 bp, Cannabis sativa
attgagtgaaaaccacagccatatcgattctcaaaataagtagttcaaagttttagttcccaaatacatatatagagaaaaagaacactaaagttttaagtacctgaactgatgaaatcacagtgtgtgatggtgtctctctatgggattgggctagtactattggagaactccattatcagttttcatgaaagtgagagagagagaggtctgttcctaataatattagtgttacaaaatcatcacatgagaaaagtaagaaaggattaagaggagaaattaacgaaatccaaataaatccttcccttatctaagttggtccattgagaagctgccatatctgattaacaaaatctaataagaggtgtaaatgtaatgtggtggagtggaacccacttggggtgattttgaggccccaaaagaaacacaaaactagtatcaccacacacacaccattcaattaatttcacagcaaatcttcttcaaaaagaaatatcacacacgtgtaacgagttacaacgttaaattttcaagttgggtgtcataaataatgctcaaaatagaataataatagttcaaaaatattggagtccagtgtaaggtagggtgtaaggtagggtatattatatacagacctaatatctttaatgaaatgtcatggccgacatcaaaaaatgtttttgaaattaaaaggaaaattttactttttatgattaataaaacacctcatatcaattttgactccctttattaatttgtaccaattaatttctttgattacacgaattttccattttacctttttgtttttaatgtaattttcgctaaaatcgcgagatttcattttttggagtattctgtgtgttcgtatttttcttgacagtttctcgatacgttctcgatgagaatgtctcaaggtcagtaaagacatttcttgacgggttatcgataagttcttgaaaggttcttgactcaaatctcccaaggtcagggaagacctttctcgaaggcttttcgataggttatcgaaaggttctccactcggatgtcccaaggtcagggaagacctttctcgaaggcttttcgataggttatcgacagtttgtcgaaatggcaaatgattttgcatttccaatcatgattgaggtctattttagcaaaaaaaagtcattcttggcatgttatcattgcgttctcaattgtttgtcgatagtttttttgatagtgtgtatagttgtgtttttaaactttcttgtccc

SEQ ID NO: 70772 - DNA, 1219 bp, Cannabis sativa
cgaatatgaatgcataacaatcttaccataaatgaaaaaattattttatcaactaacttgccaaaaaaagactttacatatataaagtcttaattatatacaaacagtattataaagtatataccttatattatattatagttacgttctatcataatattaacctatatataaaccaatatatattattttatatatatcaatctttggtaggccagtcatgagcatatttaattcctatcaaatatagtgccccgaactgtaaagtttgactctatcccagttatgaccaccaccacccccctttgtgatattcctattccccaatatatataaacctaaattttatattatgtttcttaatatatatcattattcatattcttctaattgtttagttagacatatattaacaccttttaacagataactctaatctctagatatttcattacgtggtaaagcctacactagatatttcattactaattatacattttaaatgtttatatataacgggcatttttatatatagtagactttttgttagtaacattttaaaaagaataaatattgattataagttataacttaaagtcgcttatatgtttcttttaatagttggaattttattttaactaaaattaagcttgattagtttcatccatactttgaagataatgataattaatacaatagcataacatcatttttttaataaataaataaataatttaagtgccaattacgtttgtaaattgcccactaaagataaattactaattttggtaacatcggcggcaggctttcacaaaacactcttcaaagaataaaaaatcaaatacaacttattaatttcaatcatatttataggtctatgttggttagattgcattacaacatatattttgtaccaaatctagtattttgtatatattaatgattaaatgtaaaacttctttttttttttgcaaatagcctgacatatcattagttttcaattaatagataatctcttagtacattttttaatatgtcaaaaaatttatctattaaaatgacttaaaatgcatgaagagactaataattgattagggttatataaatttcgttgattattttataatatgtaaaactataaaagacacgcatggagggtattacaaaattttatttaattacactctatagtatcgactctttatcaattagttgtaaa

SEQ ID NO: 70773 - DNA, 1967 bp, Cannabis sativa
  modified_base (37)..(57): a, c, t, g, unknown or other
  modified_base (113)..(116): a, c, t, g, unknown or other
aggggtatcatttggtagatatcaaagtctaaggagnnnnnnnnnnnnnnnnnnnnnatcactgaactagtaaaattgaattaaatttaataaaagtccttaaatctaacaannnnaatagttcagggggaatttataacgactagaaaagttcaggggacataatttagtatatgtcaaagtttaggaggagaaaattctaattagccgtaatttaattaagggcaactccaatggtgaaacttaaatttagtgtttaatcaacaacaaaaagtactattttagcactattttttttttctaattctaaccacaatactataaattacacaaaaagatatattctttattatttttatctataaatataaataatacatatatattaagaaaatttaattatttaaccattatttaattattaaaaactaaaaaaatagaaaaacaattttagtatggtatacagtgtcccactaataatagtgggaactgtagacaatcctttatatatgatagcttttagtgttcggttaggataattttaaagaaaaacaacactaaatttgagtttttttgtttcccattggagattccctaagagtaacatcaaattagatccttggtgtgttggttatggccttagggatgtggaggcggcttctcatgtagttattttctatccattacttgaaatggtttggcgagagcttggtttgtgaagggagctgcaatatcgtggtggtggtctaacagctaacttattagttgatttatttcatgtgctaaggcttagagagtttgcaatggttcttttgtgggtgtggtttgataaaatgcttgtatttatggtggtgctcattctcgtttggaggtcctggtttccttagctacgaatgcattagtgaatttcttaggtgctgtgagtagaggttcatggtgcacggggatggtggtggtgaatttggtgtgggtcatacggttgggagggtggatatgtgggtgaagtcggcggtgggtgagttttctttgagtattgatgcttcagttgtggttggaagggagtttatgggtcttggaggggtgattcgagatggaaatggagtggtgtgggcatcatgggtgatagggatgcctgggaagttctctattaacgtggaagagttactggtagtcagacttggtcttcaatgagcaatgaggttggggtttttaataagcaaggctgaacaatggtggtctcctagataaactcttcagtttgtaatgtattgtttgttatttgtgatgtttctcattttatagcctcgacttatggtggctcttactatgatatctcatgttctgtaaatggtgtagctcatgcacttgccaaatctattacgtctttgtaaggagttttagtttgggaaaatgtttgtcctcattttattagtgctcctgtaacagttaatttgttggtttaatgaaatccttcttttttgaaaaaaaaaatagtgtgaaactggtcctaaagcagaaacaaaataacaattgcttcttcaaacctcaaaaagtttgtcattttctcgcaagtcataatcacatcatagagttttgataattggatatatgagagggttgggcatccgatccaatctaaatttttttgcttgatctaatctaatctaactactaatcggatttagaaaatcatcatctgatccaatccaactagaccaaaaaatccaatccaatccaatccaattactaattggatttgatcggttttttaattggatatccaattacacacctaatttttaatattaacttaaaataaaaagaaaaatacggaaaaatattaccctttattttaatttaatactctataaaaatatcattgttacaagtttaatgcaactaaaaatttaaaataactaaaacaataatactcacaattaataaaaaaagaacaaaatatcatgaaa

SEQ ID NO: 70774 - DNA, 838 bp, Cannabis sativa
tgtaacggtattttttataattttttcaaatttttaatctattatataaaatttttaaaataataatataaaaaaacaaaaaaccaacaacaaaagacaatatttttgtaaataaaatcttaaaaactgtaaaaataattaaaatttcttcaaccattgtaattttttattattattattattttgtatatttttaaaataatccctaaaaaaaatgaagttgtataacccccagctattgagtgaagaactgttgcgataaagctttaggattggtttgaatttggatgagagaaaaatgaaaatggcagtgaaacccttgccacttcccttacccttattcaactgctgctcatcatgttgttcgaaaccagcaactagtgtgggtgtgaatctgagcaaggcctcaggcagaaggggaattgtaatggtgggtattactattatagttgggtcattgggtttcaattgtggtcagaaattggcaaatgggttggagatgggaatggtgagtccggatcagacagttgaggaagcccagaaaggaataagagggcatgttgttgctctgttaaaggtcaaagatttaattgattcacactcatggagtgaagctcagaaggctcttagaaagacctctgcctatgtcaagcttgatttgtatactattattcaagctagccctccaactcaaaggtctctacttagaaagctctattttcaactttccaacaatgtctccaatgtaagtttaatttgtttctgctcttttataattctctcaacaacaaacaacatatacctagataacatgagttattatattaaaaattataag

SEQ ID NO: 70775 - DNA, 1473 bp, Cannabis sativa
ttgcattctctttgtttcattgttaaatgtgatttcagctgagactgaatcgaaagaatccgaaaaggagttcgttctcggagtgtgttcgccaattttttgcagcctttaaaacttgacattcgccattttcaagcagtcacaagcatgaggttcacaggaatataatcaccagcgatccctacttcaccgtctactttgttatagtggtgctacttcacctggtttttgactttatatctaacagtacctccattagttacatatactcagaaaaagtctttttaacaatttgggcaatgtccccaacttttacattgacatacatatacttggcacaattttttttaaaaaaataatatcataaaattaccaaattatcttataaaacggttacatactgttttgattgcttaaaatatttttttataactgagtaaattcttttcatgcataatctgtaactttgttacactaatttattaacttggtaaaataatttatgtatattcgtacaagtttgattttttcatcatgttggcaaaattatcaaaatttattttattcttttataataatatttcttttaaaaaaagtgacttattgttgatgaacattcttaaaatacttgtaattttgtttattttattttattattttcttgagcaatattttttttttctaaagtgttgatcggtattttttgtgagtaagtgttatccttcttctcatttttttcctttttttttggattcatttttttaaaattaggcaaaaattaaaaaaattaaataaaaaggggatatatttttcatttattttctttttttgaaacttgttttttgtttccttttttttataagggaaaaagaatgggtaaattcattggttttaattttgtttcaaattttgtgggatttgggtctttatttttttattttttctcttttattgaaacactagtaaataacccgcgcttcgcggcggttgtttaaaattttttaaattatatatatgaaatgaattatgtattttatttgataataactaaataataaaattgcattaaattttaacattattaaaaaatataagaagttagatataaaattaggcaaacccgattcaataatttagaatctgaaccgcatatgtgttttatttaagacaataacaaagtctcttaccgttaataacagaatatttagctttatatatagaaatagatagatagatagatggataggttatttttagctaatagtattatttagagagattttaaaatgacatgtcaccacctcatatatcttatttatatatatatataaatttgagttcaatgtaatatttaagtatcaaatgtacacatctaaaattagttatatatcatctacagggccgtctcaaggtatcgagaggcctagggcagaatttaaaatgaggtcttttctctttacaaaaatttaaaat

SEQ ID NO: 70776 - DNA, 1573 bp, Cannabis sativa
tttttataaaatattattagaataataattttttttttaagtgtgataaaatataataatagatcattttcttaacactttattggagatgctagttgattatatgatgcatatagtaactccattttaacatatatgaaaaataaagaaagagagtgacttcatccttatcattttaatttgagcatcccctttgttttgaatcgactctctctctctctctctttctagctcatacacatgtgtatatatatgtatagatacaaaaataaaagggaccattcattggaccaaaccttccatttatagggggagcaccccactagagcatttttcaacttgttgtgtggtccaaaatcatattgataaatcaattacactctaaatatataacacaaaaagatcgtacggacgacttgggtcatttggactaaatttttcattcttataattgctacttcttcttcttctttctttttcaataaaaaaaaaaaaggaaagaatatatatgtaatacgaatgatatatataaagcgttatcactttgctactaattgtttgtctaccttttctttctttgttcttcgttatccaacgaaatatttttaatattcaatttactatatacacatatatgtatatatagataaatagtattttatgataagacgttgatgtgcgtttggttatatattgaagtaaggtcaagtaagcatatattttacgagtcatatctcttttcttattttcattctcaagtggcaaatcgcataatgtattggctgccataaatttatattaaacgaatatatataacataggatatatatatatatatatcactactatatactaggctatagatccttacagagtatagtatggtcttcatattttttttgaaagcaaagtatggtcttaatataatttcatgtgtgtctttttctttaaaaaaatgagtgagatatttatatgtataatatgaaatatatatatatatattgattatgtataaaatacgaaattaatcaatatatagattataattatagaattgaaatacttttaattattgattttttaagtattaaattctacacgagttttggatctccaaaagaaaagaaaattgattagtattggtaatcgagcttacaagctctctctactttctttagatggatttattgtgtttcacagaatgagtagcgagctcggaaaccgaaatcctatatctatataggtgagacattccatcaaaatctctctcacatttaattgtcagaatattttaacaattaattaagaaattaaattaattagtaaatcgtaatttgaccatataaagaatatcaaccaattaattgtatccaaattcaataaatatgaaatattcaattatcttaaattagttcattgattctattcttaaaatggatatttgcggcataaatactatatgttttcggttttatatactgaaataacacatgtttttttttcgacggattaaataccttaagttacattttcgttacttcattcactacttttctattataaatcatattca

SEQ ID NO: 70777 - DNA, 792 bp, Cannabis sativa
atttaaaatatattgaaatcatgatttaaataacttatttgtatgtgagtacgtgtatgtattgaaagaagtatgccaaataaactatttgaatcttcaattagagattttaaattatttcaaattttcaaaaatttatgagagatcttatatatctatattgattatcatgtaaaaactaatagaaatgcattaatttaaccatgatgattattatcgactacaaaaaaaaatgtgagtaaatatagaaccacatccacatgtgttgcttataattagttttcacaaagcatattgtatttatctgggatatcaaaatcaagataaggaagaaatgtaagagtagaaccaccttgtgttgcttattattagttttcactaaataaaaaattgtaaatatgctatatctattaatattttgacttgaatatatatatattttaagaagtgttttatatataaatatatatgtattgattatcacgaattaattgaatctctttaaagatatacctcatttcgaatacggaacttgcatcagtgaaataaacatctccagttaactggtcaacatttaagccatcaggaaatttaaaaggcactccttcagcccctgtggctagttgtacagcaagtttatccttacctcccacaagcaaccctttatatgcatccgcgatgtacaaaagtttttctttataataaaactcaatacctattggtctcccacaaatagctcccaacatatttgttccatcacataatctcgacctgaaatataattaaaaaaaa

SEQ ID NO: 70778 - DNA, 1108 bp, Cannabis sativa
ttaagcaagtttcaaaagtgaattaaaggtttttttccatgtatgtttcgacacatttggtttctcatttaacattgaacttctggagtataaaatggttgatgagtagtgaccattgttaaatcatcttaggcctttttagtattaattgtttaacattgaacttcctcaatggtttagttataaaaattgttcgtgtactgctgctcgctaaatcatcttatttcttttttatatctattgattcatttgtttatttttatttactctaggttttttgctgttctgctataatcatgaattgggttttcatatcttacgattaaccctcagcgtctctagtgagtttatatagattcaaatcctaggtaatgatacagtagttttgagggttacattagtcacattctccctcactttattcttaggagatgaggctactagtagaagcatagtggtgtacaaaaatttccttccgattgataaccaatagctttgttagattgttgtgacagttagaattggttagttttgttaagtgccttgtaaattcttaaccaactgtattgattttgttataacagaaatcctttctttttggtaaagctttgtttgtttataaataaacgattgatctctgtagaatgctaagggtttggagcattccttcagagcttattttcattttctttctcccctattcatattgtttcatggtatcagagccactgactggcgtcaatggcttctcccgacgacacctcctcttccgatcctattcctctgcaagttactacaacaactcagaattggaatcctttctccaattcccttccatcgtctcttacattcaagttggatcgcactaattttctagatggaaaccaatgtgattggtcatgagcttgatgaaatcgtgctctctgatctcactcctcctcaacgactcatcaatggagatctcaatcctattttcactacttggcgcaagaaagatcaacttcttctttcttggtagcgatcatccatgaccgaagacatccttggcacagttgcgaattacaccagctttcgtgcggtctagaaagccttagagtagaaattctca

SEQ ID NO: 70779 - DNA, 1292 bp, Cannabis sativa
aaagttcaaaggacaaaaatgttaattagcatatgtctattatgtccaattaatagtattggaattttttttttccctagcagaaaaaaaaataataatattggaatttttagatggtgtctttgctagctttgtttgtcttccttgattctttttattggtatattcaactttaattaggttggtgatggatggtaattaatatatatatattgtatgttaattaaataatataatttggtaatgctatacactttaatttttttcaaatatatatatatatatatcatagataatttcagtcatcatagtctattaattaatttcactatttaaaattaccttccaccatacaagttgacttagaaaaatatatataatttagagtatattaattaaacgtaaataagctaaatttacatgtaactataataacttaaagaattattatcctagtgaagaagatctcgatggattttgaaaaagcttagatgtctttattagttttcggatgtgcataatttttaaggattaattacactatctaaatgagatttattttacaaatcagtacaaaatcatacctttaacacaattctgattacatatatttgcaattcagtatgaaaagtatctattatgttgcaattttatcattactcaaaatattgaagattttgaccaaattaactaagctgacgtacttgttagtttatagccaatctattttattaattgttggttgattaattaatattattgatatcatacaatgtcatattcaattcatcaattgaaattccaccttaatccaaccatttttagctcaatccaaaggtctaataggagtatgcaatcttatcataatataatataatatatatatatatttatatatatatattacgtacaaaagtaaactgactaaacccattttcaaatatggtagttaatttttctaatgtacgtccaataaaatttgaaccacttttatggagaaaagaggtggattcaatcaattgtatcctatatataaacctctattggttaatttcgatttatttatcaaacttctcaacaactttccctttttttttcttttttttttttttttgaaaggaatatcatcaaatatataggcacaaagcgaaatgtgtcgtttaattggaggtaatgaaataatggattggaatggaaaagaaacaatttttattccattcatttgtttagttgcatttaaaactaatgcggaaaagaaacaaggtctaaatattatttgattgattgattaa

SEQ ID NO: 70780 - DNA, 1505 bp, Cannabis sativa
gaaatgacaagtcctctatcacagcagagtagaggaatttattaaagtagtcctccataatttatttatgatcattacatcaatttatttatattttttaatctatttaaataatatatttatagggacacgattttgtcatgttattgtacttttacagaatgtattttgtgatgtacaacagccgttagatggaagagttatttgatctaagggctgaagttgatctaaagaaaattagggttaaaaaatattaacgtaccttgagacctaatattattacgtaccctgagactcatctaatgtattcagtacatcacggaatacattccgtgaaaatataataacaggacaaaatcgtatccctatatttataagacacacaaataaaaaaatattatatattacataatatttatttatttttacacttaaaattaaataaaatacattataaaaataacaaaaaattataactaaatactaaaatcaaaataactattaactacatttagctaagtactattcataaagtaaatttttaattttttcttaactcttaactttttgttaacccttataactattttaggttagctaatattataagtggtcttagctataaagtgcaccacttcatttgcatgaaaagacatgataccattgtccataattagtggacttatatccataaacatgtacatctctaatcatgtaatttaatcatatgattatataatgatatgtgcttaaccatgtaatttaaatgtccataatcaaatgtgcttagcatgatgatgtcatgatgattatatatattgacgtatttacgtatgtacatgtttatttagtttttgtttttatgaaaacaaaagctttattgaaaaacaaaaggcctaaaagcctaagttcatagtggcaacaaagggtgccactattgaaaaatctatttctttttcaaatgtggaaataaagtatattgaccatttcaaaaaataaatatataaataaataaagtatattgatattaaaatattgtaaacatagtcacaaatttaatatgatcaaatatatttttaaaaatatttcaaaaaaatatacgttaaaattatctaattcaattaattaatttatgtatttatatatgtatgtatttattgaatattatattattatttgacttttcactcatacttaaaaatgaatcaaattcataattatatttattaaatttgaaaattaatttcatatattatatatgagtacttagaaaaaatattaatttattgtgatatattaaaattcttacaaatttgttaatattatagatttaataatttttaaaaaatttctcaattaaagggagagaaatacagttaagatcgattaagatattttgaaaaataatccttgcataaagtatagtatgaacgatatagttcaatatgacatatgccaactgtaaatcaatattattcaaagttgagttagaatgagtaaaaaaa

SEQ ID NO: 70781 - DNA, 1349 bp, Cannabis sativa
gcagaatatacaatcgtattgaaaattaaaaatatcccacataattgctaaaaggtgtaactgaaatgcagctatcacaatagcatgaatattccattagaatgctagttgttgtggtggtggtcctcatcaaattctcttatgcatatcctctcatccaattctgtaatggtgattttctcattttcaacaggccccctcaagcttggttgtggagagtgagaaacagcaagcttgattttaagataatgaaactgtgagatgctgagaggttttgtgagtatgtttgagatctgctcttgtgttggcacataccttacttcgactcctttgcttagcatcttttctctaatgaaatgcacatctatttcaatatgttttgttttagaatggaatacagaattggatgcaagttttcgtgcgccagtattatcgcaccagagaacagctggttcaaagccttttatgctaatttcagtgagcaatgattgtaaccagaccacatcattacgagcttgggctaaggctctatactctactttggtacttgaatgagctacaaccttttgctttcgagagctccaactgactagattattgctaaagtaaatgcaaaaccctatagtggattttctatcgtcccatgagcttgcctaatctgaatcacaatagcctttaatggctagtttgggagctctattgaaagtaattccctctctaattgagctagcaaggtatctcttaagattttcttgcaagcacttcaatgattttgagtaggagagcttgtaaaaaatgacttattttattgactgaataagcgatgttaggccagctaagagtgagatattggagagctcctataacactccaaaatatggttggatgcttaaattcagcgttatcttgtaatcttagtttgttgttttggttcattggagtaggacatggtttaacattgatcatattggttttcttgagaaggtcaagggtgtatttggtttgagataagtgcagtttatcatgccccctactgatctcaaaactcagaaagtaatggacggaaccaagagacttaagggcaaaaaggctttgaagtttggcaataatggcagtgacttgagatgcattgtttcttgttaagagtatatcatttacgtatatcaagacaaaaaggaaggcatcaccattgtggtaaaagaatagagaactgtcagttcaggagttgcaaaaactaaaggcaagaaaggagccttttaaattatcgaactaagcacgagaggcctacttgaggccataaagtgattagctaagttttcaaacaaccgtgggattagtagggtcaacga

SEQ ID NO: 70782 - DNA, 753 bp, Cannabis sativa
attttggggaaagtggagacatacatagatttttcaagatttagtagtgtgtgtgtctcgtggcattctttagcctttaaaaacaagtatactaaacaaaacaaaatgttgtcccaccattaccttccaatgcttttggttccaagtgaagaagaagaagatagatggagtgtatacaatgttattgatactcatgatcgcacctataataataatttaaagttgaagtcatctttattatatggcaagtgtttcagcggatcttctttaggttggttagtggttgtgaatgaagactacactataacactttataaaccttattattttatatcatcatcatcttcaaacccaaaaactactacccatgtaaaccttccgtgtttgcttcctcggcctctttctgattatgatgatattttagaagaagatttttatgatgttgatatttacgatgataatccagaagaattttattatcaaggaagcgagtatcacgtaagcaaggttttaattacagctagcccattaaccaataataagaataacattattccaaacgatgagtgcattgttgttgtgatatatggacacatgtgtgaattggcttgcattagatatgggaaagacacaacatggacaaagattatagatgagaaattttctaagggatttgaagatgtcgcgcattataaaggcaagttttatggtcttacatttgatggaacacttgtatcttttcaatacccaaat

SEQ ID NO: 70783 - DNA, 4598 bp, Cannabis sativa
cgctcttccgatctctaagatcctggtaaaataattccaacagatacctgtagagctcacacctccatcccatcgaagaatgacatgcaactagtaaaccaaccatcaactattggtcgaatctttagatggaattgaagagatcagagataggtctaaacttaaaaaggcagtgtatcagcaaagggtcacaaaacactacagctctaaggttaaaaataggaaatttaagcctggagacatggtgttacaacgagtattctttaacacgaaagatccatcaacaagagtagttaggcctacctgggaagggccatatgcccgtcacttaaaagcacttgaactcaaaacttacaagttggcacgctatgactacaacttgaatccagtgctagtaccaaggtaatagaacagggtgcatctacgacagtactaccatcaatagcagctatcttcaaaatagattgcttcatagtgagattctctttaccatgtgcaagtgaattgattgcctcttagaccgacgagatgcgacaaagttagctctaggctaagaggtccatttctatggtatggctcctatactaaaaaattcaaacaaggcattagtgtagtgtggatcacttcagctaagctttgatgaaggagggaatctgcaactactactttaaagtatacttctttcttccaacttagctcacagtaatgtaattgtatttaatttgatgagaaaaagcgtagaacaatttttttttggtatttcatttaaattaatcaattgaagatcacagacccaatgccggtctcaagcgctgagtaaaacttgtagggttggtcttgagataactttggttatttctttagtgatttcaacaccgccacccacgaatcctcagataagtggagaacatgtaacaccactcaagagtaatgatcaagaaggcccaggggcatttggtatggaaagtgaccaatgaaggcacttccttgatcacttggggcacataggttatgttatggtatacgagatccatatgttacactagcattaaaaaaatttctttgcacgtgtaggtaagtaatctcatggtaaagataactttaagaagaaatgacattacttccagtgattgagtttcttaagacatggtgtattgtgcaagtgttaaacggtcaagcagtaacagataaagtaaaataaaaaagaaaatattggaataacaacttgcttaagttgaaaataatttctaaattaactacaataaattttgataacattttactaaggcttatccacatggaaaggccgcccgggaaagaccaactaatacagtaaagctaaatgctaaaaaacaaaaatgtagaaaggactgagacaatgtcctcaaaccttatcacatgaacaatagcttcatcattgccctcaccttctacaactggcacatcaatagcaaaaggagggaattcgagatgtttggggatatagcctttaactcttgaagcctcttcgaccacttgctcaccactattcatagtgaagtctattttgcggagagtttcttcactaaaacactgctgacactgcttgataaacttcggcacctgtatgttaggaaagcccttcgaactgaatgacttcgctcctccatttgcagaccaagctctatagatggcatcaaaacataagccatcataaaggtgacatcaagaagagcctgatcctcaagatagtcacttgctccttaaagaccttaacttggtgtctaagatcagcagctattgaagtttgttcatctagtgcaagacgagaagactcttaaagatctgaagtcttcttctaaacagttaccaagttcttcttcaggctacttgctcaagctttagcacaactagccacttcttgaagattggtcagctcactctctagagaataaatctccttcaaagtagtcacttggtcttatgtagcaacaacacgatctctttcaacctcgagcttgtcagcaaactcaaccgccttcttgtgtttgttattcatggtgtaagcataaccaaaacaagtgtgaagacaagagaacaatgtcaggtgatgttaaacaaaagaaagttaagatagaatgagacaaggaaaaataattaccccaaagatgtcagtgaagcatcactcagcaataacatgcagaggcttggtgctaactaacttcttcaacaggacgttctcagccatggaaccaataaaggcatcaccatgtgtaagaagccaagagccctgctcatgcagctgccccaccaagtctgaacctgggttcgggacaccatgctcaacctcatccagagagcagtcgatcaaagatctctcattagtaggacgaatgctagaattctagagcaacatcaatagttctacccctattcctgaccttcttcttcgaagtagtagaagtagcagggatgccttgaaccacttccctgactataggttcagtttccttcagcactgaaattttcctcttcaagtttgaatgagatgccataacagctaggatgctcatattgtctacaaagagaaaattctagtggttagtacaatagaggaaaatgaaaacaacaaaacatagcatggagcatcagtcacctaccgactcctcatccttttatggagcagtttgagtggatttaacttctccatcttcctagtttgagaacacatatattctcctttaacttcttccaacgctatttgagacaagatgacagttacactttgagcatcctcatcatactactcgagtggcattgtcgaggattcataagcaaagagagtgttagcatacacttacttacaagaaattattagcccaacctttcaaacagtttcagtgttgaacaaggttctcccatttctttcccatgcataaatctctagtagcatggcattagctctcctcttcatgtcaatcagaggagcaggtcttttgaaaggcccaaccttttagaaagttatgtgtctcaagggaagaataggggtataaaagtattcctgatggtaaaggttgcagttactctaggtaacattttctatgtatgggctgaattggtggaattggcaaaagcctttttctttgggcgttggacttcttttaaagttacaaaggaagtttatttcatggggagttgtaacaggccaatttctcaggcgataaaatatgaagaaggtggcatgaatcctatagtcatttgggtttatctggtaagggtagaaatcgaagaagtaagctatggatataaaccatggatgcaaaggaaattaagtacccacattcatgtgtaatctcgaccaagcactacatcaagtgttctgggagccattgggaccattgtatcatggctttcaaatgacaatttcaggaagacaataatcagctcgtattaattgagcttgatgtttagtaagagcgctaaacacaagaggtcttagtctgaaggctcaatctttgggatcatcactatcaatgacagctttaagaagcccagtttccatcaccttcccaccatgcaccttggctaagttcttagacttaggcacagttagataagctctaatgaactaagccacatgggggtcctactcatcaggcaactctctacttctcttcatcctagccatgacgattcaacaataaaagttctttatagcccaagaaaagtctattgggctgtgaaaaaattccagcaatattattttgaggaaatttttaaatccctaggaaggtgttttggaattttggaggtcttggaaaaaaaattattgaagggtttttgggagtttgagaatccttagagtaagatcaacaaaagaggagaggaaaaaatttctcaaaaaaaaaaaaaaaattgacgccaaaaagtgaaaaagaaaaaaaaaattataccttgggaatgaagaacagttgaaggcttgatgaaaatgaagtttcaagaggcttgggtgtatgggatttgaaatggaagtgtgaaaattttgattgacaactctcttatttataagtgagttcaatctcctaatcctagaacaattgggagtcttttaaatttaaagctttaaaggaagaggtaaatgataagtaaaaacataaatatatcttttcccttctcttgtcaaattaaatttagaaattactatagaaataggaataggaatcaaaatttaaaaggtaacaccaattcctaatgctactaagattaaggaaaaattagagatttaaaagaaaaagataaatgataagcaaaagatcaaaattcttttctcttcttctttctctctctaatttttgaatggcattgtcaaataggattaggataaaataagaaaatttaaaattttcaaagaaaaagataactttttctctttttctttgtgaattaaatttcaaaaattcccaaggacaaagcaagggaatccaaggtcctaatttaattaggaatccttgaagagtagaagcaattacctaatactgtcaaaattaatgcccatttgataattttaagtgaaacgagctcggttcacatcatgcagtcaactccacacaagtgtaaag

SEQ ID NO: 70784 - DNA, 960 bp, Cannabis sativa
tttgaaccgcatattaaaaattcaaaaccgcaaaccgcaccgcacggtttagaaaaaattcaaaccgcgaccacaccgcaaagaatttcaaactgcatttttttgaggtgtggtgcggtgcggcggtttgagcggcttgatgaacacccctagttttacctttgtgttgaactttatcttgaagcttttggccatcagaggttacatgattcgttgctccactatcaatgttctagggattgtcatgaggaccattagctgaagttgaggaatagaaggcttgtttccctgtgatggagcttgctgggcaaaaagagtgttggtgttggactggtttgagacagattgagcttgaaaatttatgttaaatcggtggtagcacttagatacaacatgtccaaccctattacatagttgacaaactagacaatttcctcctcttccacctcgaccatggccacaaccaccagatgagtatcctataccctgagcactatttgaacacgatgtaccaccactgattgttgtagatctgctaaacaggtagcaaagttagcattggagaagaaaagtcactaatagtgggtgtattgagctgctccagacgcatctcttgactctgcaatagaaatattggacttcctacagggtgatgggatccggtcgagaggtaagtattatcacaacagggtcataatcatgccccaaaccatgacatacatcagggagccaacaacactagcatatggaactcttaacatttttgacttctcagtctcatctttaggcatctgagtaacactcaatttgaagtgttgtgcaagtagagtactaactgccttagagttactcatttcaaagatatctagaacctttctgatgtagctcgtctgaatcaagtgcagtagtttcttccgtccttcccttattatatctattcctaagatcttactaactgga

SEQ ID NO: 70785 - DNA, 1312 bp, Cannabis sativa
tctcagtttcctcacggatccctttttcagttgcttccctttccattgccaccattggaatttgttcttgatgcattcctccttttaccacattccgatcctccatctcctgcccattcttttcgacaagtagagcaaaggaatttgaagttttcagtccctgtttcggttgcaagtttccttgtgtttccgttgcctccaattcctttattgtattatgtccttcctcatgaaatccatccctgattgcattgtccactttcagccatgttccataagccttagcttgtcttcctccctcccttgtaatttctttgaactccgaagaacaatctttttggctatgtccgatttttccacatcggaagcacatgaacgggagctcctcatacttgcaggctatccatttcttggtacccccacacggtagtaagaacccaggtaacactggtttattgatactcatccaaatatggaacctgtaaaatccattgatcactattttcgctacatctgtgttctgaactgtgatgactgtccctgccattgaagccaatctcaaggtatttttttcggttagataatcaattgggactcctagaattcttccccaaataggaaaggtagtaagatcattcctccatgattcattagtattaatcattttccccaaaatcaaaaccccattagataaataccatggcatctttgataaaattcttgactgatcttgttcagagacaaaatagaatgttaagaacacacctgattcgtatttgtcctgaatcttgacattccaattcgcctctttgagcctccaaattctccccagaaccttcttcaaaaaacccctgctatgatctatatttgaacacagtcgtcctcttaatgtgttcttggcaatagttgaggaaagactctgatccacctcccaatcatcttcatccaagacatgaagctgattggtctttgaaagtagttcgtccatagcgggggttatcgatcaccaagccggaactccggcagcccttcgttgccgagggaagaaaataccaatcgagagagaagaccagtcgagagcagtctatacaattatattcctcaaggtcactctcgttttcctttttttattattaccatattcatgtttctttgtgggagtaacatcaatcctagaaatagtagatttaggcattgtcaaagtaatcatattcatttaggcataattaatttatatatttgttttgttctaagattcattctgagataaactaacttccataaatttgtgatttttgcttccttaatcact

SEQ ID NO: 70786 - DNA, 943 bp, Cannabis sativa
gcctcagccatcaggacaaggttgaatgaaaaattcagatatggagaattgtaacatatgattttttgagttgatatcgaaattttgaagggcagtgaagataatttttccctttaatttaatgtactgattcttggagaaaacttccacttcagctgtcaagattgaaatatggcagcaattttgaattggagatttggtatcacctacttgagatatctatcttggcttctacttttgactatttttcatttgttatagtgattagaataccaggatgcactatttctttctgtcttttttgtatttctcctaataatgacctgatgattatttctttttatggtctatactctaagccagttcagtcatttttttaagtgtggctaagaaattcagctgaaagaaaggatgaagtaattttaaatttctgggtctgcaatttgattctcatcatgaacaatatttcttactacaagtctacaacgaaattcaatagtttagaacttgaaatcagtttggtacagattataaatacgagatataaatttggtttttcattgcaacaaaaatatgtgttcatataaaaacatgagaatatagctatcactattacataatacgatcaatttttaacttaacgatccaatgaactttggattatttggaaaaaatattatttcatttgactcagattcccattatttattgcgcaagtttgtttttcaatatgccaagttttgagtattataaatttatagccatagattctcttaacaaaaataaaagaggaatgatattatcgaatgaaattttttgaattgagtggcgattttggtcgtttttttttaagacgtttgcggcactgtctaggagtgtacaaacattagaaatttgccggttgtctccattgtaatcccactgcactgtagagcactcttga

SEQ ID NO: 70787 - DNA, 1011 bp, Cannabis sativa
tacttatgaactaaccaaattcaagaatttataaaattcaatctatttgaaggtcaataaaatgaaattttaatctacaaaacactcaatatgacaacttctagcaattcaaattaccaaatattagcctttcctttctagaggttcagaaagcaaatataaataaaacataacaatagtaaaataaaatctccaagtatgtattcttcacaaaccaattataatcaaaataacaattattacaaaaataaagtaataataacaattgtaattaaagtcattaatataataaaatataataagattgatatatagttgaatcataacctgaggagaggattaatacgtttaccttggaactcagcacaatcaatgactctgtctacttcctttggcaaatgaaatggtaggaactgagaaagagaattggggtgcagaagagacagaaacaggtaagcaagtttggttactaatacctcatattaaaaaggttactacttactaaatatataatttatataatataggattgaaatttgaagaatatggttatgttgagttgtgagtgtttgtttgtgtgtgaaccacacattaaaattgttcactatgttcttctcactaccacaccacacacaacacaagacaaacactatttggatcataagaaaaaaaaaatgaaattataacaaatgactttaaatcatagcattgtgtaagtaaatatcttcatttcaaaacttgtaagaaaatgatatgtttacactatttattatttatattgtcttttgttatagaaaaaaaaaattcatatttattttagaattagaagtaaattatttgaagatcctgatatatctatattagttttattaaaatcttttttattttaaagttgtgtcaattttttataggttgttggtatatatatattttgttgtatattaatagtggtatataattttgttagcgtaatactaatattttaaagtaggtaaataattttgttagtat

SEQ ID NO: 70788 - DNA, 1541 bp, Cannabis sativa
cacaaattttactgttttaaagattaaactaaaaaattgctaccaaactttaactttatgataaaattttgataatttgataaaatagtttataaaaaatttacattgcccctttaaaagtgatgcacccctatttgtttttgtatcagagagatttttttgtctattttttttatagtcgtgtatatgataattatttaagattttctgtaaaattttgagaaattcaaaaatattgaacacgttgaaaataaggttcaaactgtctgttgcacacatgactcttttattttatatgtgtgtgaaataaattgtttgaacattattttctgcacatgtaaattattctgaatttgtcaaaattttgaaggatgtcttaaacaattataacgtacacgactattaaagtcaaattaggagggtaaattatagacaccaaaaaatatgtgattgaatcaaaaaattattagctaaaactattggatgctatattacattctcttaaaagggatgaccaatacactcatatttgttttggtatctgagagaattttttagtccaattttttatggtcgtttatgttgtagttatttaagacttcttgtaaaattttgagagatttggaaaaattttaatacactaaaaacggggttcaaatagtttattgtatgcaagactcttttattttatacgcgtgtaaaatagactgtttgaactgtatttccatcatgttaaacttttctgaatttctcaaaattttacagaatgtccttaataactataacataaatgattataaaaaaatagactgaaaattcttctaaatgccaaaatatataaaaaaaagtgcattaatagatccattttattgtaaaaattttcaaaactattaccaaagacaaaaactaaaactatggagccataaccttttaataattagataaataatacctagtgtgattaaatttataaaagaaaattagtaaagacaaaaaaataatatattaaaaaacattaattgatcatccaatattttgagcaagaactaaataaaaaaagtcttatttatttcaagttttctaatcaaaagttattgtgagaatattttattgaaaacaatagggggactttaatttgcttaactatttaaatttatgggtgatcgtgatttagactccacaaaaagaggtatatggaggcaatttttatttttgttggtatcttgaaaatgttttagtctaatattttttatccttatttatgttatagttaattagttatttgagatattttataaattttgaaatatttaaaataattttcaatattttctatagtgttcaaattttatatgacgccttaaataactacatacacaattataaaaaatttgaactaaaaaattgttctaaataggaatgcatcatcttttttagggaaaaaaacaaaaaaatacaaaaaaggaaaaaaaattacaaaaatactttgggccggcccattaaacatttatacagtccacatacaaatatttataaaaata

SEQ ID NO: 70789 - DNA, 795 bp, Cannabis sativa
tttaaggcacaaagcccaacaaaaatatgctgactaggcagattgaatacggttggatttaatcaaaattgtgtactttgattgtgggcaattaattgtgaattaattgcttgatttctattgtaggaagttttcccatttagcttgatacgatcctatgtcgagatctgccaaacaaatatttccttatttgtgcacaaggataaaatgggaaaccgaactggtcttccaggaatacgctatctcatcctcacagcctcatggtattggacctgcttccagacacgagctgtcattggcagaaggttattcgatcacggaactgaaatacgtttctcgaatgtcttgtctaaatgggcctgacccactttatcttcattgggaacccattagggggcctttgatactgatttggattctatgtgtctactgctaaaaacacgaataacagtatttattacataataaagtattttattctttcaatataaaatcacaacctcaagtaagaaaacaattaaataataaatgaaaaatattcccaaaaaggaaagttagaatctattcatgcaagtttctttgtagtaataaggaaacaaaatatatataatgggtgcgtttggaaagctacaatataattggaattgtgtggaattagaggtaattacacaatttggcatgtttgtctgaccatgtaattacactttaactgtgtaattggaagtaattgaggggttcccactttccaattctcatggccctatgagaattgaatgtaattacactgtgtaatta

SEQ ID NO: 70790 - DNA, 1921 bp, Cannabis sativa
gattattgttgctgccctggtcatgaacaattaaaattagtgggtcaaatttaaattaaaataaaataaaaaaaaaacaattagaattagtggggtcgaattaattttgggctttttttttttctcaacttacataaagagatgtgatttgctaggtgatcgaggtactatattttactctatcttggtgcccaacgtggttgtattaataatatttccgattaagtttgagtgatattttttttatccattattcaaaaatactctaatattaaatttgtttataaattaattgtttaatatatttttactcttattttacttaaatttagcacataatttacattagcttaaaaagtataatacaaatatcattcataaaaataggtatatcttaaaaaatataaaaataaaagtaaaaaattaaaataaataaagtaaagtgggtatgtaaggtaattttctcgtaatatttctatataacgaagtattgttattgcgcataagtagtgtcttacacattctagacatgtcacattacaattagttaatgatattctctaaaaattattacattaaatatatatatatgagactagatacataattgcaacaagagtaatttacggtcaaactccctatacttttatgtttgttacggtttaaccctcttactcaaaaaattatggctatattccgtgaactcgacaatcgtttagctctgtagccctaccgtccattttggtctgttaagtgccaaagtggactgccacgatgtacataagcgtacacacggtaaattttcattagtccacctaatattaataatttatatattaaaaaagtaatttagaatatttagaaaattgaaaaaaaaataattaatatatatatattttttttatttttctttctttttcttcttcatctttctttttcttcttcttcttctttgttttttttttttttttcagaaatcaaaccccccaaaaatcgaaccccaatcgtccagcccaagccgtccatccccgactgtccaaccccaaccgtccgaactcttctccatctctcctctacaaacgtcaaccccaacaaggcatccatggattttcacacccgcaactggagagagcttcaagctctgtgcaagaagaacaaaacccccgctaatcaaaccaatatcgccatggctgatggtaacgccctgaacctcacgaacgccacgtgtgtgcttttacaatcttactatcactaatctatcaatttaggaaaagtgtagcttaattaaaatctttcattaaatttaaaatagaaactttcattcaaagtactgtcgtaatatgggaatcccgtgctaataaattttctataaaacaaatttcaaaaccattattattaaaataaagttacattcccaaacataaaagagaagaagtcgatcctgcttctcggaagccaagacaccacggttgataagtataatgctgggcgacctcaggctcatggctgaacacatctaccattcttcttacctacaccaagaagcacccgtgagtcacaatgactcagcaagaaaagttattagattaaaagcattgtaaacgtagatattcacatctcaatataacaaacatatatatatatatatgcgactcacacatatccatctatatagtattaacatttataaattcccacatactacgcattatgagaaaacacaacaccttacaatgaacaactttatcgttacactaaatgattatctaatcaatacataaccccacattgttagggcttcaaaaagtattcaatcttacatccctataaacacatgttcttacatcccgtgagtcactgagactcagcaaggaaagtgactaattttataagcaacataacattcattcagtcacactat

SEQ ID NO: 70791 - DNA, 2545 bp, Cannabis sativa
agctcctgttgccctagatgatggtggtgttgtgattgaggaaggaaaagtgaaagctcgatcaaccaagaagattagtttctcggctgaaatggggaccagtaattcgatttcacctgatgatatccaatgcagatgtttgactttgacttgtaatgcaacgatgaatgggacagttcacttgatgaagttgatcaagaggagaagatcttctgagatgaattgcactatcaacatcaatttgtataaaaaagttgtccttgatattaaatgcaaatagaaaacaatatatatattttttgtatgtttctatttcatagtttaagaaggtttattacgagtttaattactcagcaaatgataccttgttgatctaaaaaacaaatataggttgtttattaaattttgctgtactctaattttgattatatatatagttatgtataattattccacgagggtttgtaatttttaattattgagaataaattcatccaaacactacttattattaatctatagaattattatccaaatgaccttttgagtttgttgccatatacactcatgtacttggatttagtatatcttcttgttttgagattgatcgtaatataagtaaaaaggggtattcctatatattgaactggtgttcatcttaaatgatttttttttaaaggaaagaaactccattaaaaggctctaagcctaaaaaaattggagatacaaaaaataagtaaatttaaagaattaaatgtataactaagtccagctacaaacaggcctgatctcaaatgattttttgattatgtaaatgaacgtttacaactttattaaattgtccaaagaaaaagaaaaatgcactattatttagaaacttaaactttgattcttgattgagatttaactttgtatatttgttgctcataactttgcaacttaattaatttgtacccctgtttaaaatgggttggataattacattataaaaaatcttacttttagttacaacaaaatttataattaaaaataaaaaagttgtcactaattacaaatcattattcttacattggaacaaaaatcaaaatttgttgtaactaaatgtatttttagttacaatactaaaattatattaataataattcatatttaaatattatattttagtcacaattaattttttgttgtgattaagagtcacatttaatcacaattttttttttgttataactaaaaaattattagtactagtacctgtcttgtgttttgtgtagtgattacaatttgggagataaaatgttattacttagtaattttaatatttatttgagagttaaaaagaattgtatttattgaattgagagaaaaactgattcattgacattttgctaaaattagttttttcacaattaattcaagggtatttgtgccatgcatatttcataattacagtactaacatatatataagataattgcgtcattacattcgtaattttgtgagttagaattttagttttcaaggaattatttcgtctgtggcttgttttaattataattattatatgatccgagtatatatatatttgaaacagaagaaaatatagattctccagtccaaatatatgtacacattagaaatgaattcaaaaagaatcacttttcccacttataattatatcttcctaaagtctaaaagctagtatgttaaagtcaaatataagaaaattacgatattctcatattgacaataaatatttacgtacaattaatgaaaatattataagaaaaacttagttatacataaatatatttacatcaatattctatggtgggtcaatctgaaatacttagaaaaagaatattatagacatttggtgaacaaaataagacatgaatctgattaatgtgtgcacactttaattagcaaatacttaatttcacagatatgtactcaagattctctagctaattggtgaatttttggaaaaatgtatacagtactcattatctaaatcgagtatatgttggtttgttgagaaagaaaaagtttaaattaaaaagctgatatatgattgacaaggaaaactataaagatgatatggaaggatatttttcaatatatttaataaaatttcttcaattataattttgtcacccctacaaaataaataattaaataaataaattatagttgtcaccggccatttataatttttttttttggaaagggatggtaattttattaaataaaggctttaactattacaatagataaaggttcacttacagtattcttcatgcgaaaattacgaatgcaaacaagaaccacaaacaatacaatgagtatttttatttatagaacgtttaataaaagacaatttaacaaaattcaaagaagcttacactactacaaactgcacttttggtatcagttttaaattgtcacttatacctttagtatcggttcatagaaccgcgacacctatttcacattcacaaaaagttaaaatttaaatgtcggttataacactactacaatgtaa

SEQ ID NO: 70792 - DNA, 2014 bp, Cannabis sativa
  modified_base (32)..(32): a, c, t, g, unknown or other
tttttttaatttttttctttcaatttatattnttaaaaaatatacctattaaataaaaataaattatatttaaatattatgacaaaaaaattaaaataaaaaaatcatataaaattttcttaaaaaatatatatacatagtttagagaaaaaaatatatcaaattaaaactaaaataagtattgaaattaatataaatgtgagaaaaaaaaaataaaaaaatattaagagcaattaataaaaattatttaaattattttttaataataggatgtaattagcttcttatgtggtgcaaatagaacttctcatatattattagtaaatgttaatttacccatgggctacaattataataaaaattaagaaacaaaccgcacttcgcttgcggttgtattttttaaatgataattaagttataaaagtatatcaaattttaatttttcatatttttatatatatatttttaataaaaatatacaaattattttaaacctcataaattataatttttaattaattaatttattatatatattgattagttttcaaaatattatcgtttgaataaattaaattggttttgttatacccaatttttgaaaaataaaaaagtcaaccttgcgactttgaccaagacttataaatgtcaatgagttaaggaatccttcttaagggccccatggcacctctaaagggctagaaaacattaaccaactatttggtgtcgggactcacacacccaaatgtgcccagactagggttcatgggcccacgcgagtgttttcaccctagagacctcaatctgctaaggaaatccacaaggacttgactcatttaggcatgaaatgacttagatttgtgcataaagttaaaatagcataaaaaccctatggaataaggcctatgcgcccattgccctatgaaaatgctagtgctctccaatttctggagaacattgccacaaggaagtggtagtgctctccaatttttggagagcattgccacaagggaatgacagtgatcgccacatacaaagcactagggggaaattatttaaatgttttccctcattaccaaggagtgcaaaacaagtgaaggaaactatttcccaccaaggagcaagcctagctgaccactaccatctttgtgcatgatgagtggcagtggttggccatgaagaaggggagtgagatttcttgccaagagtacattttcaccaataatatgtcaaaatcaagtgaaagaagccattaagtggtgtagaaaccacttggtcgaccactgccacacttttgggacaattggtggcagtggtcgaccacctcataaggggaggagtttcattggccaagttgtatttccaacatcaatgtatcaaatataagtgagaaaagtcaccccaaggcttcacaagcttcttatgcaaccactgccacttattttggtgaaaatggtggcagtgctctcctaagcaattggccaagaaccaatgtgaccaaagtagttttctagcatcaatgtgactgaaataagcaagaaacaccatatatagcttcccataagccaaggcggaccactgccactctctagtcccaattggtggcagtggtctcgcgttagggtttcagacatcaaaataaggttttggggtgccgggactcctaaaatatgactcactatcaaaaaataagtcaatacacaccccgagaagtctgagaacatgcatggccgagcactgtcatttggtcacgtcagtgcttgcaactgggacaaaacaacataaactgcccttagtaaaatgggcattctcaattttatccaaatgacatggttcaacttgtattggaaagataatttcaagacagatctaagtattggcctctgccatatgtaaaggctccttttgaaggtggatgtgatccacgagattgaccttctctggttgtaggttgagtaagttgctggccaaagccaggaagaggaggatgagttgagtactgtacatagctatt

SEQ ID NO: 70793 - DNA, 1258 bp, Cannabis sativa
ggtgtgcagagcaaaacggaacccgagtttaggtagtttagccgccaaaaatccagtttttgtggttaagtgttacaaaccgtaaaattcaggtattttagctaccaatatccctaataaataatataagaaactgctaatcactcacaatgtgccacatcgatatggtattgacacttttaaagtgtttaataacaatgctcctagtagtacgtagttagtgaaagtagttgaataacaattatatatttataatctatttgagaaattaaactatttgtttttaactaacctagtgttctaaaaatcctatctaccttgtgattgtgatttggattttcaattttttttgataaattattaagctaaattgaaaaatggaatggtcattacacaactttctccaattaggtttgtcaagataagttagttgatttgttagctaacaattctgttacttttctgtggtatctaatttctcgtttcatgttcttagtaccagctgttgtaactaactttcctattgtgtgtgagccatttcatctctctctctgttccaaatctttccatggtatcagagccaaaattgcgtcgaatggagctaattcctgtaacaatggaggtcaagtcaaaggcaatggttctcctcctatcacaactcaaccaatccaacctgctccagatgctccacaagcaggtcttccaaacaacaaccttcttctgttaaatctacgattagacagatacaattacacattttggagatctctcgtcttagctgttgtaagagcttacaatcttaacggctaatgtgcttggaacaattcttccaccaccttagattattgaaggtaatctttctaactctgcttatcttcaatggttaaggttcgattaatttctaatgcactagatatgataaattctatgtctaaaccaaagctgggacacgtgatcaactgtcgaacttcacttgagatttggactactttaacacaactttttccataaagatcgagagccaaaattcagcaagtttgtggcattcttcaagctaccaagaaaggatcgtcctcaatcaaagagtacttcttcaaaatgaagtgttatgtaaatgctcttgttgctgctggttaaccgattgttttgtacattcttggatgactgggacaagagtatgaagttttcattgttaatctcatttctcgtgagaatcctttgagtctgtaagaagagttcatgttgcacagtcatgaac

SEQ ID NO: 70794 - DNA, 921 bp, Cannabis sativa
catgtgaaccatgcaacatagaaggatttctgatctttattaattagtaaatctgattatatattgaaacgagttttatttagggcacaaaatccaatattaagtgtctcttcaagttcgtatgagtcagttgaacttaagaggagcactgagtgttagcccaacatggagcgctgaaggtcattggtcacgttctctcatgactctagctctgaaggtcgttggtcacgtgtcctcacgtgtccccacgactctagctccgaaggttgttggtcacatttcctcatgtgtctccacgactttagctctggaggttgttggtcacgtgtccccatgaccatagctctggaggtcgttggtcacgtatcctcacgactctagctctggaggttgttggtcatgcaacctcacgactctagttatgatgaccaatattcctgatgacctttttgatattcgaaagaaaattccatacccatctctcggattttttgaggaataacaccttgatcgacccatataaatttagcttgaacaattattgctctacatcataatagcccactcacatagcaatctagtaaagtcaaattcagtgtcctaacgttgtaaaatggatgaaccaccctacattttgtgcacccctaaagaaaagaacaattgtttttctttaatattgaaattaaataatttttaataattattctttaaaattaaaattatatatttatttttggagttttgttttcaatttttttttatgctttatttattatctataatttcaaggcttaaattattattaacaaagatatgattttaaagttttaaaattataaaaatacaattttctcgataaaaagtaaaaaattaactaaaaaataataagaatcaatcttacaacaactataaatatactat

SEQ ID NO: 70795 - DNA, 2103 bp, Cannabis sativa
  modified_base (884)..(897): a, c, t, g, unknown or other
gttttaaatcaatcagttatggaatgcaagataaaatactaatttagtccccttctttaatctcaatactcatgcaccgcacatattaaataaccaaatggataatccgttttacaaaatagatcaaaatgaaagttgaagccaattttggacaaatattttatttctcgagcttttcaaaaatagatattaataaatattattaagggctagaaaataaagacacaataagaatttgaaatcagtatttttacgtaattcaggtataaatcttagcccacgaatctctttgtattgagctttgagctttgtgtaacaatattggagagttgacaaatttgaagagttttgttatatgtacacaattaaagctttaaaatatgtaattttgagctttattcacaatccctaattagcttcttcctagtcgctagcaattcaaagcaaaaaaaaaaaaaaaaaaataataatgtcaaaacatgatattttttagatcaaaaattctaaaattatgcatgtattcaaacaaaatattgtttacaagtcaataagagcgctatacaaatcactttgaataaatctagagttgtgagtgtgtgtaccaaaattgaactttcttactgcaaaaccttagcacataaaaattttcgaaaactatattaagtaaaagtctcaatttttcacaagttattgaaaatatttatatatggcaaaagattttactcatggtattaaaaattgaaaaatgagcagtcgaatggatagattaatagagactattttaacccattttaaagtagacttttatattttcctttaattagatttaaatacatatgtgtatatgtattgtattttgataatcaattttttttttaaaaaannnnnnnnnnnnnnaataaattagctcaattttaaaatttaattgaattaatttttatgtttttacttgttttttcttataatatggattttaaattttagaataataaattatatttattataatgttgtaaatattatttaatttatagagttgttatatttgattgaaacgtatttagtttatttatttttaaatttctggttttattaaatatttagttaaaattattctttattaacaaaaaaaattaaaataataataaatttattaaaaaaaattgtactccattagtcctatcctactacaccaaatataatatagtacaaatataaatttaatccagttttctaattaaatttaatactaactaatccacaattcaatttggcataccaaacttttaccttaattgtttttcttcttgttactacgaaagtagttgcttcactttcagccactcgaataaggaacctttgtacgggaggaaaggcctctcgattaaagcactaacattgccaaggaaagaaaaaaaactgtaatcgaaggcttaaaagagaggagactagagagaaaagaaaaaaaaataatcaatgaattaaaaggaaaaggatcgaaggaaaagaaaagtagagaaaaaagggattcttttttatatatctcttgtattgattttcctcagtgtataaacaatgatttttacaatgtatttatagtacagggaataaaaattctaacaagaaaatattcctttgccacctcattggctgtaggatttttacccttttaacctacaccaacaaaacgtttttaatatcagtatcaaggtcaaaatcgacctttccttgtctaattaaagtctagacaaaaaatggcagcgttttaatcaacacgataccaactcttgtgtcgtttagatccatgggtcaaagactctccaagaagattatagaaaccctaagactcaaacacaatacactctcagcctcacaactcaaaaccctagcagagcaagttctcttcaagaacttgctcgattctaagcacaaaacccagaatcacacccacacacacacaaatttaggtttagcaaaatgaaaaaagtaagggagagaaaacaccaagaaatttgtttgagagttcacccaaaactaggctacgtctccgtcgagctcatctcagagatttagcttgatatccactatcaacaatgtcgattt

SEQ ID NO: 70796 - DNA, 1042 bp, Cannabis sativa
aaaaaaaaaaaaacattgaaaagaaagaatactacaaataaataaatgatgaaaagaaagaaaaacctggcttagagagcacaatagaataaaataggggtaaagactatgttgaagattcttcgatcagttaagcaactttcaaaaacccctcggatgattcataccccatcccatatctatatcaattacaatcagttagtaatagtcacaccgtagaaaccctgtatcaatgaaatttgggccgtcgatcacaacggtgcggttgatgcggtacaatgaaaagtagaaagacaataaatggtgggacacgtggagcaatcccctgactcgaacctttcagattaagccacttatatatattattatataaagagtggtagagtggagcagaacctcaacaacgtcagttgtgcttaaataaccgacgagaaagctttaaaataaaaaggggttgccctaccccaatcgcagcctcagcccgaatctcttatatattattacattctattccatctccttttcttctgctccatttttgctgcctctccttttcttgcagcctcaaactctagagacaaattctattctttcacctcttagctctcctgcttcaaaagccccatcaatgtacaccttctttttgttgtcattctgtttttttagtgggtttctttgttttgattcttgatcttactatttggatttctattttgtgtaggtattcgcataattggattcttcctgcttgatcaaattgatttttttttgcgcttttcaaggtagggagttttgttcttctttatactgtttgcaactttgtgtagctatacaaatattaataatgtcattgtgttacatatacacgagttgattttttttatcaaacaaaaaaattggcttaatttatgacaaaaaagcattatcattttagttttattaatttcatgatgaatgttgtcggtctacagtattatgtctatttttatattgagtaattggttataggaagcaaaatatggataaaaattggatgtatcta

SEQ ID NO: 70797 - DNA, 1173 bp, Cannabis sativa
gtttttgtattacacctcatgtaccaccaaaacctctatggccaggttgatatggttttgattcaccactcgcaacctcaattcctaaagatgggcattaaagatttgttttcaaatattttaaaacttttatctgtctgtacctgccttcaatattgttacggattcaatgctcgtatgtatattgattgccaaatcaataataattacatgacgagaattagggctgtttatacatttcactctcatcaccttaatgccctttgtttcaccaaccataacactcggatcttcttcacacatgtcatctttttttttgtttgaaatacatatcaagtattgttgtaaaacacttctgccaaaaaaaaaagtatttccgtaaaataattcagcaaaaaaaaagtgttgttgtaaagcaatattttgaaatttatcaaaataggctaataatattgcaattctttcgcaagcatgtcaatgtttttcaatttattgcttctttacaatagctttgtttttaatgttcttattttttttaacaaattgttgacagtattttttattttattaaactcaattacacatataacatcctttccattactaaaaaaaaaaaatcctatcaatatgtgtttgttattagacttaaatgcatatataaaatacatttaatagactaagatgttaaaatttaattgattatcatgatagttttatttacactaaattagtattcgccttattcataaatatagaaaaatataataaaatttattttttttatgacataaataaataatacaaaaaaatataaaattaaaaaataattaaagtttaaaatatatggaaaaaacaaataaatttgataaaacttgtaataataaggttcgccgaaaaagttgctgggaaagtcaccggtgtcgaaaaagttgccggtgccaaaaaagttagggtcgcttaaaaagttgtcggaaaagtcactgtcgccgaaaaagtcactgtccccgaaaaattcatcgtctccaaaaaaaatcactggaaaaatcaccagaagtaagtgtcttacatataaacaaaaaatagaacaagttctataacataatgaataaaaacaaataattcaaactggttataattgaaatataactgaatctataacataatgaataaaaa

SEQ ID NO: 70798 - DNA, 1266 bp, Cannabis sativa
atgtaatcctattttgtaatactgttcttgaaaccaattgtaaaattttataaacagaggatccacatattcagtattattttgtataaaatttatatttttagtttaattcaaaagtttttaattaagccacacttttcttgaactgatgggttaattataaattaatttgtaaaagcacacacgtggcatccttatgggatagggcgttacaacatggtattagagcaaccaagatttaaaaatcctgtagacttgtttgatatgtacatcgactatgaagactcgatcgactcatatttcagtaagtgttaattgttagttgattattagattatctgatgattatttaaattacctgcttatttgaaatgtgcaagttattagaaaagcatagttatgggtgatatgtatgtgtatcatgataaaaattattagcattgattatggtttgggagatactaaacgatggaatgttatggtcgcatgtgatttagctcatgcacctgaggcaatctggtaggggtggccgtgagcttcctaggctcggggttggcggcgagggtaagaaccctccactaccacaaaaatgggaagaaatgtatgttgtgatgtaagaaaccatccgacaacaaggtgaataaattagagaactgagggatttggagcaagctcagctggctccaaatcccaatcttgatcctccagcaccgctagtagtggcataggatgcaagaaatcgtctagagccgttgtatgagcagtttaggaagcaaaatctgccagtgtttaaggtggtgctgatccacttaaggatgagcaatggatgagtatggtaatatctatttttgacttcataagtgttgagagtaatcatcgggttagatgtgcaaaggcagaagaatttatacgattaacccagggaactatgacggtgacagagtatgccaccaagtttgatcgactggcaaagtttgcttcaaatgaagtggccactaaggctaccagaaaggccaagtttatttggggactggaagagcatttttcttgggaggtgattgtagctgccaaatagccagggtttgttcggacttatgcttaggtggttgagctggcttttactgctgagggtgcggaagaccaaattcgaaagagaaatagtatgaggaaagatttgtggaaataattgtctagtgttggttccggtaagggtactgaccctaatgatcgcaagaaaaggcctaaggtgttggaaatattttacca

SEQ ID NO: 70799 - DNA, 681 bp, Cannabis sativa
tgtcatacttctttcaacaaaaaaatagtttataacaaaatttcctaaaaacattatccatatatttttctaacaagaattgtttttgttgcaaaagtcattatgaaaatgtttaaaatacaaaaaaataatatttaaataaaatgcacctacaatattccataaaactcttttattgatgtatctttctaaaaataattcacatgaatatttatttagtaaaatcatcacttggttaatgtttgcaataaaagaataaaaataagaactttagtcaaatttaaaagaatgctccatgccccattttctcgaattttggcacaatcgactaacttttataatcaaacaaaagtttaatttaatcgagtataaaataattggggtccttatgtataatagccttaaaattacttaataatagcctgaaacttaaatatactaaaagttatattgattgatttcatagaagagagattaagacaactgaatccaactccaaaaaagccattcaaaaaccagctaaatagctcaaaaaggccattacagtagagctttggtcataaaatgaaaggttttcgaagctctagcaaaacccatataatgaatgaattgcccctacatctatgaacatcacataattatttataaacattttcatttcatttcacaccaaaaatatat

SEQ ID NO: 70800 - DNA, 1085 bp, Cannabis sativa
gccttcgactgggactgggaagagcgaccgccgacgcactgaccagcaccgtcgactacgaaagggaaggcaccgccgtcagccaatcgaccaggccaaacgatgaaacctagcctttgcactctctccagttaaactattaaacttaatttattatattatagagaattttagtaaaaatgtatatatattaatttattcaaattatttaggcgggctagaataatatttgacccaaccaatatatttattgagcagtttggattttttgttaggttattcaggttgtgttttttatcagtttattctattttgtttggacaatttgtttgagctgggcgatttgtaattttttttaacacccctaacgattagggttcaacaacccttaggtcgtgtctccttaagagagacacaccaaccttccctgtataaagggccagacttggcttgatgggggattcgaaaattcattattcataagcagaaactctagttttttatttcttgcactcaagagtctgttcttgacctacaacccaaattattaaaacacaagggcttaccaacacttgaggttgactccacgtcggtgttctcattagttacgacttcacgtcgtggttagctaaaataacccgtcaacaatatatgtataatgaagctttaaagttacaactattttcggtaaaaaaatttacacttttatgttcatatatatattatttgtatttttacagtgatcttgaaagcaatacgaaaacaacaaaaatattatataaaagtaatagaaaaataacatcaaaatataaaaataatatacaataaacaaaaaaaacaacaacaaactaataaaagtacaaccattaaaaaaagatgaaagcatcaaaaaactttattttccataaaattatttaaaatttcgtacgaatattttttttttcttttgtatatttatgaaataatttcaattatttaatactagtaaatacataaatactatagagtgcatacttcattcaaagcctgtacttcttatgaaaattcagattgatcacctatggttattccctaattaatttacc

SEQ ID NO: 70801 - DNA, 3324 bp, Cannabis sativa
  modified_base (1176)..(1180): a, c, t, g, unknown or other
  modified_base (2607)..(2611): a, c, t, g, unknown or other
aatttataattaataatattcaaagttaattataaataaataaatatattaattatggtgtagttttcaagagttaatttgagctatcgaattaaatcaaaggttataaattactatttctatcaataggtattttacccaatccctattgtaatagtctcctttatgtatatattaaatatattatgtagtatatatattaatatatatattatgttcataaaaaaattatttatttattatttttaaaaccttattccaatatcacttattttttttttatttttcggttagtaatatcttttaataaaaattttaaattaactatatttatttatctatatatttatataaagttgagtcataaggcagtaacgtggcaatacggtgatgacatcaactttaaatttagtggtgactataagtgagatataataatgacaattattttgaaattatatgataagtttttaataaatttatgatttttttttttttatatatctatatttttttgaatattgttcaattttttaatttttttttcactataatgtatatttgaagttttttttgtgtattttattttgtatatgagaaattatatggtaagttttttttttttttaaaaaaaacaaaaaaattctttagagttctttatatattttttttaataaatatatattttaccttttacataaaaataaatttaaaattatttgatatgattttattatttgatattcatatatatatatatatatataatttgggatgacgcgtgggttatccatggtatggattttcaccccaaacccaattcttaacaacaattgggtttggagacagtgtcagatttacttttacctgacgggaactgggacacacttaagctccataccctctttgaccaggaaacaattagtaacatctttagaggtggtactccgagcggccagggaaaggatagatgggtctggacaaaagaaccaaaccgtctcttttcaactaagtctgcctatcttattcaagcccttgatcgggatcccttgtgcaacattgctccgacactttggaacaaactgtggaactcaaaaattctggagcgtcacaaagtccattggtggagtatcctctctaatgctctacccttaagagcccctcttgctaagagannnnnttttgaggaggtttcctaccctatctgcggggaggctgaggagaccacagagcacttattcctttactggaattttgccttccatctttggcggtcttcaccttagggagttatgcctgttcaggagtcaggtgctcgcatgtgggactgggttactttcctatggaatcttaaatccagaggagttgatactaataagttgttcttttatgcctcgattgtggttgataccatttggagggcctgcaacgacaaggtacataacaattcaatgggtaacattaaatactatattgactctatttatttttgttacgcagattatggctcctgtcttatctcccctccacagtctgttgggactcctgcttggtctttaccgccagaagattgggtcaaaattaactacgatgtcaaagtcggaggtgaaactatgtgtgctgtggcgattgcgagggaccataaggaatcagttctgtgggtggcggcagaaagactacacttctcgaacccactcgttggagaagctgcagcctgtcatttagccatagagacagctgtcagtgcatcatctttttgttttggtagagagtgacttagtgactattatcaagaatttaaaggaggacgactcattttggaggattgagaaatatgtgcgacattgcaagctcctctctatttttatgacattataatttttcttgtattcctagaaactataattttgcgacccataatttggtcagatgggtgtttgccaacaatgttatgggtggtagagctttctatgataccagataatatcttttgtaatgaccgagaggtctaacttcaattttatttataaacgtactttttcaaaaaaaaaaaaaaaagtttactagtttgtaaatatcccaactcattatatttgtgaacttgtttagaagattcagcgtaataaggtgtactgaaacgcctggttcgaatagctggaccaatacattgattaagtatttgggcctgcaaacaacaataggcccatttactttaggttcctaaaagccacaatagaaaacgttttatccttataaacatgagataatattaaaaaaaaattacaagaatacaatttctacgaattttcaatatttttacgattttacagtttttaaattttatttatataaatagtttttggtatatttttatgttatatttttattgttaattttttattatttgtatattattttttaaactactttactattttcttattacttttatgttgtcttttttttttttttaatatttttataaaatatcgtaaaagtataaaaaaaattaatataaaaatttaaaagttttacaaaaattagtgttatatgtaattggatcatttctcaatgggtattacccatgaatagttactaaacaaattnnnnnataaatattaattttaaaaataataaatcattaaattttgatctaataacgaaaataaaagagaaatttgaatttctttgcttagtttaactacttaattgaaaaaatatcaaaaaatatcactttttatactatatcaaaaatatgttcatataaacatattgagtaatttgcggcataaatacctaagttttataccgagtagcagataaatacctaagtcgtatttttggcggtaaaaataccttccgttacactcttggaactttcgtaggtacctccccgttatgtgccaagttagtgtctacatgtcactcgttcattggtccatgtcgttaattttttttatttattatttaaatgtttaaaaataattttaaaaatataaaaaataaacaaaaaataaatatgatcaattttgtttatattttatacatttaaaaattaaataaaacttatttttttaattaaaaaaattacaaaatcaaattaaacataaacacttaaaattaaattaaatacaaaattaaattccaaacctaaaaaatctgataacactaaaatcgtcttcttcctcccaacaacagctctatttcacgctaaaatcacagaatagaacaaaacccataacctcaaatcgtcttctcccaaaactgaaaaaaaaaaacccagtaaatttaacccacaaaaatcctcatctataatatcttgaa

SEQ ID NO: 70802 - DNA, 1896 bp, Cannabis sativa
atatgagcaatgtcagtgttatttgaaaaatcctagagatatgccaatatagataaccctaaacagttcgtggccttttgctatttgggaaatcattttagtaggatcacttcaaactgaaaaggaggattcaaaatctctatcgtcgttgttgactacttcaccaagtgggtggaagaggagcctacgaacacggtaacatcaaagaaggacttggattttgtcatcaaaaatattatttgttgttatggtttctacacaaaattgagtttaataacggaaaaaatatttgaaagtgatcacttcaataaatttatgtcaagcacaaaattaacaaaagttttttagttgtggctagaccacaagcaattggacaagtgtaagccataaacaagatcctgaacaacgttgaagaagaagcttcaatcttctaaagcacactgtccaaaagagcttctaagggttctctgggcatacagaataatagaaagaacctcaacatgacagactccatattcaatggtttgtgggtgcaaagtagtgatcctagtagaaaccatagtatctgcccacaggagggaaatttatgacgtaactcaaaattatacatgactctaggaatattttgacctaattgaagtactttcagagtaatcagaagttcaactcaagatgtaccaaggaaaagccgctaagcattttaattccaagttgaaaaatcgaaagtttgaacttggtgatttggatatgagaggagtatttctagcctctcgggagccaggagtgggactccttggaaaaatctaggaagggccatatgaaatttaagataaaataggtgatgacacatacctcctaaaaatatttgatggctcacaaattccaagagcatggaactcgaaccacctgcgccgatactatctataaactggggttggtcgcttccttttcttttatctgcattttattttatgatttatttcaaggtatgctttagggtaggaaccttttaaataaaaacaaaagaaatttttccgccatattataattttccatgtaagtcttgtaataagtgaccatgactccatactcttaatctcttgggggtagcatatctgatatttctccaaaaattattaacattaagtatgggagtagaaagtactgcctaaaatcggagcctcaaggaacaagaagtaaacaactaccttaccatattttccaagttaataagtttactaagtccattcagattgtccaaaagaagttcaagcttcaatacagattaacctgggttaattaaaactaaaaatccaggcttcaaaataaattaattactaaactttttcttaaaagaaaattatcaatttcaatggtttaggccgttggaaccatgtaccatggaattataaaatagttgtgaaaagtaaaataatgtctaagcataaagttgaaatcttatggttcgggtctttggaaccagaaccttagggaatgttgaagcaaaactaacttagaaaaattaaatacattcgatgtgcatcaaatatctagtgagttaattgccaaacaaaaatgctaaattgtttgcataaataagtcatacggcaagggtaccaatattgtctccgcactaacaaaaaggaggaccctcatcttccaaagtaaagataaaacaaaaaaagtgttgacaagtgttatcttattgctgagctggattgactgcttgctaaattgagtcagactagtttataaatggagcattagtggttggaacattttctaaagttggaacctcactagctggattagtctgtgaggagggaagagaagatccttttaggaccacatcctctggtagaatatcttcaacattgttttcaaaaatatcattgg

SEQ ID NO: 70803 - DNA, 1595 bp, Cannabis sativa
ccgccggtattgttttgcctataaaaaaaatgcagcaagcagatccccattttcccatttctcccaattttttcatatcatatccctctttctcttcatatcatccaccacccatcaccaccgtccaccactgtcgaccaccgtccaccaccgttcaagtagattcccaacttcgtttcgccaccgttccaccacttctcatctcaccggtatgatttttgattgtattattttatatttttgactatatttgtattacttttgtattagtaagtgattattaatttaaaattgtaatgtattacaatttgtgtttagatttgattttaaattggggagcacccggtattgaaatctttattttgtgcgaatcgggtatgttttcatttttagggttttcaattttagtgtgtaatttaaatttgtgttatacattaattttaggattttttatgatataaactgtatatatttttatatacaattgaatagatttttttacagtgtatataaaaaaaatttgtaaatagtttttatagataatataatatatattatgtttattatatattttttgtatatatatttatattaggtatattatattattttttatatataaatatatatatattgtatatattatatttttttatatatgtaaaaaatgtatactcttttctgtaaaataatgtatatatatatcatatatataatatacttaatcattttatatatgtaaattaaattaatattatatattagataataatatatgtaggtaaaataatatatattatatataaaataatatatattatgtatataatacatataattattttatataagtgaaatgaaaaaaaaattatttattttgtataagtaaattaaattaaaatttttctatataaaatattttatatataatatttcataaattgtatattatgtataaatatttatgtaaacttggttatatttaaatttatttgttgtgtattattgagaattttattttatttttttaatttagtgttttatttatgtgtatttgtaaattttatatgtaagtgtgtttgttgtttacttttgattgtaagtgaaaatatgataatatgtttataaattttttatcagttaaaattttaaaattagaggaatgaaaaatgtgacaaaaaagtaaaattaaatatgaatttttagtatgaaattaagtttagatttatgtaaatattttgatattttaaatattaataaaaaaaattaattaatatatttttattttattataaaaaataattatagtaattaatttttttaatttataaataatttgtttacatatattaattttaaaaaaatgaattagaggaatattattttttttaatttaattttatgaagaaaaataattaaattagtttaattagtaagaaaaataataataattataattattattataaaaaaataatttaattttttaaaattaaatataaaaaaataaatatatttaatattaaatatttttattattatgctttttgaatataccatatataattttttaaaatttttataaataatttttt

SEQ ID NO: 70804 - DNA, 1404 bp, Cannabis sativa
tgctacaaactattgggattaattactattatcgaccgtaaagaataaataattttattgccaataataacttaaatgttacttcaaaaaaaaaaaaataaacaaaatgtatttaaattttattgaaaatatattaaccaaattcaacttcaagtacaaatagaactttctttgttgtcgagctacacatacaatacaagactacataattagctatttatagtttaattagtactaataataataataataatagaatacaatgttgtttgtgcatgtagcttgtctagggcttggagtgtgtagcttcttcctcgttcaaatcaaactcattcatttcatactcaatactcttaataatattattaataaataaataaataaatactacaaatttagagtacaacctaagcttttgtagctccataatttctctaatataatactaaacatattgtgtactttgaagaaagacaataaataatttactctatgagaaagggtgttaattacaatttctttctcaacttttatgtttcaaaacacatgttgataaatatttttctttcaattttttttatagtagtgtttgttatagttataatatcatgctctatatatttttgaaaaattctgaataatttacagtatcaaaaatataattaaatttttttaacacatgataaacttaaatatcagaaatgataaaactttgttttcgatactcgctctattgacaacattaataaaaagcatatgtttgttgctttcaagtccacttaatacacagatttttaagggtttcgttgagtataaatttattaatcaaatcaaaatatatactttcatttaaagtctaataatgtcataaaatgaaatcaaaaatggtgttttggaaactaattcaaatcattttttttattgtaacttcaaatcatcaaaattaattacgagaaaattttatctaattgtgtgatttatatatagccgatgtatatgttatacaaatgatgcaaattattatatgattgttgggaactttttaaaaatatgatttctttcaataattcatatataatattatatacgtgtgtataaatgagggtgatatgttgatcaagggagagaagtaaaacactatatatgaattccaactgtataaatagttgtaaataaatatataagtttaactttgatgataataataccatatttacatatttgaataataatatcatcaacctatatatggatataatgagaaatttacataatatatatatatttacattttgatgaaattttttatttatatttttacagattttttttacaagtttttctttatttttttttaaaaaatattgctttcctgtactagcaacgttcaaagaacattgttct

SEQ ID NO: 70805 - DNA, 1738 bp, Cannabis sativa
accaagttttgaattagcaatcgggtccagaaggttaatttctccaaatcttccattttctttagtaggaacacttctgaagtcttgagaaatcgcctttgtggtggcttgggaatggaacccgctttggaaggaagcctttatctggggttgcctagttccatgggaagaaacaagacagctgctttgaactatttgaaggagaaagtgaggaaaagattacaaggctgggggtctaaattcatctctagagcagggaaagagattctcattaagtctgttgttcaagcactccccagctatgcaatgaatgttttcctgttacctgttgagattaggaattaattctccaaattccagttaatattgcttctaaccaagaccatctggtttggagtggtgaattatctggtttatactcagtcaaaagcgcttacaaacgcattcaggagatgaaaggtttggtgaatatggaggagtctcaagtaaactggttctggaagatcttttagaacttaaaaatgcctccaaagatgaaaaacctggtgtggagggcgtgtacaaactgcctccccacgatggtacaactcagaatcaaacatgctgtaagtcatgttctctgccctgtttgttcacttcatgatgagaatataacacatgccttagtcacctgtccgagggtcaaaatgtgctgggaaaacgttggtatttccacggttatgtagcagaatgaaggttttctggactagtgcgtgcgaagcttcaaacagctggaccgagacaatagagaactgcttgtagcagttgcttgggcggtgtggaatgcgagaaatgaccgtgtatggcaaaataaaacgaagactgtggagaacattgtctcgtcagcaaaaggttacctttcacaatggaaaaatgctcactctgctggtgcagagctcttggctgccggtttaattcaaggagatggagccgagcattgggtgcttccaaatgtaaatgaagtaaaggttaatgttgatgcagccattttcgaaacaaatcgtcagtttggagtgggttgggtggcccgtgaccatcaaggcttcctcattcatggtcaaacaaaactgttttatgcttatgctactccgattctagcagaggccgtgggtattagggaagcgctaagctggataaagaccagccgattacagaaggtggtgctcgaaacggattgtttgtcagtggttcaagccttaagaagttcaatagagatgatttccacgtttggtcaagtggttaacgattgtaaggttttgcttaatgatttaagaaatgtttctatctattttattcgacgatcagcaaatgcggtagctcatgagttcgctcaagcttctgtatgctaccctgattgtaatttcaatttgaattctattccaactactttgttacttgttttggtaacagatttggttatctaataaattgatttaccattcaaaaaaaaaactaattaataaaaaagatgtgtatgggtgtgcatatgtagaactaacattgttttcaattgagaaattattttgtatgtgtatgcatatgaagaataaaatggcgtttctctttgatcataattagatgctttaattttttgtattgaaagaaatatataacttataataaataaattttatctatcaagaaatataaataattaaattttaaatctaaactcgaatgattattcctcatgactata

SEQ ID NO: 70806 - DNA, 4027 bp, Cannabis sativa
atccaatccaatctaattactaattggattggatcggttttttaattggatatccaattacacacttagtttgaggggtaagcttttatcaattatttgatgaattccgatgaagggtgatgttccaataaatggcatatgatagtagctcttaaagaaggatttcacgatattttttggttaattgttttatatgcttaaatttcataagttctgtttttatttaataatttaattttgaatcaactgtctatcgcaatttttggattttttaataacttattagtatgttctattattatgaatttatttttatatttaattaaattatttttcatttaattattttattctttcttcactaagtagtagtacgtttagaagattttatttttttgttttaatggttggtgtctttgaactgtatttagctttttacagtaatcaaatttatttaattttatattctcactattaataattttataactaatttttaagtgtatttgagatttttataaaaagtttttctgatcatctaatttattttggtgcacaaaatctaggaattaatttcatgacttataatgataattttcttaccattaaaattttagtctaattgtaagaatttagcattaaagttttattattttgattattatgaattccattcatatattaatgagtatttattagtattattttaatgtctaattttttaattttgttattaatattttatatattaaacattcttaattaagattttatagcataaatgtttatggttcttttattattttaattttataatgttttttcatattttattgattgttatttgacggttcattagtatttattatttagttttttgcttttatgtctattttttagtatcattattaatttttggttagttacataattttttgtttttatattatactttttgaaataagttatactgtttctgaatttttctatatatttataatatttttacttataattttctgtaactataaattaagtcattaaaaatatttaaagtatattaattaattatttttttcttattttaaaacctcatattaaaatatattgatttaatttattttgtttatggtttttctttcaataatcttcattttgttttgatggtttttatgcgttttatgggtgtttttaattttgtgcatttttcggcttacgtgccatatttatggcttgtctctaattatttagggtagtttagtggtacatttaatgaataaaaaaagtaatttattttgtgctcttagcttctacattaacgatctttcagttttaacaaataaatattttaactttttatatttatagattgttttatattataatatggattattttacccttttctttcattttagctattaattttattaaattatgttgtaatagagttttatttattgttgttttgtaggcctattttgtggagggcttacgactacagagactttgccgataaggttaattcaaagattgtctcttctaatacatgttgttgcttggtgttgtttattttttcagctattaacaaaggaatggtgttttaatgagctgggtgtgttgtttgaggatgatatagctttattgtctaaatttctgggggcagttttgtcccatgtggcttgcgatatgaatttttgcagctcatggtttggcaaagcatgtccttcggttagacgatgagctatcctggtttgaggacgtgccaccaccaattttgaagtgtcgtgttgttaatcatgtgtgattttgatcaccgcgtcaaaaaaaattgagaaaagattaaaacaagaaaataaacaataaaaaaataaaataaggaagcaagatgcaagtaaattgatatgaaaattaacaaagatttaaagttaggattattgatttcaattgtatctatctattatggtctaacatgattcaatttctatgcaatagcaggtttactcaagtaatttatagtcttctcagatatataaatttcaattacatgcaaattttctactttcgtgataaattaaacacaaaaatcctataagctatccaaaccacataggtactctcatcctatatcaaactttgctcctattttactatagcataattgacactcacttcttagatgtcgtatcaaaattataaacatttaattggtgattaagcaattaaaagtaattaagtacgaatgaaatagaatacatagaaaatcgaaaaaaattaaatcacattaaaacaataaatcgatgtcaaacaatattcatcaataccatgataaattgtttagctactcttattcatctaagaacttgacacataccaattaaaagcaaagaagaaaatagagaagaacagaatattgaaaactccgtcaaaaaagccttcgcggtcgtttctgctctctaatttttgtactctctgaatgcttcgtcaaatataagaaagttcacctctttttatagccaaaatacgataaaaatatctaaaaaaatataaatttttgaaattttcaagggacgggccgcagaataagaattgagtgtttaggcataacacccctaaatttgggcggcaagcctattgataatactttggccataactcttttaatattgttcaaaattggacgattcaagattttttggaaagttgaaagagagatctagaacttttaagctttgacattctctaaaatatgatctaaacatagttgaattcagacttgaattttgaattttattttcttgtaaaattttctctattttatagataaccattttctaaaatttcaccaatttatacattccaaggtcgacacctaaaaccaaagaaaataagcataattctattccaaaaagtgacaataaagaagaaaattagctctaacaatgacgtaaataataggctaaatatagcctaacagattggagacccaaagaggatataatgcctcgatgatgaagtcattttcctgtagctttttaacttcatctttcaatgcttgtagatccatttaaatctcaaagtttttgatatgaaccatgagatcttcttttcgagtgtacattttcaaatttggtatttttttacttggttggcaggggcaatgcatttaagcatgcagagaaaggcaattcttgagtcctgtcaagttccagatcagaaatctttgtgccaggaaagccttgtactaggctcttgagttgatccaattgtgtttgcactgcacgatcaactctggtcgtccctggtcaagctagcctttgttcagtcaaccgttattgtaggttgataggaggttggtcatttttggataagatgtttatgtctcaattagttcttcttcagtttaagtcatgcggaaggtattcttcctccctgggacccattctatcaaacacaaaattttgggccttgggttagaatttgtctgagcattttaggaaggaatgtcgttaatgcgctcggtgttgttattatgatttcttcggttggcgcgtgcatcagttgggtggctagtggcaccatcctcattcagatttgggtaagattccccactacgagaccgactttagtcttgcttgggtgggatatcttccctccttctttcatctctaggaaggtcctaaaactggcctatcctgccatatgccttatcaagcaggatttcttcatcatttggccaattagaaggcatccttttttgggaagcagttaggcccattaggcgtgaggtttgcccacggtccttaaggtgttgagtttccctcgagatgtaggtggctttttcctgaagggggtcccttacgagtgattgttcttccaaacgggatccaaccctttcatagagtcatctaattatcttattttcctccctattttggcagtttaactctacttgggtggcttgtaggattgtggctttttgatccatccattcccagaatttgcatctctgttgggcgaagcatca

SEQ ID NO: 70807 - DNA, 1493 bp, Cannabis sativa
aaaaaaaaaaaaaagaagatagagagaagaagaagaagaagaagaagaataagctttcattaataacactcaaaccatataatcctgtgcctgtcaaatttgtattatagattgacacatttacaatatttaaatcagatatatcatttatgcatattggaaacaaacaatagtgtctactattttttattgtctttctgactatatataaacccttctaattggaattttgttgtaataacctctgacattaacagtaactttaacgctattatgctccatcgatctccatatcatattcatgcaattaagctgtgtgctaggctaatttatcttcgtggtcgtcgtcatcaggccctgctttaacaaagatcatttttcgactatgattaaataattgattaatatatatatatgccaaaaagactagctgggttttatttcatgggaaaaaataccatagctacatgattaattattaacaagtagatgaaaataaataaataacttatatcatcaaattatttatatgtataggggtagtaccttattatcttgatcagtattatcatcatcattatgatctttggcagtgtcttgataatgatcaatatttacaagaacagagttggtcatgatcttattgtgatcatgattcttttccgaatcttgatattgatcttcttgcagtactttgccatgagctccatcatgatcaacaagaagtagagactttttcataagaatattatgattgttagtcctgctggctttggctctacctttgtgaatccttaagtgtccattaagagcttgtggtttcaagaacctttgtccgcagaattattgacaattataagtaccagtgacagatgctggtttgttgtggtttttgatgtgaaccctaagacctagagcacattttagtatcttctcacaacgtgggcatctgaaacaacgccgtaccatttgattcctctcatgatgatcatgatcatgaatattatgatcaaaatgctgaagatgatgaagatgatcccgttgctttcatcaccattttctttcttgctttcttgctacttcttcccttaatttctttctcttactcgatctcagcttgattaaaaccgtagataacgattagaatattttgagtgatatcgaaagaaataatgttatcaactttaaaaatcatcttttatatatatatatactagtaaaaaggtacgtgcgaagcacgcatactaaattttatgctaggtattttttattttattaaaaggtgatacacttaaaaatattcatctcatcttggttcaacccaactttctgtcatattgttcccataggattgtgtgttagattcgggcttagaagaatagtattcgttagaaggggtgccagtaatggtggtgctgatgtgagttttatcttctaggaataatctagctactccgacattacaattacacctagcctttcaaaatgagcat

SEQ ID NO: 70808 - DNA, 1207 bp, Cannabis sativa
aattacatggtcagacaaacatgctaaattgtgtaattacctccaattacacacaaatccaattacattgtggctttccaaacgcaccctaatgagcacgacgtgttgggattttgactactagagagattttgagaaatgaaacttgcttcttagtaggttctgataatgttgttgacgtatggaatgctatgtggattctttgaattaaatgggataactatcgaactgccttcaatcatattaacgaggttttcccatccttttttaccctttgtcggttaaggcaaatggtggtaggggctctgataagcttcgccactggtttgtgcctagcttggttgagtcaattctttctttgaagaggatgccatccatacaccctgataaactcatttagaaggatgctcatgaaggttgttttttcaccaaacttgcttatagtgctttgataaagcaacagtggagccatctagaccctttgtggaaagatcttcagaagcttaagatccatgaacgtctctacattttcatgtggaagcttagtagagatgccctaccttttggtagccacttccaaagggtttttggtaataatatggcttgctccatctgtcatggaggtgatgattctttttcaacatctattctttaattgtcttgtgactaaaggtgtctggttttttagttaatgaggcttgagatctgagaatttacattttgataatacttttttcttactgaactgattaatcttgaacttcgatcttcatcttagaatccctcttgctctcaagttgcaatttagtatatttgtaggttgcatgtgttatgatatgtggacgtcaacgaataaagcttttcatgagggtgtttaccttatggtggctagtgtgaaagctttgattcaaaactttgtgaatcagattcttcaggccatgatccccaacatcagaagcttttcagtagtttttagagaagatgacttgctacctatttaccgcacatgtactgttactatttttgtggatgtagcttgtagaggtttgtgggttgttggcgctatcattgccaaaaataatattgttgtggtactggaagcattgactaacaagtttgatgttacctccactgtgcaagccgagaacattcactattatagaaaaggaacattttatcccactttttatacttaaaaataaaaagt

SEQ ID NO: 70809 - DNA, 932 bp, Cannabis sativa
tcattattcttcttttcaagataattagtttaataagtagtaataatagtattattaatatttatttggaatatgtgttattatttatgatcagaaaaaagtggatcgagcattacagataatgcagattgcagtgagtttgggaaatcttgttgcggccaccacagcaatgtgttcaatcatgtgatcaaaaaaacagttatagcttatatatattatgagtgattagtttataatataagctataatatatatgaaatattctattaatctatcaagtattttgttttttatattgttagagttgtatttatttatttttattttggtctttttttatttaattttatgctttgtttagttatagaaagagggatgggtacatgtgttgttgtgttggtgtgacaaggttatattttatgtgtgatgttttttttattatttaatttaatggagaagatgttagatgtaaattactaattatcatgagatgtgatctgttgacaaattaaatcaataatgaagagatgtgtaatccttgaattaatttggaaaaattacgttaaaagcctttaaaaaatttactttgatccagattagtctttaatttcaaaaaatagcagtaatagtcttacatttttttataagtctgataatcctaaatttaactgatttgttgactttttaaaaataccacgtgttaaagtattattggtctaaataataattttaattaaaaaaaactaaaaatgtatattttaaaatcatattttttttttctttttttgtctctttcgtcattttcctctagccacaccaccccgatctcatcaacttcctccagccacaccccgaaccccacccaccctgtaacgccctaaataattaggcacgctacccaaaattattatgaaaccctaatcccctaaccg

SEQ ID NO: 70810 - DNA, 590 bp, Cannabis sativa
aataaataaataaataaaaccttgaatctttcattagagaaaaagtaaatatagctctattgttggtatggctacatttgtagggatgagttaagaatttacaaataaattattgaattattggcaatcatacaatttgaaagagaaagagcttcataatttaagaaatcaagtattattaattgttctttctaaatctttatgcctaattttctgtttatctaaaaagatacttaaactaaaatacactcctgtacttagattgtgacttttgaaagtctttaaagtttaaactacgtgcctacaacacctctctaaaaaatgtagttagtgttaagcttaggtttaattagttactctataaaagtacttaaaattttcattaaattagtttacttttatgttttaattgagatttgtattatctttttcatagtctttccacattaagatataaactactacaacaagaaaagaatctcataccacagattactttacttcccttaacaaactcaccaaaaaaaataaataaataataacaaagcaccaaagataaagagccaaaaaaaatcacataccttgaacat

SEQ ID NO: 70811 - DNA, 1127 bp, Cannabis sativa
cattgtggctttccaaacgcaccagtaaaaacattcaatgctaaacaaacaaagactttaaaagaaaatggagattaagtgatgcatctactaattttgcccaaagatagtttggccccaacaaatcttttctccaactcttgcattaagtaaagtaaaacatgatgaacaacctaaaaaccacaggcaaaaataaatacatgtaagaatatatatattttcctaaataaaaataataataaataaaaaattaaaatgtaaaatgttatataataattgaaagaagaagagaaaatttagctgtgtaatctaatcattctttcataatcttctaaaatctccacatcttcataaacttaaaatatcataacaaaacgcaacactacataaacataactttacaaaatgcaacattatacatatgaatataacttaacaaaatgcaacattatatgaacagaatttaatataacacaaaaaataaacatatattttttaaaatagaaaaccttctacaataatgtgtaccatgtcacaaaactacctaaaaaattatggccaagccataattgatgtacccataaaaaccaaacaatattttattataaaaatatcaattttttaaataatactatactattttgttttgtttttttattataggtatatattattgtatggtatatatgattttttgtgtttatagtatattatttatttaagatgatatttaatttttattttattacatataaattttttggtatgtatacatattgagtattttagtattattataatttttatgtggtatataattttattactacagtatattaatttttaataatacgatatattaaatactgatatatatatttaatgatttaatatatttattcatttttattacaatataataatatgtaacactaaaaaattatttaacttaatttaattattatatatttttaaaaaataataatatataataagtgtataaatatatagtatttattatctaataatttattatatatgactattttcttaattgttttttttaatatttactaatttagtttttacattttacatctcagaaaaaaaaattgtgatttggactt

SEQ ID NO: 70812 - DNA, 1723 bp, Cannabis sativa
acctcgcctctgctctcggttgatacagttttatatgcgaaaatcctcacaaaaaagaaagtctggctttcaactttgcaaaatcaaatggctgagcactgggatgggcgtttcccagtcaaaatctctgaagctatggacatgtttatgctgacattcggttgtgaaggggacaaaattcgtgtcttagaccgtgaaccataccactttcaaaaccaccatatcgttttatacacaccagaagttggcaaaaatttcacctctgatgatcttacatttactccattttgggtgcaaatctacagacttccctttctaagcaagaccagaactttggctattgctcttggcaacattattggagaatacaaagatgtttttgaagattcactaaatgaaggttggggaccattcctgcgtgtccgagttctactggacgtttcaaaacctctgaaacgtggtaggatgatttccttgagtcatgtgaaggataagttctgggttgattttcgctatgagagacttcccgaatattgcatggagtgtggtgttattggacatccttacaataagtgttctgtgtttcttgaaaaattagacaatggagaagaaccagctttggagtatcagccttttatcaaaggatctgcattgccaacctcgggatatgatcgttatcgcactgactttgctaagggagatgcttggccattgattactagacttgcaaagaagagtttaacatcggcaattccccaacttgccaaacgtggtcagccacatccgcgcattctgttttctggcgagtcatccaacacaaacaactttgaagattctaacaataatttagatgacattgttgctgcaagatctatggttccaaaagacacgataaagcctccatctgttgttttccatccatctacattactctcttcagcacaaaatcttcacaaagggatgaatgcaccagccactaaagattccccaaccaacttctcggatttgtcctcaatttatatgcctgcttttgtacccaataccaccaatacttttgccacgtatcccccacagacttcactcactgatatccgaggaaaacaaccaatgcctgctcatgctaccaatgctttgcctcctaaagttgcacctgccactatttctcctgctgtaatgcattgggggacagaaaatacaaacccaaatgtgcaatccaaaagacaaaatgaagggctttcattacgccaaactcttaagagatgtcgaggaacaattcccaatgatgcagcttcaactttgtcagttggagaggttgatcaccacctagtttccattgatcttatggattctatgagtgacaaagacaattcagcggagactgcctcgcagtcccgccagcagccatgaaaattgtaagctggaatgctcgcggtttggggaacccgagagccattcgcaaactccgattgcttgtcaaagagcaaatccccgatgtactttttattatggagactaagttagtttgtaattctatttctcgtattagaaatcttttatgttttaatcatggacttgaagtccctagaataggtttaagtggtggtcttatgttactttggaaggatgatgttgatgtaactttgcaatattataatacaaatgtatttgatggttatatggctgtctcaaatggtcctaaatggcacttcacagctttctatgg

SEQ ID NO: 70813 - DNA, 1775 bp, Cannabis sativa
taataatgcatgctcttgtctactctcctattgcagctcaagattaaaatacttaaaactatatcacaaaaataagattaaaatactcaaaaccatatcacaaagatcggagtagcaaaaattgaatcgcaatagcaaaagacaaccctcaccaagctacaaagttttcatataaatagcttaatctttagatttaagattgacacccaataaccgattcgattcaattcaattagaattcaacttttattattcaatccaatcctattatactcgaatatctaattttttgtaaattgattgaattaaatcagttcaattgaataaattagatgttgtccactttgcatataaaagatgtggaaggaaaagggcattaaagtagtaactcatgtttttaagaggatcctattgatagatcatagatatgagtttttttttactcttgcttgggaggcttgtaatgttaggaattgtgcgctccataagaaaatttgtaactacaatggcttctatgttagaatgggcaacgaattatttacataatttttgagacattagttaagaaaagtggtatagatacggttctacaaaatttatctatttttaggatagggtggccggagtcgttgctcaagacccttcaatttaaaaggtctcttagtttttttttttcttttaatatatatttttcaaaacattaatccattaaggtcctaaaaaaattttagaaaaatagtttaaaatcttatttgaatttaatttagatttcaaataaaaggttcattttttaaattttcttcaagaccccataaaagtaatacacggccggggaccacataaatggaagccattaggtggcttgattgttaattaatgttgttgggggttgttgtagtattgttacaaattttacatgtgcttttatggatccacctttttctcctctcattactattaaaatgctagtctatcacatatatttacaaaagagcattattattgtgcactgctcaacaatttttataggtacgcttcataattggttagcgatattctttaaaatatattctcttaagttatatgtgattcaatatataattacattaattatactactatagtatgatactaagaagaatgttaggcactaatcataccttttagcaattcttatttacaaatatggtttggtgttgggtggagttaaattgtaaacatagtacaagtgtgggtatgttgaacaagcctctagaggaaaagtgagttggatttgcaatgaaatgtatgtaatagggcattttgggtgcaaatttattccaagatttatcaatagtgtgcctcatttggcaaaacttttagtttttgggattaggagtgcaaatggatcgtgtcagatttgatttgttatgatctgacccaatctaaatcatgtaataattcgttcgccccgcctcgttagatcggatactcaaatcggattagattcgacccgacttctttttctttccttttttttcctttagaatttcaattttatatctaaacttataattttatatccatttttaattttgaattagaattatttaatactatactatgtttgatattgacttgtattaatagattgtgtaaatttataatatattttcaataaactcgaccccaacaccaactacgggtcaggttcgagtccagtttcgggtctcgggctcaggtctgagtctcaggtctaggtctgagtcttaggcccgggtccaagtttgggttaa

SEQ ID NO: 70814 - DNA, 799 bp, Cannabis sativa
gcttgggaaaacagtcctcaataatcattatatgtggattgttgggtatagcaggttttgggtcggttatgagtagaataagaaatactaataatatatatgaattatatgaagaaaaaaatcaataagagttatatattcgtgtcaatattataagatatatttttttttgggtaaggttgtaagatataagttaggtaaaggattaaggatagtgtaacaaaagaaaaagacaaataatcaattgcgtttggttagctaggtgtgaggaaaagtcttatagaaacagtagtagtgccttgtggaccatggtgctggtatatattattcattatctgcagttgactagagaagtcaaccttcacttcagagactctgctccagcctcccattactatgttcttcttcccagaaccaatgcccatctcaacctttcacttcgtagcatcatcacctcacctcagtctcaggtaagttttacataattttactcttctagaatgatatatgatgctggcagtagttttaattgaattatttactttctcattctatttttgcattttttggtatcaaaaaacaattaactgaactggttattctagacgctaatctaatattacacaacacaaatagcgttagcataattttgaagaaagtctcttacttagcaatataaaaaaaaaaaaatcttaggtcgtgatagtgtgaatatatatacatagcaatttaatggtcaaataattataacaatagcaaaagatgttctaattacgatggagcttatgtagaattttca

SEQ ID NO: 70815 - DNA, 908 bp, Cannabis sativa
aatgcagtgcagaaatatgccattgcgacactgagggagattctcattgaaactttaatcaagaatgtaaatgtaatatatactgtttcggattttgtataaagataggagactttggaagaattcgtgtccttgtatgtagcagaaaaatgaattgttagttattagtgtaatttctgtttttgaactcatttttaaagacaaattgctccctcctcaaaatacacaattctgctactgttagtagtatttgcatctaatagttgttccaaggggttcggtgcatatcacttcttgattttttttgttttgtaattgtaagtttcctcttctaagattttcaactgctggaatgtttgtcttttattatgttgtgtcgtgtccataaattgaatggaattgtgacgtgaattgaaatgtaacataaattcagaaagaaaatctggggaggtcagtaatttttgggagaaaataaaccacccatgagagggccacatctcaattctattattttatttatggaatcattggaatgtgacaaaagtcgtattttcagctgtcgatgttttaaggggactattgtaatgtgagaaatttaaaggataacagttggaaggattaataatttgagtgaaaaaaactatttatttattattaaatctctccaatttggaggttatggagaaaaagagaagaagtttcagctttactttttaggcttcaggataattttgtttaactagcaactatgctttcagtaacgataacatctccatgtcatcttggtgtgggtggcatacagaccatggttcactgacaggtgatcacttgttctcgttgttaatctaagttttgattcatacctcacacctctttctcacacaattaccaatttcatatgtaggtct

SEQ ID NO: 70816 - DNA, 1928 bp, Cannabis sativa
caccacccatgcagattattttcttaatttttaacaaaagaaaaataaaacttcattaagcaatcaaatcggtcatcattatatatgaatgaatgtctctaaaagagcattactcactcgaataatacgatcagaaataaaacaagtataaatctcgctagaaagtaaactactattagtagcaaattatttaataaactttaaggaaatatgtctatttagctcagcaaataacctcttacagttatcaataatatatataggataacataacagtgaaactcttgatagcttaaacaatctgtttctaaatcaacttttctccactgttggttcttattaattaagagaattgctattaaaagacactatattagtgcctagcatccttcttggtgtcatgccgctattgttgtaattaagtgtcgggactcaataatattaagaaactattttttaagaaatatcgctaaccaatcatagggggtgtcacttatagaaaatgttaggtactgatgttcaataacaacactcattaattaataagaaccctatatctattgttgtaaattaattctaaattttatgagaaccctatatctatttttgtaaattaattctaaattttttgttctttaggtaaaatatatcatttttacattgtatattttataagagcattgttattagatattattggtattgaatattacctaatggcgccttataattagttagctaaattatatgcattaaattatatacgtatggacttgatatttaattagaccaatagtaatattataccttggaaggtactaactttttttaaaaaaaaaaaaattataataaatattttgcatcgattttagtctttctcatctgttttagcttggatgagtgttttttggtacaaaaaataatacttaaaaaaatttgattagatgacgataaaaataaagttatgcttgtaataaaatatttaaatattatttttcgatattctaaataattactatgtatatgattatgaaaaaatattaaactaaaaagccaggaggtgtagtatatataattctaatataataaaaatacacttttttttctttggaaaatttatttgttctttataagttttttctctcttcttaaagtgtgactaagaaccatttcattatttatgtcaattaagttgatgtcaattatgtatgtattggttctatgtcagaagtgtagtaaagtgtgtcccccaactactgaattattagttattgaatttaattgtctatgataatgttgtaaagctcttttttttttttttttggaagaaaaaccccaaaactccaccctaaagagcaagagatctgaaaatgagaaagagagagatattattgaaaattcatgacatcaaccagtagcttcatctcattaggtgataaaattcttgctcgactaaattatggaaattattatatcattttgagaaattttaagaaaagaaaggtaactttaaagaaataacttaaatcaaaaaatttatgttagttctaccaaaaattttagcagtacaataactataaatcgaacgtttctaaaaaaaattaagcatacaattaataacatataacattccagaacaatacaaaaacaaattttacccatccgaccacaatacacttattcacagaacctacttcactacagatgaatatttaagatattcaaagttagtgaatgtatacatctagctaactaaaccaatcaacacttgccaaaaatcatgctccccctccggttaagatccttcttgcactactacaaaaataagtattagcgacgatcctaaaaatactttttttagggaaacaagcactaaataaattaatcaactgtttaaaattatcgggaaaaaattgggtattcctgaa

SEQ ID NO: 70817 - DNA, 1568 bp, Cannabis sativa
taatttagctatatagctattgtaaactaataattgattaatgagaataatttttttctctaactcaaatcgtttctcaatatggtatcagagcatttcgtttatttttaattttttttgaagaatctttgtcattctccctgattctttgaaggtttcaatatttcgacttttcattgtggatccttgtccaaatttagtagttttttctcacaaactttctatttaactagatcacaacaacttcttactttggcgtgtactgcgattcgaggtcacgatctctccaatttcatctcctccacaatttggccgctgagacgatttctcattgagctgtatgagactccaggtactgttaatactgcatattctcattgtaaaattctatttactaataaaacaatgtttgatttctgcaatgcatgttgtcaagaaaaaattcatatatttccttttcccacttctcacactttatatgataggcctcttcaattaattcatttcgatgtttagggtccttcccctactctctcatcaatgactataaatactacgcactttataaatgtattttctaaacatacttgggtttttctgctaaaatgtaagttagaacttttaccaacttttctcaactttaaaactcaagtcaaaaatgaattttattgcaaaatcgaagctttccaagctaattgttgaggtgaatttcaggatttttaaaatacctttcttgcttgtatttctcacaaagtgtcttgccccaccagattacacagattttgttgataagtttaattttaaatattgtttgttggatattgattttctgaggttttgaattagtgaggtgctaataattagttgttactaaccaaatggtaataattttgaattgtgtgttaaactttaagtttctatattaattttattttgaagactgtcattctaatatgattttgttttttggttttggtatagtgatgttttattttttttttagatttttgctagctttggcggcaactattaataaagggaagggtatttcagtgtgatgggtatgttatttgaagacgttatagctatattatctaaattttcgagagtagttttcttccatgtggttcacattaactatttagcagtccatgatttgacaaagcatgttttttcggttagacggtgaactatcctggttcaaaaaaagtcttgcgttgattacaaatatttacatcgtaaatttatgtatacctacttttcatttcttattttaatttttatttttctttattattatttaatttatatccagtttataggttatatctcattatgtgcgttaatgataaattttgataaattatgtaaggttatatttagtactttaattataaaagagagtatttattaattaaaattatttcacaattatatttagttaacgtcttatcaaaaaaaaataacttctcaacctattcatataagagtaatttgcggcaaaaatacctaagttttatcccaaatagctgataaatacctaagttatatttttggcggtaaaaata

SEQ ID NO: 70818 - DNA, 936 bp, Cannabis sativa
ttttttttcaattctcctattttttaagggattagaaattgtatattttaaaggaaagagtctcctttcaccaaatctctcccttcccttgccaaactagagaattcattaatctctctccctctctcctcttctaccctcaaccaaacatagtgtaaaaaaaaataaaaaaaaaatctcatttttatgttttttgcctaatataagagagagagagaagattaagcatcacagtctgtcactgcatacttggcagttttgacagacaatttagagttgtggtgctccataaaatggtctctgagtttccactttcatttgttttaatttgcttgtccttccaattattccaaactataatgtatgtgcctttcaatttttattttttatttttttcaagtgtacttccaaattctaagcatgaataatttctaataataataataataataataatgttacattcacgttggtttttggataattgtgtgcataaattaaataaaatcagtgaattgaataataccttcttaaattacccgttagacgacagaataaataaatacatgaaattgaaattaaattaattctattgccattgccacacacacttatagtaagtacatttaataaaaatggtaaaataaatggtttttatggaaacttaaatttctaccattcaatgctctgaataattgaaatagaattggatttggttttggtccaatatcattattcagtgcacttggtttggtatattaattggattttagcagaagtctaggtacttaaattacataccactaaacaaaattacccacaaagtactatgtgcccataccataccaaaagtttttataatcattcagggttgttcaaatttccaacaaaggaaatcttaaaatgaaaaatgttatcttccaacaaatatctctt

SEQ ID NO: 70819 - DNA, 1330 bp, Cannabis sativa
agatgtataaaagtggattagcacacaatattttgttttaaatgcttgaaacttgaaatactcttttcagcattataaattttaaaaaattaggatgtatacgtggtatttaattggagagaataaaatggaatgaaataaaaggaaataatttttattttattcttttatttatttttattttaaagtattagaatgttattcttattgtagttatatattgattttttgcaaccaaatatcaccgaatagggtttttgttatgttagtttgagttatgttagtttgagtcggaaagaataaaattagagagatcgagtaaaattagagagaatagacttgaagggaatataaacctcatgtgtttgatgagattactactattttaatttaaaaattgagatttacttaaaaagacaaactgagcttatttgtgattataaaaatattttaaatctatctatagaatttgtgtgattttgtgattatacatatatatgtgagtggttggaggtgtgggttgggcgagcgaccaactgaccttatttgcgtatgcggcttatggctgcatttacggcgtcatttttacctgtaatgtatgagacaacgcaatacataatttaagtttctcaactaattcgatattaattaatatttttcttctgagaccaaattgatatatttggttttgttttagttccttttgattattttgttttgttgcctttattatatatagatatacttaattattcgttacttaattagatacgaagatgatggtaattaatactagtacgtgtacagctaggtataagagaatatttatttaatggaaatcaacatttgttttaacacaaaattaaacagatttgttttgtacctaacctttttcgttattacgtacgtacatgtgcattaaaacacgagctctaaatataattacattaatttcgactacacacgaatatgttcatatttttcatgtacggtaaatgctttttatacaaatataaagtgtgagtactttcaaaaaaactatatcttatcttactattataaaagtgtcttggtgtgctattttttaactattttgccctctattagaaagaaagttttcaaatgtatcgttttgttgttttcttgactatttaatttttaaaataattatttattttttgtttcactcttattggtgaaaaaaaattataatttaccctattatctattataaaataatatttcttttacatataatttaacatagatatattgcttttaattttattattgaagaaaagttataatttaccctactatagattataaa

SEQ ID NO: 70820 - DNA, 1380 bp, Cannabis sativa
  modified_base (888)..(891): a, c, t, g, unknown or other
ttatatttttacataattatataagaaaatttaagttataatttttttaaacactaataatagaaatattcaaacggtaaaaattttctatatatacctatattgcattttatgaatacttaacaatttttttatatataataattattaaattaacaatttttttatatatataacaatttttaaatatagctagaattagaaaatatttggccatatttatcatttcacatgtataaatagtgacccatgatttcacaattcatgcacgtcttgcaaattatcacaacattattttatataatttatatatttatttattttttttatatgtatcatgccccttcgaacgtggacatgcatttatattatttagtgttttatatgtatatataatattaaattatatttttatttaatatataacattagggtgtgattaagggtaacccctaagctttggggaaaagtaaaaaattaaaataaataaaatattttaagctaataaaataatacaaacgttgcgcacattatgattcccttgttgaccttttatgattaattttgttatttatttatattataaatattactctaaacaaaagtttataactaaaaataataactttatagctcagccaccagccgacaagaaccataaataattaaaaaaattatgctaaataataattgtaacaaaattactaataatctctctaacattgttatcggtaattagtggtgctggaaattatactagatgatatcttttgaataatgaacaattttaaatataattattaaattaaagtaacttttgcttaaaattttatatttcaattttttaaatcacaaaaagtgaaagaattttttttattttttattttnnnnttttgaaaaataaaaatgcattttgtaactaaatttattttttaattttataaataaaaaataaaactaaaagtatgttctataaattttattttttatttttgttttttgtttttatttaagtcgagattaggttcggggtctagggtcaagttaggttcgaggttgggtttgaatccgggtctgagtttggggttggggtctagggtttaggattgactaggatttggggttggggtctggagtcgaggttgaggtttaagtccaggggcagggctgaggtccgggtccagtctggggttcaggttaggttcgaatccatggtcagggccaggtcctgagctcgggttcgagttttggggtcgaggtacgagtccagtttggggtcgagattcaagtccaagttcgaggatcgacgtcgagatctggagccaaagtctggagctgagatcggagtccaaaatattaatgaaagaaaatacaaataaa

SEQ ID NO: 70821 - DNA, 1047 bp, Cannabis sativa
cccttttaagggggtgcattgtagaatcacccattaatatatatatagttttacattttcttaataattttaattataaatttataatattacgtattatatttaatttttattataatttcaatttatttataactaataaatatatttattattattactctttaatgtattgtgattaggacatatttattcgtgtttatgtatcattttcggagcatttttaccatgcctttcaaacttattattttgtatcgtgtttaagtttataatttttgtatcgtgtacgtcatgctaatttataacattgtgttgtgtcgtgttaaaatttttattttgtcttacttggtcatgtcagtgtttcaaactcgtactagtttcgtgccatgtcaaaaaatttgaccaattgatcagcacaagggctttaatctttttccttttaaagttactcatttttcctattaatttttaaatataccatataataaagcccaatagtttctctttctgaagcctactaaattttgtgggccaagactacttttacaaaataaatttgattaatggcgaaggggttgtttggttttaaaacttaaaaactattttcagttttgaaaaacagaaaacaatttttaaaaactaataggagttgtttggcaaaaattttaaaaaacagttttttaaaaattgagttttaaaaaactagaaaattgaaaacatcaaaatgttatttttcaatttttaaaaatagttttattttgtctaacatattatattttacatttttactcacatactcggatcctagacccaaatcaaatccggacccaaataggttcatgttatggtatggtgttaaaatattaattttttttaatatgaaaaaaatttaaaaatagttttaaaaaaatttgtaccaaacaccattaaatttttaaaatgacaaaaaaattattttctattctcacttttaaaaacacaattttaaaaactaaaaattgaaaacacaaccaaacaagttcaaaggctttgcggttctaggaattg

SEQ ID NO: 70822 - DNA, 2048 bp, Cannabis sativa
agttcctggtaaaataacttccaacacgtcatattattgaaatcggccttactttacttgcccatgctggtctatctcttgattattggtttttagcatttaaacatgctgtatatctcataaatagaatgccaactcgagttcttggggacatgtctccatatgaaagcctgtttcacaaggtgcctgattacaatatgctgaaaccttttggatgtgcttgttaccctcatttaagaccctataatagccacaagatgtctctcagatctgaaaaatgtatcctagttggctactctatgaatcacaaagggtacttgtgtgaaaacaaagatggcaagatttacatagcaagaaatgtagtctttaatgaagaagaattcccagccctcaaacaagatgaaacaagcaaggtatcttcttcttcacaaactttttttccttctacttcatttcttacacctcctatcataactaatacaactgcccctgctgatatgaggcctgctgcaccagcaaccacagccactgctgctgcaccagcaccagcagcccctactgctgcatcagatttacatcccagccagcaacaagatgtccatgatactattgttcactcccctaatcccatccctgatacaacaataaatccccaccagaaatcccttaatgaaccacaaacagccaaccaaccttcccacaatcataccctcaacacacttcaaatgcaaacaaaattgaaatcgggtatacacaaaccaaaagcctaccatgctactatccatcccttacccgaatccaccttacctaaagtcccaacaactctaaaacaagcccttaacaacccaatttggcttgcatctatgcagaaagaggacaatgctctcaagaaaaataacacctggacacttgttccatattcaccagatatgaccattgtgggaaacaaatgggtacaccgtatcaaacttaatgctgatggctccgttgacaagttcaaatcaaggttagtggccaaaggatactgccaaacactgggaatagactataccaaaacctttagcccggttgtcaagccaaccacagtaagaaccttcctcacattggcagtttcaaacacttgggatgtcactcaattagatgtttcaaatgcatttcttaatggcacactcaaagaatcggtctatatgactcaaccacctggattcatagatctcctatatcctactcatgtttgcaagctacacaagacaatttatggtcttaagcaagccccaagagcttggaatgaaaaactcaaaatgacactccgcagcaagggattttcatgctccaggtctgataattccctttatttttctggtacgggtgacacacaaattcttctacttgtgtatgttgacgatatattaattactggtccgaacaagcaactaatctccagcctcattcaagatcttaacaaggaatttgatgttaaagatctaggccatcttcattactttcttggggttgaagtgcaaagaacttcagctagaatgcatctttctcaatcgaaatatatagctgaaattctcaccaaagtcaaaatggaaggagccaagccaagccccagccccaccagttcagcaataaagctctctttgtcaattggaaaacctttttcagatccaaccttgtacagaagtacattaggtgccctccaatatcttactcttactcgacccgacatagcattcattgtcaacaagctaaataaatttatacatgctcctaccaccacacattgggatgcttgcaaaaggcttttcagatatttgaaaggcaccatacatgagggacttttcattcaacctgctgctagacttgaacttactgcttactcggacgcggattgggcaacaaagcattgatgatagaagatcaactggtgcttatgaagtatttctcggtggaaacttgatctcttggttagccaaaaaagcaataagtggttgctcgatcaagcacggaaaatgaattctgtgcattaacaaatactgctgcag

SEQ ID NO: 70823 - DNA, 1037 bp, Cannabis sativa
gggagctttaccttccaggaagaaagcaactttattacttcacctacatgtaataactcgctaaaatagttaactcgagtacgaaaagtataaactgaattttgcgagtgggtaatcctcagaaccgaaacctcagggatctgaaagtaagtacaacttctttaatgctactcaaaattaactaaagtatacatgcctttgaagggccctaagtcctgaagacatatgctcattcggaaggaaaagctaaaaataaatcttttggagtactaaaatttttgctaaactttctagagataaggaaggagagctatcttctcaacaattccagacgtcaaacagacttagagtcggtcctaaggaaaacttaagtttcgaagctttggctgttggcaccagaagcttaagatattttaaactacctactgaatggctatacgacaaacaaatatgcaaagaggcaagataataagcataaagtagcaaatgaaatagttgttacaaagcctcccagttaatgaatttaaaagtgtctctgcatatatcaaaagggggcaaggcccccaaaaagaaaaaaaaaaaaaaaagaggaaagaaagaatagagaagaaaagaatgttgaaaaccctattgaaaaagcattcacggttgatttttatctctaatttttgttctcattaattgcttgttaaaatttattgaagtgtacttcttatacagccaaaaaataataaaaaaagataaaaaaaacgctaaaaaacctattttgcttaggattaggaagggcgggccgcgacccatgatttccatgcctaggcgcgtcccttttatttgggcagtgagttttctactgcgtcgactgatcgtattttcgctataattctctcgatattgctcggaattggacgattcaagatgttccggaaagatgaaagagagatctagagcttttatgctttgtcttttttcaaaatctaattagaacgtagtcgagtttaggcttgaagttttatactttatttttttgcacaattttc

SEQ ID NO: 70824 - DNA, 2031 bp, Cannabis sativa
  modified_base (152)..(156): a, c, t, g, unknown or other
agggcataaaacccaacagaggagagaggagatgagtttggcaagttagttgcagctgccattgggagttgcagagagccgaattaggtaagggttttttttagggcttttcaaggatgaagatggttgtgcgtgaggatagaagaagaagnnnnnaagaagaagaaaagaaaagaaaagaataagaaaaagaaaaaaaaaatataaaaaaaaattttaattttaattttttttaatttttaaagaattttttttatttttttatttttttaaatatttatttacatagaccaataaaattgtgccacgtgtacactgtgtacacgtggacattccaccatggcatttaacaactaaaaatggtcggaaagggctaagtgctaacagaacttgagtttaaggagtttaccgcaaaaaatttagaattagtggttagttgcaaaaacctgaccacttaaggaggttttgccgcaaataactcttatttatttaaattagttatatttatttatttcttatggttatttggtatttccattcaaatttaatccttttttaaacaaattcaaatttcaatacatccttcttctcaaaaaaacaaaaaaaacaatacatcatttttttttttttttgaaaacaatgaatatgtcattgaacaaaaataaaatgtttgattacaaaaacaaaaaaaacctactaattcccagagccaataaggaaagttgtctaaccatacaagttgtttatccatccgaatggcatgcactgctaatccatgcgcagccacattggttgttcgacgaacatgaattaggaatacacttagaaatctagacaacaaacttgccaaatcaaccaacaaagatccaagatcattgaaaaaaatattgcctcttattaaaaacagacacagctgtaaggcaatcagtttcaactatatgaacagtatagcctagagaaaaaatccagtccaaagccatcacaatcacaatacatttcacttgaaccaccggaaaattaccttaaaaaaacacagattaggttctaataaatataattaaaaaaataactgatagaattataatttaactatacataaatatattgattgaagaaataattgtagctaaatatcaataatagtaatatgaacaggtaatatataaatataaaatagaatagttaatattatagaaaagaaaacaaatatattatacaatattaaaatagatataatattatagaattaaatgtgtatatcgaagggtaaacacccttcggtttataataatagaaggcttaaggcaatttctttatccggactagtgattggagaattgggtttaatgcaatgtctaataaatgcatatagtaccgaaaaaactaccaaaaacacatgaacacattttcaatattaagcaaaagaaaggtaacccctatacaattgtgatttttttgaggaagaatataattgtgattattaatcatcacattgcacaaaattgacaaaccaacaatgttttttatatgccttttcaattgaagttttcctcccaattgaaaatacaatttctattgctggattagttttaacaactcaagctataatatgaaggcaatttctttatcaatgataaaaagactaatatctatttttcctatatttctattgaatctaatagtttataagctagactcatgcttattcttataaatataatccaattacattacgtcaacaagaagatgattaatatattttcaatataagacatgaatccaatagtatatatattgtacctagtgatctatagaaataaaacacatacctattattggttttgaaagacatgctattatatttccatctgaatttcgaaatattgctccaataccaatagttgttgagtttttatcaatggctgcatcaacattcaatttaaattttctttttgaagaaggaacctgttgggattttatgccctaaataaaacccatttcaatcaaatctgatttgttatcaataaaaga

SEQ ID NO: 70825 - DNA, 1101 bp, Cannabis sativa
ttatttttaaaattttgtgctaggtcttataaaagctaaagacggcctaccatcctcaaaccgacactgaaaaaacataaataaaaatagagacataagggcatacactcaactcaagtacttaacaatgttttaattagtttggacagaaaattatacaccaccacatgatacaaatggttcaaatgttgtattatatcacataagttcaaaccaatatattttacacattaaaatcatcacacttattacaaggcaccataaaacaaatacaaaaacccatatgaccaaaccataataccaaatcacaaataaaagaaatcccctataatggatttaaaaagtgaaaaaagaaaaacttttttcttttttcttttttgatactaatccttaaagtatagaattagagagacagcttaacttaaaagtgagagtgatcaaattagttcactctttttccctcttactcttttaagataaggatcatattatatatagtatagactatagaacttaaaaagagaagtttaacatgtccatgctaaggctctccatcattacattctccatgaagccacatttggccattgggccagtaattgggcctgttaatgggccgggctttttgaaagtagtagttgatgtgggcttgaagactggacaagaagccagtggaataatgggaatgttttcacagttgcaaagctcaatcatataaccatctgggtcatgaaagaacacttggtcaaccttggcaccatcatcttcaaccaatgctgtcacatatctcatacccatttcttgtagtctcctcttcactagtccaacatcagtacactgtttcacccaattaaatataattattattttttaaaaataaaaataaaagatttaatacaacacctttgactaatataacccaaagtagttggatgagtaagaataatcataatctaatcttctatacattgtatagagtctagtgtgtaatcattgattcattcaatcaaatgtcaatatatattgatatatatttttcaacgatttaatacttttttgttttactaataattcaagtagtttttattcaaaaaaaaaaaa

SEQ ID NO: 70826 - DNA, 1225 bp, Cannabis sativa
gatcaccaatggcctgtgatcttttcaggctggtaaccaagaatacagttgatgaaaatatttatgagattgcaaaacgcaaattagttctagatgctgctgttcttgaatcgggcttggaaatggatgaggaaggtggagaaacatctgagaagaccatgggagagatattatcctcacttttacttggttaactgccttcactttttgtttttttttttaattatgtactcctatgattttttctttgattcttcacttgtctgccccattgttatttttaaaattagtttttgcataaaagaaaaaaaaagaaagaaaagaaaatggaaaggaaaaggtagtaattgatagaacagtggagaatgctatatacgggtctaaattggcccagaaatgttgtagtattagtagcagtagtagtagtaaaaattattaatgagaaacgctctgataattaatggctcgcaacaactttctattttatatgctaggttgtttttcttctgatcgaaaattaatttggaccactactactagctagactttactatcaacgattaaatttcctcacaaaagtagaagaattaatttaaccactttacatatatctatataatttatttattttttaacatcaacgtcttaccttagataaaaaaaatactggattcttctatttgagcattattattattcataacaataagacaacaacactaaccattccaccaaatagatccagtttggtaaataagttggtgtgtatagtataaattaaaatatatgaaagtagctttattatagcatttctaatggtggttcttattttttacttaaattttagttaaaatagttaaaaaattaaaagtagggtcatttttattatttttgttctaatcatgttctttactttagttagtatttacttatttcaataatattttataatttagatttattaaatataaattaatttaatgaaataataaaaaaaattagtagtatttcttattaaaatagtattaaaaaatttaacaaaaaagtaagtagttcatttactccttatctagtttctattataggaatcatttttttaagatctctaagtatatttagggttcgtttgtaatgttgtattgggtcgtattgtattgtattatattgaattaaattatatattatatttttaattttaaaaaaattatatattatatttttatat

SEQ ID NO: 70827 - DNA, 1322 bp, Cannabis sativa
aaaaaagaaaagcatttaaagtccaatgagctttgaataaagaaagagcaatatgcaaggagcccaatgctcctttaatattttggtcaagcatgcttggtttcaagcattagcattttattttcctaattacttggataaaaaacaactttcttatttcttaccttaccctttggacaaggctttgaaagcaaaaactctattttataactgccctctctctctctctcctcctcctccttcttcttctatctaattttttaaaattaagggtattgagaaatagcccacactattctacttagtacttcgatttttatgtaacattgtaaagaacatcaaagtaagattttttggttgattgaagatccatgttcaatacttgatcatattctatgacaaacatgaatcaagggttagagtattgaaaacagagcactcttgacttctaattctgtataaggctagtagcatcaaagattggttatcattaatgattggaccttgtctcacaattctactaattagttcttctattttctaagcttgagctaagtagctaattataatactctaagaaagcttctttgactgtctccgataattatatacccatgttccaaattaataatgaataacataaaatagtagttttcagtattctcatcttaataccttgatgaaacaatttagagttaatatatatcaccatcctttcacaaattcatttttgtcttttgagacaagaaagaattataacttttggaaacctgattatactcctccctagcttcatgttcagctctaataatgagctcttgatttagagggtctttatgaagggaagcttgactttcttgtagcttgatttttgctgcgctaataaaagcttgcgttattattttttacaaaaaaaaaattataatttataatattttgatattttataataagtattataattgactttaaatattaattaatatttgattaaaacataactaaataaaaaagcaggattgacacatataataaaatagtatcccgatcgaatttttataaaaggatgttcgaatcgtaatgttagtaactaacactacaacatttatcgttattagaagcaaagggctcccccaataataatccctcagtccaaggaaagagtaatagcggcgagaccctttgctattaatcccttgataatgcttgctactagcggcgaactgacactactacaatttggccttttagtgacactatttagtgacacgcacaaaagtgtgggtcactaaatagataggagtaatttttagtgacatgca

SEQ ID NO: 70828 - DNA, 3684 bp, Cannabis sativa
gtattttttaatgatgtggcaagatattattgtaattgagatttattaagttatttttgtaattattttatattttacttatatttttgaaaaaatcccaaatttttttttgtatcgagataaattacatatcatattttaatatataatagtttataattttttaatggaaatgtttcttaaatattttttttcatttttattaataattttacaatttaaatttattatttgcagtttcataaatttattttttgaaaaatacaattttaaaatttcaaaattataaaaatacgactttcccattaaaaaaagaaactcttgaaaaaagaactcatttgtagaccctttaacaaaaacaacaaaactttcattaagttttaaaaataacaaaaatatgactttttcctcttttgtaatcatgagaaaacaaaaaccagttaaatactcataccaagtacgaagtggttatttcaagccatataaattcttgtctaacttatatacatgatgaaaagtgaagatcctcaaattctttaagttgttcaacacacagttcttcttttaataaaccattcaagtaggtagatttaacacctatttaatgcaattaaaaatcaaggatacaatcgatggaaagaagtaacctgatggattccaatcttgccacatgagcaaatattttatcaaaataaataccttcaacttgagtgtattcttgggcaactaatcttgttttgtttcaaatgatgttgccaaatttatcaattatatttttaaaaattcactttattcctatgatattgataaatggtagcctcagaatcaaggtccgcaccttatttcgaatgaattgatgcaattcttcttgcattgcacaaagctatgcttcatccatcaaaattcttttattgttttaggtttcgggtcaatttggcacagctatactgtaaggaaaaacagttgtaattgtattattagaaaaaacagttgtagcaaaattgtgaaaaaaaaaaaaaactgagttgagtgtggtaaattataaatttaaaaatattgtgacttgttaaaattctattataataatgataacattataatttagttcattataatcataaatatttatatataaaaagtatatataatttttttattatttttatatatattttaattttttttctctacagtttaaatttatatacatttgataaaaataatttatattaattttaaataagttgatgcgatttttttaataataaaaatataaaatactttttaaaacaaaataaaaaaaatagaaaattaaatattatttattttaaatatgtttttccttcaatttttattttttattttttgtaagatataataaataattaaatatatttttaatacaaaaattgtcaaattatattgcaaaaaccagagtaatcttactagcatatatacttaaaaacataattaaactttgaggagaaaaaaattaaatattttgttaacttttaaagttaatttgcacaaaatacatgtattggagcctaattataaaatttgaaccataacattaactcattgtcttgaatacaccttccattaaacatggttggtcttagtgaattgtaccatattattttgttgattgatttcaatcacaattcacacccataatattttttcaattattaaaattctatcatgtggttaaagttttgtagctatggatgtaatataaatcttaaaaattacttacacatgagcaggacaagccctaaattaaagcaggctaggattgtgtttagggcccacttagcctagggacccatgtagcctagaggcccatatagcctagaagccaaaaaaatgttctctgtatttcaaatacacatatcttttttattaatatgaaaataccacatgtttcttaaataagggtctaatttttttttaaagcccatcaaagtttaggatcaactattaaacaccaactttgtgctcttcttcatatgcatgaggtggctgatggtagcttttacttgggactcccgagtactatgagatgtaataaatcggttgtgttggggtaccttaaagatagagttcaaaaaagattacaaaattgggagggcaagtttctgtcgagagtgggataagaagttctaatcaaatcagtgatccaagatttgcctaactatgcaatgagtgtgtttctgctgcatctgaaaattagtagtgatattgagcgtgccatgaccaagttttggtggcaatccacgaagattgacgttaaaggtattcactggatgtcatgagataaactttgcaagcataaacagggaggaggcatgggctttcaagatttgcgtgattttaatcttgctcttcatggaaagcaatggtggcggctgctcacaagaccctcttctttggttacaaaaatctttaaagcaaggtattatgcggacggtaattttcgtaatgctcaacttggctctaattcaagctttatttggcggagcattatggaatctcaagatctggttcgggcagaggcccgttggtgtgttggtaatgggcaatcaatctcagttttgaaggatccgtggctgcctaatgagtccaatccacgggttatttcaacccatcttactctttttgatgttattgtggctaatttactatctgtggatggctttagttggaactatgagatcattgctgatctatttgaggtcagggatcagacattaatttgtagcattcctttgtcctcttctgtagcaaggggccaacttttttggtcattcaaaaactcgggcatatacacagttaaatttgcctacaacttcttgcagaaacaaaaaaacaattggtttgatgatgaggctgctgctttctggtgcaagctttggaagctaaaacttccttcaaaaatcagtaacctgctatggagagcttgtactcagtgcctcccaacggtgctatagctccgaacaaagagagtagatgttaatgtgctatgtcctatctgtatggaggaagaagagagtatcttgcattgtttggtgacctgtcgtgttatcaaaaatcaagttggcataggcacgaatgtgactcctagagttggttttttagactggtgtcgtaatgtgtttcagcaggctacctcaaatcagttatgtactatggcaacaatttgttgggcagtttggggcgcccgaagcgacctggtttggaaaggtaaatcggttcagcacgagaacattgttgggtttgcaaaaaagtatcttgatcaatggaaaaatgctcatcagtcagatttcgatacgtctttatctgcttttcaagcaggggacgaaagtgagcattgttgtcctccacatggtgatagcatcaagattaatgtagacgcagcgttgttcgaagggggtcgatcctatggctttggtttcgtggctagggactcaaacagattgctaattgaggggcgtacatttctggtttatggtgtggttgaatcggtcttagcggaggtgctagaaattaaggaggcccttagttgagtcaaagaagcaaagtggcaaaacgttatgctagagtctgattgtctttgtgcggttcaggccatccgaagctctttagacatgatttctacttttggtttgattgtaaaagact

SEQ ID NO: 70829 - DNA, 989 bp, Cannabis sativa
gaggaggatctagagtcccaagacttaggatcaaaaacttctttattgtcctgggaactcattctgttccttttagccttttcttgctcagcctttttcctctcagcttatttcctcttcacctcctgattttttagccttccagtgttggcttaatttcatgagggcccctattctggcctttttcccttctttgtctagattggaagctggactcttgggaaaactaattccttgtcctaatcaccttcgtcattgacaatcaagatgacttgttattctagaagcagaactttttgcaacagattcacttcgatgaccggagaggtaaaagcttctcaagtggtaacttttagaacaacctccactactttggttggcggtgtcacatatttgatctaagactggcaaggggctccagccctacctatcttttccttttgtaggcctcactgcttcccttgcctcttcaattcgggcatccacggtgcccatgaactcattaaggatgcccatctggattgtctaggggttctttacaaatggaaaacaagataaatttagacacctagaagtaaaaataaacacacagaagtaaaaatatatatatatataagactttgatccggatacaaccattaacaatgttgtatttagggtctccttgagcaaacaatgtgatatcttctcgatctaagaaactatcatgctagaagaaacctagaaatctcattaaggcgaagggatctaccctaacacacttggatggtggaagaaaagtgggttggaatctctacaattttatctaccttatcataataatgttacaaaaggtacctaagatggtctaattccaaaaagtaagggtcgaatcctcattaatcgatgtagataaattcttcaagacgcggaacgcagaatagacggaagggagaattacctcttctggaggttttggtgccataggctaaattcatataactcaaaat

SEQ ID NO: 70830 - DNA, 850 bp, Cannabis sativa
agggagagagagagagagattttacctactgcaccttcttttccttattaagtgacataggaatcttctttagaacgttttcatcaatttttctgtactgtgtctgaatcatcttatgtgttacgcaaagcttatcatcaatatggtgctgatacttatcatacaacactggaactgaaaaactaagaagaacccctgcattataaaattaagaaacaaaaaggatgagaacatatttggccttgtgaaatcgcttaatcacaaacatttattggcacagtagaaatctcaccaacataggcaagagtgagaaaattgaagaaacttccaatataagatgccacccataaaactaaagcaacctgcccatccatagtaatattgaaaaagaaagttaagcaaataaaacagcaaaattctgtataatttgaccaaatttgctggagtaaaaattcaactgggatggtaacacctaacctggaagaacaatttcaaatttctaccaatagcaatgtctcgtgcaattaataatgcttgattaacccatacccgcagtacatcggcggcaatcacgacagagttttcagaaatttctaaatcaggaagaggaggcaaaggtctgcaaacagattataagtataaaataactcatcaccatcctggaaacttttgaagtttcctaagcttctaaaactaattacattttgtaattatgtcttcttataaatgatgattcccatcatctaaatctcaaaataaatcatcaccccatcttgaaaactttaactttacaccacgtaaattgacgaatgtcattttaaaaactacatgtattcaataatcaatacga

SEQ ID NO: 70831 - DNA, 1498 bp, Cannabis sativa
ttcagcatttatgaaattttaaccacattatacaatatattagagttcaatttattaatatttgctaaaaaaaaaatattcatatatatatatatatatgtatagcactctcttggagatgctagtattctcgaactctatttacaacttctaagctgtcaaacccaacaggattaatagttggagtgtgagacttctatcactagtataattggtatatgtacatctaattttaccttagatgggatcatacttttgaagtcatgttacataggttggtacgagcccacacctagaccactagtatagttaattaattaatataaaatccatataataaatgagatcaaatgtagttcaaagtgaaaattacaagttagaatcacctacctctatgtgaatatatcataatgtaataaataaatgaaaattaaacaccacaatattcccacaccaaacattaaaaatctagtaaatattttggtagacatgacaaggacaagggttgatttcaaagaaaaaaaaaaggcaaggacaagggtgtgtgtgcatgtatatagatatcatatcgaggtctatcaaaaaaaaataaaagaaaataaagaaatcatattcaggacctccaaaatcgaaaccccctcccccaaatagaacaacacaaaataaaaaaaaataaataaataaaaaatcggaaaaggcatgggtaacatgtgtgtgtatataaatagtgcgcctaaaagtggcactttcttcttccttttggactcattcccttctaaattaattaacaaaagtgggctataggagcctatggcgtttcttacatagtctataaatctacataattgaagattaatgcataattaaattgggtctagcctaattgttatcaaattttttgggaaagcaattacattgcctgctcaagtgagcttctgtcaaggctagtccgtatccgaaaggatcttacctccgtgtatctagaagaatcctctagcgtgtgcctagacgccaattgtagcttcccattttatgtgtcgtgcagactacggaaatcactttcctcaaatctcgaacaaagaagaatatcaagttaaaatagaaaactacagaattgaagattaatgcataattaataatcaacaatcataggatacaatatgaatagatatcaccgtgatcaagtctccacattagcatactcgcattgccttatgggctgggcttcactagataagcccaaatcactactacgaaacagactttagtgtcggttcgagggacatttttttaaaaaaaactgacactaaagaccactccaaatctttggtctcagtttataactaatacctataatgattttaagtgtcggttagtagatcgacactaaaagtatagttgagaccaaatttttttttgaaaaaaaatatacatatagattgagtataagtgtcggttcataaccgagactaaaagatcatttggtctcggttataaa

SEQ ID NO: 70832 - DNA, 1345 bp, Cannabis sativa
ttgcggggtgcattattatgaacattaatggagcggattttagagtcagaccgaccactatcctcggcaaagcttactgttctttattgttgtggatgatgaggagggtgtgggggttgctcggagtatggtgtcaaagtagtgtctgatttggacacataactattttcttgggcaggttggcgccttgggggagtcctttgcttttgcccacaataagttggcctttgatgggcgcgatcttcatgaggagctgtgcgtcgcctatgcccctaggtggttgagcatgtggagcattaacacggaagtggctctccttggttcctgcatagtggtaccaactaacggatcgaagtaccttataggtgatggtggtgctcaaatcagataaggttggtctctctttcttctccactcatgttattattctcatggttaggaggaacagtttgggtcccatgagtttcatgaccacctccatgtaatgatacatgggtttcttgtgcatgtctttcatgggctccaacacttggtaagggtttttggtctcccctccttgttggattattcgtgggggcatcttctctccttgggcacccccttcttctcctaggtggagaaggatttcttggtacagggtgttggtccccatgcctttgggtttgctcttggagctctttattgcggcgcaggctttctgccaactaggcgcaaagagtttcattttcttggaacacttcatgcacaggtgtggacttgactagtgggcactccctagatggagatgaggaactttcacaatcttggacatgtccctcatcttatggcataggtggcatgagacgcttctcttggcgcctagaggttccctctgcatgtggttgtggagggacaaaggttccttcactttggggttgattagtttctcttgggactttagtatcctcctcataattggtccttcttatacttaacaccattgttgtagagaaaaagtaaattaatgaattttctaaggggaaaaataattagattttcaccgaaactctctcaatgaaagcaccaaactgttgatacggtttttcgtcaactgatctaagaagatcgtaaaataaaagaggaccatggtgaattaatttgataaataaaactgcaataaattaaatggacaccagggatttatagtagttcacccccatttcacgatggtaatggggctacgtctacttttagttttactgattagatccaacacaccagagttatgttctcaagagtgtctggataaaaatacaacaaagaatttctaggtgaattccttatcgagatttatgaatataaggct

SEQ ID NO: 70833 - DNA, 1111 bp, Cannabis sativa
ttttttttcttccctctataatttttacaaatgatagcatagcatattcaatgttcactttgatcaggctttcttttcagatgggcagggacctcccccatggctaccttccaaggtccagaatagaactttggcttcattataggcacaacctctccaggatggtcttcccaatatttctcctgcaaccaaataaagatacttaaataaacaagaaccgagtcaaaaatacatataaataaaccacataacaaaatttcacacaaacaagaaaacatgcaagatacagaaggtttgaatttcgttacgtgagtcgttctccttcatgactcaactcaaaacaacataaagtaccacatttgttgtcattgtcgatatgataaattatcaggaaaactaccatgacttcaataatgggaattgcatcccctaaatatttgatatcagactgttctactttgagaagctgaaagtagaaaggacagcataaattcattaccaaattaatcgaaggaaaatagcaatgtttttcttcccaaactatcatggactaagtttgaaagatcaggctgtatcagcatctcttaaaaagacaccaatgccagaaagcatacacaagctgaggtgaactacagtgctcggtagttttgaatttactatattaacctaaccaagtaaaattctacttcaagtcatgcacagaaacaactacaactgtcgcaacaaagggaatgcaccaaaataatttccataaatcaacactccatgggaacagttgtagatcaatcaaaagcacacagcataagcaaaacataattgtctctcataataagaaccaaggttagaaattaatattacctacaaaattttgttagaaaatgggtccaaattcaaaggatatcacccatttctggcacctttggtttttctatttttccttactgttacactgtcaaaacttatgtttcacaaccaatcccctaaagcagtaatcaacaagaaaatccaaaccaactagataagttacaacactaacaagaatctctgctgagtaaattagctgaatgtcaaaagatattataaaagttaaaaaaccttaagaagccatcaa

SEQ ID NO: 70834 - DNA, 1335 bp, Cannabis sativa
aatagtattgaatacatccttttcgagatatactgtcaaattattattcaactattgatctctcattttgttgcgcatttatcgtgggcaattaaaataattcaaaagatttttttttagttaagaagtaaaagaaatattttttttcagtatgagcttaagcccacactggttcttaattgggtccgccaataaatatatatacatatataattgattttaaaaacattaaattttaatagaatgaaaaatcatgacaaagaaatttcaatttttatgttaatttaattattaaattaaaaaaaatgcaaaaacctaaaaaaaaacatctctttttagtactgtttattaaaaatgtgtttttataaaaaaaaaaataataataagtaattttatttttttttttgtaatgtttttttatttttttcgatgaaacaatctcaatttatattaaattgagagatttaattttctaattagatagtaaaattaagtataaaagctcaaatttttttaatactacacattcatgcagtaatactcattaagagttcgtctatatatataagagaagtgctaccgtcaaccttctattactcttagttaatctctgtatgttggaattttttaaaaaaaaagaaaattcatgacggtgtttgttatatttacaacatcattccagtaaatttttttaaaaaaaatcaaattatttataatgccaaaaatatgtttgaagttctttgaacacgagtgataaattgaaatattataaattttatttttgatacggtaaactattcagaatttttcaaaaatttacagagacatattataactataacgtataccactataaaagaaaattaaaaaaaaaaacaatattttaacatgtaattttagattgacttaaaaattataattagcaatcctcaaatatattttatatgttggaattgagtgcctcatataaaataagaaaatctacatggtatactaacttttatcatttttttacaaaaatattgtcagacggtatttttcactggtgttctacaatgttttttagttgttctactagtgttttgagttgaataatttttgtgttctactggtgttttataaaaacacagtatttttgtaaacttttccgtgtgacagtatttttgtaaaatttacccaaaattctaatatttttataagtttccctataaaatgttcaaccattatatatagaagtttttgcaccagggaacctaattttgcacttatttacggatttggcctcgctttaaataatacggttttataccgtttttttttcaaattttttatgcc

SEQ ID NO: 70835 - DNA, 2121 bp, Cannabis sativa
ggaaagccatgtaaaaaatagcacttgtctttgtaatggccaggtttttgacagtgagtgcaatgaggtcctggtcttttgttttttggagctttgattggcagcaggattggggtcaattgcaggaggatttgtatttattgcagtagtaatgggaggtgttaatcgattgccaagggttaattgtctttcttggtgaatgaccatagaaaaaactttgtttagtggtgggcaaggatcaattaacaagatttgatcaagagtagcatgataagtttcattcaatactttgaggaattgtaagacttgatcatggttgatgtgatcttgggtttgtgctgcagctgcacaagtacaattgattcttggacgaagttggtttatttcatcccacattgctgtcaatttagtaaagtaagcactcactgtatcatcaccttgatgtagatatgtcaaggtttcatttagctcaaagattcttgggtcattaccttgattaaacttgttgtttagaatagctcacatctcgacagcagtgtcgagatacataatactgctcttaatctcaggtgaaacagagtgtagtatccatgacatgactaattggttacatcttatccaagaactataaagagaatcatgcaaaaggggttgaggtaaagtaccttccaaaatggagttttgtttcttgcacctatggagatcttgaaatcttttttccatggctgaaagttgcgatcattgaggattggagtagcaagaaccaatccaggatggtatgcgttacttaggtaaaatggagaacgaatgtcttcatatggtgctctatcgactggattggatcgaggaacatgaatctgttcctataaggattgttcgactggattggatctggaagcatgaatctattcttgtgggatttgttcgactggattgggttgaggagcatgatctgtatgtggatgcaaatcgtcagcgaattcgtttattggtggtggagcaacggtagcatcgaccactggaggattatgtgcagtggaggtagctgagatggtggctcgagtacgcaccattgttgaagatgaggaaagcttcaattgaattcttgaagcttgaaggaggagtcgtctgataccatattagtagaaaacaaagttttttcttttattcaaaatgaagaaaatattcgttgcattgaaacagagtagagggatgcaatatatatacaagcacagtaatgtctaactaacataaccgacttaaccaaataaactaatttaatagtcattgagttttttttttttaaaacaaaaggcaatttataataccattaatacaatttgtgcaaattgtatgcaaaaacattgtactaaaataataacaaaaatataattatcttaaaataataataataatattatcattaattcgtgtgtctaagtataactttatttatttatttatttattttgtaaggatgtttctaagtgtaacttaatcttactgatttgttatataatattttgtcccatttcataaagagtttaagcactattgccttttgatttaaccatgattgtcaatctcgtcattgagtttttttttttaaagtaaattcataatactgttaatacagtttgtgtatgcaacatcttgctaaaatcatgacaaaaatataattatcataaaataataacagtttaagtgtaacttttatttatttatttttatttttttagtaaaaatgtttcttagtgtaacttaatcttactgttttgttataagatattttgtcacacttcataaagaactttagcatcattgtcctttgatttaaccgtgatttgtcaatccggtcattgagtttttttttttttttttggcaattttatccatgtttgtgaaatagtatcaattaactagcccttaacattagttactaacttactatttcacaaagaatataaatgtcaaaaactaaaatttaaattgacaaataacaattaactcagagattcgacaaatattaaagttgggtcgacgtcattggacttgcaaattttagaaattaatatatatatacagggatacgattttttttttttccgtgatgtactttca

SEQ ID NO: 70836 - DNA, 1871 bp, Cannabis sativa
gctccaattcctaatatcttatccttgaaattggctgcagcatctacattcatttttagcatattaacatctggtggcttccatgctatctcatcaataggccttcagatgttaacagtggcatctggggctggattgccttgttggtgcgcatcactgaaattgtagattgctgatactggtttgcttcttgtcgagaatgacggtcctgtgatgaagctttttgctgattgttaccttggccatgattaagtgttgatctttgtttgtgcatcaaattaggggattgtgcaatttggtcttggccattaaaaaactgttggtgttgagcctggtgtggagaaaattgggtgcacaacatctcttggtgataagtttgcccagcattatgaacatttgaaactgcatgctgtgaattaggctgttgcagcatttttttgcagcaaattcctttggcacttctatagtttttaatgttcaatgcgtgtgctacaaggtaggatggatctatgtgtgaacccccatgaaggactttatttctaccattccagatactccacattacacgtattaatgcttcaacatcagatttatccatcggttgccaagtgaattagataattcccgtttaacataccatgagcgtggtgaaaattaattgtgaagttagtatttttccaaacacccttgacatgcttgcaagtaaacaaggcatgtccaattgactcccaagcatttttacaccttgaacataaagtcgaatctatgacttttctcttgtgtaaagcataggcaaccggtagggcatgataaaatgactttccaagaaaatattttcacttttggtggtagctgcaaggcccaaaagaatttccacgagctttcgtaatcttccgaagaggtttcttgatctttctcactgattgagtttgcaaggtgaaaaccagaatttaactgtgtataccccagttgtgttatgataccatataagccgatcctgtgattggtaaaagcttaagggaatggtgataattcgatcaatgtctatttgtgcaaagtcttcttcaagaagagccaaattccattccatagtatcgtgaatgtaagtagatacatgagttgatggagtgctagtatagcaaattggctttaattcgtcatgtcctggaatccaaggatccagcccactttgacttgaaagccattaccaatcttgtatctaagtcccttaagaagtagttcccttccctagtgtattccttgccatgttaaagaaggtgagtgtccaaggtgagcttctaaaaaagagtttcttgggaagtatctatgcttcaaaagtctacctaacagtgagttcggattctcaaacagcctccaggctagttttgcaagcatagcttgattgaaatcaacaaacgaacgaaagcccattgcaccttcaaactttgatttacacagcaatttccatcttttccaataaatcttggactcgtctttatttgtaccccaccaaaaattggccatcatagatttaatttgattgtagaaccccattgacaaacgaaaacaacttatagcttatgtagaaatagattggaccacagctttcaaaagaacttctttacctccaacagaaattttttttcattccaagcatgtaggagtttccaaattctttcctttaaatttccgaacaactctttcttattatgacttgaataggcagggagacccaggtatgtttcatgacactcacatattggcattcccaaagtttggctaaagaaattatttgcatcatctaaagtattaggagagaaagacatgattgattgtgagtattgagaaattgtcctgaagcttgatggtag

SEQ ID NO: 70837 - DNA, 1977 bp, Cannabis sativa
tcgtcatcatctccataaggggttcaaatcttaatatttaacagtaaaagatcatcttgtgctttagaaaaatttgaaagaaagatattaccattagaaaaatatcatattgtcaaaggctaagaatgattagttgtatctgaggttaaaatattttaaatttgtaactaattatagctgatctgtaatattatatcacttttaaattattctaaattattattgcatggagaaaaagttactaagaaatattagaaaaaatatatcctaatttgcatgcctcaagtgtgctcatgcaacaacaatatagagaacaaattttttaaaaataccataattaatttcatgtcttctagtacctgaacaaaataataaacttttgatgaaaaactatgaatctcgcacaactgagtctgccccactccttaaagcgaatgctacaatttctagcaatcataattatggttgtggtcatgattataatcaaagtaatagatgtggtcgtggttattgtgatagcgatacttgaaacaatgtttgacatcgtaatggttagaataaagaaattgatattccaatgaaaagcaaaactactgagaacaagggaaaatgtcatcaaaataatagtcgtaaaaattctaaaaacttatgtttcaaatgtggcatattggaaggacaccagtcatgtacctgtcgtacggcgaaataccttgttgatctttattaagcatcagtgaaagggaaagaaaaaatagaagcaaatttgtctatcaagatgatggtcttttcaaagaggccttaaatattattacatacttggacgttgcaaattattttaatgaagattccatcaatagcaagatgaagatcccatatgttacaagatgaagattgatatttaagacatatgtgtcgaaagtcttcttaacaaaattgatgtcaggtggcgagttttattgttgatgacagcaacacaaggtgattttattggaagggaggccatgatcagtatgtggcctttggtgtgaggggaggatattggggtatcagttcaagtcccaacccacatcaaaagattaggtcatattttttttttgagtataagtgttctatctatcctattagtatgagaccttttagaaatgtgttataaagataaaattgtgagggcttagtctaaaagtgaataatattatactaatataagagttaagatgaggtgacatgacacccataaaaggaaggggcctaacaaaatgtcacaaaagacaataataatagggtgatattataatatactaatgtaagagtgaaattgatgttcctcttttctttgctttttttgaaaaatgataaaataataccaacaataatagaagaacgataattataaaaaagcaattgtgtttgggtgacaagagaagagatgttggaatatagatatatgtacataaatattatatacttgctttcccttggtgcaggaggatatgatgagctatattatataatataatatatgtattacatacatatataattaatgtataatataacatcaaaggagctatagatatagtgattagcctttggaatgaactagacacaagataataatgatagatgatcacatcacataaacaatataaagaataaatgctgttacatatctcaacaaatcaattacaatcttaaaaagtacatatgcaggattttaaattaattttcaaagatatttttttatacaggtacaaatgaaaatataataatgatgtgatcatgtgatattaagaattattcaaaattaaattgggggacactataaaaaatcttacttttaattataacaaaatttatgattaaaattgaaaaaattgtaactaattataaatcatgatttctatgttgtgactaaaaggtccgtgactaaaaatattagtcacaaaagttatcatttgttgtgactaaatgtatttt

SEQ ID NO: 70838 - DNA, 1249 bp, Cannabis sativa
gagagagagagagagagatgactaaaagaataacctcatgtttattatgaaagagatacaatgatatatatatacaagttgttacacaaaaaaaaaaaaagacagctgtataaccaactaacaactaactaccaataattaacattgtcactaactttaatagacttaacaaactaatctcattcacgctcttcctaaacttggaatttgtgcatacatcaaaaccaaatttgtgacgaaacaaagcaaaataagaactggagatagccttggtaaattcagtatcaacctgatctgaagcaggagcaaatgattaaccaagtttgtgacaattgttgtaagaatatcttttcacgaacaaactatgaatccaacttgatatgctttgttctagcatgtagtattgggttagatgttaataaatagtactaaggttatcacaccatagaattggaggtttagccaatcgaattcacagttatgaaaacagagaatgaagccaggtaagttttgaaatagcttgggcaacactgcgatattcagctttagtattggactgtgagatcgtgcgttgtttctaatactaccaagcaattaagtttgaaccaaaaaatatggaataaccaaatgtagagtgtttgtcatcagggtcactggcccaatcagcatcactaaatgctatgacttcgaattcaaagagtggttgaattagcagtccatgtgatacagtgccactcaagtatctcaaaattcattaaacagtatgccaatgtgtggtcaacggattttccatgaactggcacactttattcacactgtaagaaatctcaggccgtgtaatcgtgagatattagagtgctccatcgatacaattgtggatcggcaactggatctccctcgtaagtagacagttttaatccaatagtcataggtgaagaaagaggtttagctccttccatttgagctttaatcagtaagtttctgatatatttgccttgagataaatgcaatcctattacagtagtttgaacttcaatatgaaggaaatagtttagttggccaagatgttttaatgagaatctagaatgcaagtcaccgatgagagtagatatgagtgttgaatgatggaaacactctggctgcttcatggactgatgactgaccctacaaaccaacacaagtgtttccagcatgctttgtcctcactcgcacgcttcctggaaaaactttccaggaggtcacccattct

SEQ ID NO: 70839 - DNA, 727 bp, Cannabis sativa
tcaagaaagtatgaatgaattcttcttcttttttttttttttttgaattgaatgaaatgaaatcttcattaggctaatgtcaaaaataattagacttaaatcaacttaggtaaatctggccaccaaaactctcgcatgattcatagtgagagtcatcttggcaagattatgagcaataaaattcgcagggcgattataaaatttaaacataaaataagtaaagttacgacaaatattatgaatatcttgtaataccatcccaaactccactaagcaaagatcactcttaccaagaagcaaaaccactctttgacaatcagtctcaacttcgacctcacagtagccaagacgaagacacaaattaagcccgtggaatatatatatgtagagagtttcagctaccgacggtgtgattgtcccgaaagctggagtaggtgctgaggcaaaacacatacccatgtgatcatggaggaccgccccatagcccaagtgtctagtctcacctctcaagccaacatcaacattgagcttgacatggccaatcgacgttagagtccaaagagaaaccatttggagggaaacagtggacagagacccgatcacagtccgagaggaagacttattcgcttcttgaaatttgtgagcaaaggaaagcccaaccaagtgttggaatatatcttaccaggatctagatttaataacaactatgtttattaacatcctaaat

SEQ ID NO: 70840 - DNA, 867 bp, Cannabis sativa
ttaattatataggtcaactttgttcgactatttgatgtacaatagtgtgtttgggagcgtgaaggaagatattaaatttttaatagtgcataaaatatttaagttagagtcagacataagtgtttgattattgctcaggtagttttttgttttggcaagtcttaatggtactattcgataagtattttattattgttccattagtgttttgtttttgaaagactattatttgacactacaaaatagagttcgatagttattcgatattatataattgttacaaagatagttattctataagtactcgatattaataataattaatgttcaatatttaaatcgagtatattgatatttttcgatagatattcgatacatactcgatgtgtagcaaaaaaaaattatccaaacacttttaaatatcttttaaaatattgcatcttccaaaataagttacattagaatgtaatctactaaataaaatagctatactttttggtagtgcatgcccattctattttctacatggtgcaatcaaccttacaatttttttggaaaataatataagtactctttattattgaagttagtgataaactttgatgttttcttcattcacttttgaaacaatactttctaaataaaataataataaacaaaaaatattgttacatgtatctatcatatcctaattaattagttggtattcaataataataataataattagttgctaaaaataaaaccatacctaattagttcttattttattttttctattattgaaaattttaaagtgtaaaagttacctaaaatattgaaaaaataaacaaaataaaattgagtggtatttgcccatggttttta

SEQ ID NO: 70841 - DNA, 1893 bp, Cannabis sativa
ttttttccttaatttatatggccccactagtttcttccattccaaaatttagtaaacaaatcaatgggaagcaatatcgtacaattgattcccgttcccttttagtaaacatgtcatcaattctaacttttttttttttaacaatgtggtggcaaagccaaaattaacaatcgcacataattttaataatttttattttacataaatatatatctttaattataataatttttttatattttttctctaaatatacatattaaataaaaataaattatattttaaataatatgataaaaaattaaaatataaaaatattaaaattaacccaaaataatatttaaaaaataaaaaaaaaatatattaaaagtatttcttaaaaattattttaaaatccaagttcaaaaaaaacatattttaaaatcttaaatagatatctttgacatgtactaaatcatgtctcctgaacttttttgaccgttaaaaattccccctgaactattaaaattgttaaatttaaggacttttatctaatttttgtaaaaaaattctaacatgaatgaaagtttagggagcatgatttagtacatattaaagtttaaggggaatgattcggtagatatgaaagtctgtgaagtatggtttagtacataaacgatcattgaaacaataaaattgaatgaaattagataaaagtccttaaatttaacaatctcaatagttcaaagagaatttttaacggcaaaaaaaattcaaaggtatagtttgatatatgtcaaagttcggggaaaaaattgctaattagctttatcaataattaaggaactaagctttattttttttttttagtattaataaagtgatataacataaaatataaaattgtgatgatagaattataaaaaaaggaaagaaaaaaaatgtaacattctagaatgatagtattttacaaaatatgtaaaaaaaaaaatgtagttatttgtgacaaataaaaaaaaagatcgaaataacataaaatatatgtatttataattaaacacaagataaagagaagaactcaatttatctaaacatgtattatttatctcctttaattagtataaggaaatgctagcaaacattataatgaacactgtcaaattatttaaactttgttactctttaatgctcctaccatctactgataaattatattacactatgactttaattatcagaataaaagatattatgagagaaaaagtaactaagaaaaaaaaaatcatgctaaatattattttgtgttcaaagagtatcatataaaggaagttcactaattttaatcttggggataaaaaaaacactttgttattatttgaaaaaaaaaaccatatatttaaaagattaaaattaattgtaatccatgataagctcttgaactccactatggtatttttttttaattttattttgctctagagatcacaattgataacatctactatagatataagagaaatcaaatatatatatatatataaatttatattatgaagatgatttcattactaataaattttgtacaatcacctcagtaattcttggtcttttttatagccacaaatatatttgcagattgtcctttccaccttggtattcaagttctgtgaataagttgcttccttgtactgactctgctgaatgtaacatttcttattctatgagaaattgttgctttgtgaagtgaaatttttgtaagatataaataagaactttttcaaaatagttatatatatacatatttaagtataatgatcatagtccatcaattaaattcactctaaaagacagaaattgaagaaaacacatactcatttcttcaaacgtacctttttaaatatgcaaactgtagat

SEQ ID NO: 70842 - DNA, 3107 bp, Cannabis sativa
ggaaacatctgctaaagttctgatggtgtaacctctactccttaaatcatgcattagagtcacaaattcttgtaattccatccatgggatccatggttgatgccaaaaattaattgaagccccagttgcagcaaccgatattgaacccttagagattgttgaccttgtatccaaaatacatttccaaagatacgaatcactagacttactcttcacctcccaaaaggattcaaatttgcagtatttctttaacagacaagtgacccacggcttgtcttcttttgttgccaaactccaagccaacttggttagcaatgctttattcatgtcttcacaccttcttaggcccaaaccaccaactgctttcggttgacaaatcttctcccaagcctttaaagcgagaaaccgatccttatccacccctccagaccaccagaacttcctcatcaatgcatcaaattcacggcaactagctaaaggaactttggatgtagacatagcataaacaggcatggcggatgttactgacttgatcaacattagccttccagcataagagataagtttcatcttccacccttctaatttcttcaacatgctttcctttaatctcaaataatcctcttttttccttctcttgaacacaaacggattgcctaaatgtctttcctctccccttacttgctcaatgttgagaataccaaggatattgttcttcctgccattgcttaaattctttgaaaaaagaacaccagattttggtttgctacacgattgccctgaccattcttcataaattgaaagacaaatccatcaatttctttgcttcggagggatttgcacgagagaagagaattgtatcatctgcaaacatgagatgagagaccggagctgcagattgtgcaatcttgatgccgtgaacggaaccttgaacctcagccttagatataagtttcgaaaggacctcttggcaaagaagaaacagaaaaggagagagaggatctccttgacgaagacctctctgaggatacaatttcttaagaggacaaccattgagaagcaccgcataagagacgcttgtaacacaggccatcaagagcttgcaacttctgtcattaaaaccattcgccacaagaactttctccaagaaagtccattccatcttatcataggctttatgcatatcaagctttagagccataagccccccgttgcctctcttatgctgaatcttgtgaatgatctcctgagtgagaattgaagactctgctatccatctaccagggatgaaggctgattgaagaggggatattaagtcattcataaaaggtctgagtctatttgataggatctttgcaatgactttataagagaagttgcataagctgatcgggcggaattgatccactctaaggggaaaatccactttcggtataaggcataaatgtgttattaagaagaggatccattacacctgtctggaagaattccttgactgtagcacacaaacttgttcccacaacatcccaatactttcggaagaaacaccccgagaaaccatccggccccagggcctttaaaggatgtaagcagaagacagcttccttgatttcctcgtctgtaggagttttggagataagctcatttgactgatcatcaatccagttaacaaacaagctttccagagattcatcaatactaggtcgagaggaagaaaatagttcctggaagtaactattgatgataccaccaatgtgtttcctccccctccatatccttccttctttgtctttaatcgcccaaatgctattccgtcttttccttataacagtcgttgcatggaaaaatcttgtgtttctatcccccaatgaaagccataattctcttgatctttgtctccacatacactcaagctttgaccaagcaatttgaatttgcaaaagaacactggcttcttcagcttttaaggtttcggagataggttgacgttgaatccactacagtcttttttccaacttctgaatgtcgtattcattagtgatttggccagtctccttccacctttaaagagccttctttgaactgtttatattgcgaatgaaagaggccgtggcattactatcagaataaacccaggctttaataatctcccttttacaagactcctcccaagaccaagcttagaagaatcgaaatggaatataacctctcactgcaaacagatgagaatcaaaaatgataggagcatgatctgagatggatataggcagattgcgagtgccagcattctcgtaagacaaaatccagtcagaagagaaaactgctctatctaatctttccctaatgagacctccattgaatcttttgttttgccaagtatatttatttccaagaaaacgcagatcgaccccaccagtattgagcataaaattattcagccatttagtttcagcaggagtcactaaaacggcccccagacttttcttcttgaccacgaatacaattcaagtcacccaaaagaactcacggcagagtacattgagaacattcctcttccaaagacttccaaaagacctccttaacactggaataaggagtgccatataccgcaaacaatttccaatgagattgagtttgatagtcccagatagtagcatcatagaaaccatcagcaaagtaattaatcaccaaatcaatattgatattccacattaaacaagagccccctgccagaccagatgcatctacacaaacaactttcgaaaagcctaaaattcgagctagagactccatcttactgctgttaacttttgtttccatcaaaaaaatacaatccaccttgtatattttcacccaagccgcaagagctcggggtgtcgggtctcttgcgaggccccgacaattccatgaaaggcacttcatggggcgggtgggggcttgataagggccgcctcctcgcccaatagaaaattttgagatctctcaacatgcacttccaccaaattcagagagttgattagattcctgtaagtctctccttcttcaccagaggaccctatcggtttcttgcctttgttggatgttgataacttggatctcgatccttt

SEQ ID NO: 70843 - DNA, 1425 bp, Cannabis sativa
atcctggtaaaataattcaaacagctcttccatcgtgtggtgcttaattgatgtaggcgatcacgtttggacatggtcatgtgtcttccaaacatttctcctttaaaagcaatatcccagataagccgttggacaataagcactacagaggcatgtacgcacacaactatggcctgatgcaggggacaagatctgactcggtgtcaaacgatgcataaccatcgagtgtgtctctgagttaggttgtagggggcttcctggaagcataactcgagacatcctggaacaaccaactcctaaaagctccctgaagacctaagcttcacgtacgcctccgaataccgaaagtgttaggttacaactttgaggattgatatctccttcacaatggatgcaactttctgaatactttgataccttccctgatcctatctcagaagaaaagggaatctgggatgttcccataggatctgacgtggcaccctcttctacttccgtgtagaacctatctaggaacaggaataacatttacccccaagctctcaagatttggaagtactgagagcttgcaaccttcccccggaggttcgtttcacatctttaactcacggattggccatcacgagactgaagggatgcattctgtaatggtcactcttggagacattttttgaggactcatcgaggtataacgtttgtttggcagagtcatgcggctcacgctcttcactttaagcacatttattgggaggacgaatgacgactggttttgaaaaggcacctgtccttaggtgcattgggatgctgctgtgaaatgaaaaataataaatactttattccttttttttagatatattaaatatcaaccttttgtgtcccaaaccgttggatgatctagatttcaatccatttgatcaggaccgtgcatttcaaaatccttccaaccgttgccacccatataaatggggcttttggcgattgagatcattgtcttcatttcaaacattttcaaaccaaagagaactctttcctttctcacacaaacttcttactcagaaaccctcaatcttctcatacttccttcccttaaaattgaccttctttctccccatcctcgctactgtatcccatagacacccactgttacttcgggctatcctgtaattggagctaggaggaccgttgctgccatgaattagtggaatttaagcgcgtcaccaccacccctaacttttttctagcagtgattgttcctcctcttccaaactttgatttcaatgttgattgaaatgtagttctcataataggaggatttgatcactcttgcatgcgtagaacataattttagggattaggatttgtgacgtttggaatttatgtgccaggttcgtaggtgaatatttctaatttttagagttttcaaag

SEQ ID NO: 70844 - DNA, 1771 bp, Cannabis sativa
tggtgagaaaagtcttaagaagcccatcttcttctccgagaaaatgggtcgtgaggaggacgaagctgcggttcacaatcatcaaaatgccattgaggttcgaaacgacaacgtttacgacgatgatgacgatccaaaccagaagaacaaaggaaacgacgccgttccggcggcggcgttatctgtggaacagatcttcgctagtcaggaggttccttcatggcaggatcagctgactgtgagggctttcgtggtgagttttgtgctcagcattctcttcactttcattgtcatgaagctcaatctcaccacggggattattccttcgctcaatgtttccgctggtcttttgggattcttcttcgtcaaaacttggaccaaaatcgcttctaaatctggtctattgaagcaaccctttactagacaagagaacactgttattcagacctgtgttgttgcttcctctggcatcgcctttagcggtatttcttctctctaatcttttgttcatcgtttatttattgctctgtattatttcaatttttgaaatcgaaatcgtattattgaatattgatgatgttattatcattccttttgtgatttttttattggttttcaatcttgattttggatttcagaaaccaattttgtatgtttttgttttccttaatttccattcttctaattatatttttaacatagatttaataatggaaaaacttctattaatttatttatttatgtatttgaacatttacacgatttcatattctcttgtttggatttaaaaatgtgtggaaatgaagtattgagaagagaaaaatgtaaaaaaaaaaaggttgatttcagggaaatgtattattattaatattttttttccttgtatttttctcactacactcatcgaattccaaactagccaagaaataagattaatgtaatttttttatttatttattttttaaataaaacttaaataaaacagattactgttagattactgtttttaatcttggtttagtcaaacatgtttgtttgtttgtgtctgtttgaatttttttttttggaaatgtagtaccaaacaataaaatttgtgaagaaaaattggccaagtagaggagtggtggtgggtattcattaataatacattggtagtacttatccacatctcctttcttcccccttaaatcatattttttgtcttttttggactaaagaaggaaacccagatcttgtttttaagtgtgttataaaaaaaccaaatttattgtataaaataataagttttagatgtggatatataagagctgctagttctttggatgaagcgtgtgagttggctcatgatttgtttccacagtcaactccactactatgtcaccattattaccattcccactcaataattaattttaaaatgaaaattttaagatccacaatcttttgttttatgttctttaaagtatgatggaataaagtagattctgatgaagacctccaccatcccctatagtcataatttgaggtaccaagccaaacagccgccttttgtctttctttgcctatctttgtaagaattacacattacatgtttaaatgaaaaaatatacgaaggaacagagttaagtatctagaagacttgattcttatgtataataaataataaataaaaatcattgctttgaatttggtatctattgagacctaatgatttttttctttttttgaatgattttgttaatgaaattcttatattgtgacatgggattaa

SEQ ID NO: 70845 - DNA, 1036 bp, Cannabis sativa
ttttttttaaaaaaaaagaacaatcatattcatttcaacatcttcttgcaaaggtattaagttaacaatttaaggaatttccttcaaataattagcagtggaagagaaacatcttaagattttgacttggaatgctaacaaattgtcacatgactttggttcaatcataagccgttttattatgttttggtaaccaaaataactttattttctcccaagttattataacatggtccttaacaaccaataataaatagtgttataaatgaggacactgtgaccaaatagtcccaaataagggagttattccaagttccaacacataaggaaccaaactttgttgtgcagagagaccctgaatatgtttatgtacagtaacaattacaattttcattagatattttattgatcttcaggtataatataatgtaactacttgaactttgtattttttttttttttttgtcaaaatatagattcatatatattttcaacattacttatttgatatctagataagattttacttaaatttttttattttttattttattaaagcgtttatatatatattacatagcataacttgagattcgatcctaagactccttcacacacactctcacatactcttatggtcagttcagctagctttaagtagttaagacttaatatgactaaactatgctaatttactttgagttttaaatttaaatttaattatgtgaaaacaaattggtcatataaaaaaaattatttaccaatttaggtccaagaatatactaaataagtataattcaaattatggtactaaataaacattatgaaaaatataaagtactaatagtttgtatttcaataaataaagtattatttatttattactttctactaattactttgtatatttaatgagaaatatactaacttatagacgaggacatttatatttaacaagttgggtttcttaaaactctagttaaaatagagtataaaagtttgaatatcaaatatgtaccattcacttttaaacata

SEQ ID NO: 70846 - DNA, 1860 bp, Cannabis sativa
gcacttcatcataatgattgaagtttgatggatacatagacgagtttcttatataaaatatatatacctatattttatatattaacagttgggagggtgaggaagtttgcatttctgagggagctgcatcgcaagaacgggatcgatgccgagggaaggcagaatctgggagttcttgtaggagcataggcacttgaagtcagcatgcgtcagcgccgagcaacaagcggacgtaggcgatttcgggtttggtttagtcaccgccggcttgcactccatcagaccattcatcgacacattgcatatggtttgggcactactcaactcaaagttaataatgctagccactagcaatgctactattacaaactttgcaatgcccatcttcatttaagcaatcttcgtgctcactcctatacttattggttgctgagatttgagatttatactaagaatgacacgatatatatacacatggatatgagagagagggtagatgtgtgtgggtgtgaattaggtaggtgcagcccgtgaagacatgatgtgttggcgtgtatgtagatccgtgggcggtagtactgtgatctcacgggccaaacatttatcagagtgagcatggcactttctttacttaatttgtcttaacgttgttggttcatcctctttattatctttgatatataatatcgcttttttttttaatttcttatcttatcttgtattataatataatctttatcacccctgcttattttacttttacagcctttgctttagctgttttataaaggacattattgtattttgccaacacaatcattttcttgccattcttatctcatgtttaacatctatattgtaaacccaactaatgtacaccatcactgtaaatatacgcacctacgactatcaagttaatatttggtatgggaaagagttttacagaccatttgtttggctgtgttttcaattttcagtttttgaaattgtgtttttaaaagtgagaataaaaaacagttttttgtcattttaaaaatttaattgtgtttggcacaaatttttaaaaactgtttttagatttttttcttataaaaaaaaaaatcaatattttagcaccataccataacattaactcatccgggtctaggttcgggtatggtttcgggtctaggattcgagtttgtgagcaaaatataaaatataatatgttagacaaaaaaattgtttttaaaaattgaaaacaacattttgatagttaaagcttaaatgttttttgttttgcctataattcatttcaactcaaggtcagtcctgcgtggatgtaagtactataattgcctaagcacataaactctggctctatcatttcacttaaataacatttgtttgctttgttattcattcttctaaacagttgattctattatgtgtgttcttggtgtttatcaccacagcatgttaagtacaatttcaattctaccaaaccaaacagcaacaacatcggacaagttagctttccttggagacttgtgagtgttttctattttatctactaaacaagcaatttatggatagtagcaatatatttagatgagcattgttattgggcaccatggtgcctagcacctctagacatgacgccttacgattgcctagcgatactccctaaaagttattctattaaattatgtgggacccgatacttaattagaccaatagcgatattaacacatagaatggtgctagacaccactagtgccttttagcatttctctttttagatagatgccatgcaattttctctttttgtttttttttcgaaagggagtttccatgcaatttatagctaaagaaaaaaga

SEQ ID NO: 70847 - DNA, 1705 bp, Cannabis sativa
tatttataagataaatatggactcatcatgaatcttgtaaaatcatcaagaaaactgatataatatttgaaaccatcagcagaagcatagaaagaaggaccccaaacatcagtgagaattaagtcaaaaggctggacagtttgattggaagtgcttttaaaactgaactggtgtaatttcccagtttgacaagcattacagaaatcaagtgttttgcactttacattgggaacaatgtgatgtaaaactttgctaagtataggatgagagggatggccgagtctagagtgccaaatgttggcaagttgagacttgtcagcaactggattggaagtagtggtgtgattgagagcttttggcttgggaggatctaatgcttgaacttcaagcttgtacaatccctcactgagatggccctgcagaagagttttcttggttgtcttgtcctttatgagacaagacaattcatcaaattcaagaatgacatgattatgtttggtgaattggaaaatgctaagtagatttttggtgacactaggcacatgaagaatatcttgcaaaactaaaggatgattaggaaattttgtacacactgaactagaaccaatttgatggatagggatagaggagccattacctacaatcactttagacttgcctttgtaatctgtagcattggtgagatgatcagcatcatttgtcatgtgatgtgtggcacccgaaaccaagtaccaagttgttgagttgtcattgttgttattggattcaaagacaagggcttgggggttctcagtgttgggagggtgtgaggaggaactatttttggcacctgtgtatgtaatgtcaaaacggtggtaacacttgattgcaatatgaccagcacgcccacagagttggcaaacaggtctggtgccacggccacctatgttactggtgttgaaccgacctcctcgatttgcacctctgaagccacgattgggatatgaacctctggtactggccagatttgcttgaacattatgcaaagaatctgtggtatgctgctaaattcgcatttcttgactttgaagcatgaattgcacttcctgaagagacagaggttcgattcttgaagttaagttgacaactacagcttcatattcggatcctaatccaccaagaatgtataacactagatcatcatcagaaattggttgtcctgctgctgcaagttgatctgcaactgcttcattttcagaatgaattctttaatggagagagagcctttcttggttgtttgtagcagatttcgtaattgcagtaatctggcgcgagatctagttgcaaaaagctgagcgaaggtggtccagatctcatgggatgtgttgcagttgattacatgaccaagcatatgttcagtgacagaattcatgagccaatgcattaagaaatggtcaaaacgcatccaattttgaaaagcaagattgagattgttacctgcaagaaattctggtggttgagggagatgaccaagaacatagccatcaagatcataggctctaaccgcagcaagaaccagagatcgccaaattgtgtaattcgatctatcaggtcgaatggtcagggggaggagatgattgttggggaggggaaattgattttgattttgagcttcagggacaggatctgcagctcgagcttattgtggctcaaatctttcacctgt

SEQ ID NO: 70848 - DNA, 1183 bp, Cannabis sativa
gattagaaattagaagtgctttactcagggtcagcccaaggtggtgcaatcgagacttaggccccaggagccagaattttgaggggtacaaaatcaaaaaaataacacatattatacatataataataacagtagtattaaagtcaagttaacaactctccagactcgtctctctcgacatgcatagtatgaacaggggttcttcctccttcccagtgtgttcacacctgatctctgcgcatttccacaaggtgaaactcatgcctagctccagatcgctcgatcatggtggctctgattcttcatctactgagacacaaaacagctcgacccatccaagccacgcgagccgtccccctcagaagatacccaaccactccagtcgcatcatcatttactccggcctcctcccaaatccgtcgagccatacagagttaaatgagactcttacaggtattgatttccccttacaactttccctattcactgtcaaatcgtttcagagaaaatggttttttattgaacaatttagatatatttttggtttgcccattaaatttcatcctaaaaattgtaccttcaaagggattttgggtaatgggaaccctctcaaatccgtcgacagaagggatttaattccttttgccattttgagtttgagtccctcgtttattctggcctgcaaatgtgttctgtctattgcaattttcaaatcctctgtgcagaaactctacaccatattaaatgctatagaagtgactgttactgatttgctttgtcccagttctgtgagagtttatctatttaaagtcatgtttaggagaagcctctctttctggttcttgtatgttattagttgtttataccattctcctgtcctcatcccttccagtttaactctccatttcttgatctcccaccgatcgtctttactgtggtatgtcttagtgtctacccatattattttcccatcttgttctgtcagtttagttgtgtttttctctacctataatacacatctcttcagtaagtgctatacatttgtcagtatacattctatagactgtgataatcctcaaagcttgtcctggcctcgtctcgtgtttatattcttagtcgttgttatcccagccagcccccttataatcattctttttaattacccgtgcaccccttcggtcaa

SEQ ID NO: 70849 - DNA, 1053 bp, Cannabis sativa
tttttaatgcattatctttctctcattctcctccttcagttcatatctccatcgatggttgaagttaagaccattgtcgatcgtcttcaacattcgaaccgaaccattctgctatgtatattaaatttatattattttttaaaaataaatcttataaatgtactaattttcttagtgtattttatttaatgttatatatatttgcttgatttataaatataattttttttatatataaaatatttgtggacaaaattttaattatattaatttataaataatataatataaattaaatttttataatataaatattacattatatattataattcttttggtttaagcttattagcgacggatcctattgctaatgtgtatcacattttaatctaatgctatttgtagtgacaagttctgtcgctattaatatgctgctacttatttcaatagaggcgggtgtgtcaatccgctagtattaattaaaaataatgatcaattagtaccaacgggtcaataacagcgaaatcccatcaatactagctttagcggccaatttcgacctttttagtggcagaatagtccaccggtatttatggtaattcttggagtgggttatatttatttatagtattataatattaatactttatatttatatttatatatattattatttcatacatgttataacattttttcaaaattattctggttgtttgttttttttttttagaaaattacccattacacgacaagttttaatttttttttttctatttttacgttttttttcttaaggtttctacttttatgtaatttattttataaaaatattaactcaccaacatttttaaaagaataatttacggcataacctccataagtttttagtttattgcaactaacccccaattttaaaattttgatggtaaatcccctaaatccatgttttgttagtacttagccctttccatctatttttaggtgttaagtgccatgttggactattcatgtgtacacatagaataattttattggtccacgtaaata

SEQ ID NO: 70850 - DNA, 859 bp, Cannabis sativa
attctcctaattaataataattttccacatatctctatttttctcttcatcattcctttgctttaattcattagtttatttttttaacccaccaacttcatatctggaccctatatagctaattaactcctttaatttgccatgtttttccacacactacagtactactttgacctgtacacacgcatatacgtatatagtagaatatatttctgatcacgatgaccatgacaaacttttatcatggtgatgattgggtgtacgtgtatgtatatatatagtggtctatatatgaatgaaaatgttttatgattacacgttgggtgcgttatcaagataagaaactgtggggataacctatgccgtcatttatgttcttgcgagtgaccctttcccagttatataatgctttaaattctgcaatatctgcttgtctggacagcacatgcatgcacacatacatacatttttattaatgaaattaatgtccccactatatatgaatcattagacatagtattaattatatctttctcaaaagtaattatatatgacaaaagaaaaacgcatgtacgtatactatttgagtatggttattagacactaataatattcagtttttataagtgatacttgatattttgtaaacattattttttttaatttacgtaagacttaatatttaattaatattaataacaaatactgcagaatgtgctagacacaaataatattttttatcaattatataccttaattaatcttatcatgattagagtcacgtaatatatatattctactaatatagttatacatacgtgactgaaaacactcgaaactattatttatttttcttcac

SEQ ID NO: 70851 - DNA, 1346 bp, Cannabis sativa
accccaaacctgggactcaggaccatgaacacaaaactggaaccttgaccctaaaccaaggatctgggaccgggacccaagatcgtgactcggacccgaacctagattgaactccgaacccaaactcgagacacagacccgatctggacctgagattgggactcagactcaaacttagacgcgagaccaagactctgacacggactcgggaccatgacttggactcggacccaagacccgacctggaccaacacttaggacccaaaccgaacccggacccaggacctagacctagatcgaaccccggacccaaatcgaatcgagacccagacccggacaccagaaccagaccagactcaaactcggacccaacccagagtcagtgttggagtcgagtttattgaaaatatattataattttacacaacctattaatacaagctaataccaaacatactattgtattacataatactaatacaatacaatctaacacaatacaatacaaaataatatgacgtaccaaatgagttgttaacaccgatcttcgttaactaataaatatacttcagaatatcaataataataagaatagtaataatactaaacaagaaggcgtacgtttacgtggttttgaagttagtctatgagtacatcttattcttgggatttcatgggtttgtagagtattactaatacaatatttttttatcttcttaggattctcaatttggctgccccttaatttgggaattttttttcctatttataagtgtttggggtggtagttatttcccttggtcttatcttcataacagttcatgaaatgtggacaattcttacgttttatatttacgatacatggataaaaagaaataactgtttttgtttttatccacagtggttgtgttgattgagtttagttgtgatgtggtattgcaacctgctctatgcctcgcaatatacaccagtaactgttttttgtacttatcttgaatgcagtttctttgtcgagatatcatatccaaaatacgcctcacattcttctgtaatgttgggaatgactagacgtgttttgtgagatgctaataagagtatctatctcgcttttgctgtttgaaacaagtctttagatagtatttgtgattgagtcatttgtgcttcttaaagtcaattatcttgcgtcgtttatgaatatttcgagatgaatatccttttgctcacatcccttagtctttcaatatactcacgagtatgtgagtcaatgagttgcagactcttaaacaattcattatctactctttccagcgacttgtctcttcatattctatacttgttttgtttat

SEQ ID NO: 70852 - DNA, 1532 bp, Cannabis sativa
atcaacccaacccatttaattatatctaattaggattttcagccgatttagctttcacatatactaaattatgtttcttgaacttttaagatcgttaaaaatacccatgaattattgagatcgttgaatttaaggatttttttatctaattttagtaaaaaaagtctaatatagatgaaagttcagagggcatgatttaatacatgtcaaaattcgtaaaggatgatttggtagatattaaagtctgaggaggatgatttagtacataaataatcactgaaacagtaaaattgaacaaaattagacaaaatgacttgaaatgttcaagaaaaatgatttgaatttgatacatgtcaaaattcgaaatactatctagcctttaatcatatgagactcaatatttatacagttaactttagcatttctgattatctaactcttaagaataatttattattaattatgtgtaagtttaacaataattaattataattagataatgacaatgcacaagagatggcatgtatacaaaggagaaagctcagatgcaaaagacttacttttcacagccaaaaagtcttcaatcattcaattcaatacagatttagaagtgttcttaggtggaaatacaaagcaagaaattcctgattttaaggtcaaagggagttggtttcaaagatcatgcaagataactcttggagatgaatctgctgttattgcacaagtaagatccttaattaatgatcaatatagatttttccacatatatatatatatatatattaatgaaaaaaatcatcaatatattaaaatcattttgcaaaactattattgattttaatttttctgaaaatggtttgcaaaaacatctatagaatattaatgaaaattataaaataattgtaattaattaattaattaattaataattatgaatgcagatgcatgaaaaagatagtgcagcaagtttatttcttggaaaagaagcatttagagtgactgtgttccctaatgtggattatgcctttgttgttgcattgattgtgattctccgtgagattaatgccgatcgaactggaaccgactgacataactcactctaattaattactctttcttctatttatatataattaagattagtatgaatgatgatgataataatgatgttgtgctgtgttaattaatttgtattatatttctagtcgatttccatgtaataatatcaataacattgaagctccttcctatcctacattcctatgtatggggtttcatataataaattaagaagttgattgtactagttattatatatatatatatatatatatatatccctatatatagttggttttggttataatatcatattatgccttcaagttaatgaaatttgagtaaaaaattaaggagaattagctcatatattattttttttaattttttttttttaaaaatttacggtttaggtttctaaagtggttgcagcgctagttgcagtaggattttctgtacgattttttgttgca

SEQ ID NO: 70853 - DNA, 1490 bp, Cannabis sativa
gttgttaaatcaacatacttgtaagtagatctaagatcctggtaaaattaattccaacactatgaacctcggtgacaaaccaattcaaccagttttcccaatcatgaatattgaggtcaccggttcaaacctgccagctgcacccgaaccagactacacgagcataggggcagtcccaaaatagatgaaaagagagttcaaccgtcgaaccacacaatggacagcttgtatctgggagcgagagcataggccctagttttcctctagtcagtaggatgtcagagagaattttccaccagaacattttgagtctattgtgtatcttagcaccccaaatggctttccatttcctagaaccatcatcggtcgagttgaagttcttgatcgttctgtaggccgacttaatggagaaattgccatttgattcaggcatccagagccaagagtcttgaacaggcctactcgaaagagtaatgttgataattctccttgcatcgtcttcatggaaccacctattgataaggttctcatcccaagcattattgttgataaagttgctaaccaaactcactccacctgcatcctccaccccaggagtgggaagggggttcgtccctggcacccacggatcaaaccaaatggacgtagcattcccgttcccaatcctacggcaaaggcccttcgagagatgaactcgagctttaaggatagctttccataatagagagtccgacgattttgtctcgatatctaaaaattgatcattggagaagtactttgcctccattgttttgtaccagaggcattcatcgctagttaagagcttccaagcccacttcatgagaaaagccttattggtagcctctgtagttcgaaatcctagaccacctgagacttttggcttgcagagcgtttcccaagcaaccgtgtgcatccttcgttttagctccgaatctccccaccagaagtctctcaaaattcggtcaattttattggaaatcgtggttgggattacatcagaggcagccacatagtttgagattgtcgatcccacagacttgataaggcaggctttaccggcactggacaggagtttggatttccaaccttgcacccttctagaaacgcggtcaaccaaatactgagtatcattagtgcgcttcagcgatctaaacaggcggaggccaaggtaggtggcctgtctagacattcttttcatccccaaacattgagtaatggcttgtgcgtctctgctagtgactcctttggagaagtagattgaagatttctggatgttgacagattgtcccgagcataggcagtaggtgtttagacattctaggaactctttggcctcacgaagggaggcttgaccaaacagaactagatcatcaacgaacataaggtgacttaaagatatccctcttcgacccatcttgaaccccttgattaacctcagctgttctttgagaaggatgaggcgagagagg

SEQ ID NO: 70854 - DNA, 1972 bp, Cannabis sativa
aaaaaaaaaaaaaaatattattaaaagccttacctattacgtattcaaagcaaaaaaaaaaaattacctttttatacatattaatgacttgctaattaaatgtagtctttacaaaaatatatattaagataaaatatcaaacacaaagaagacaaaacataatatttatactgattcggatcaaaataactttctatttcctagagctctcacaggaaaacttttccattacctaaaagaataagcacaggtggaataccacaatactagctagagatatcacttagtaatttagatatatgtattggtaactaacaagtaacacagttaattacaaaaaaaccccaaaactatcattaattattatgaattgggttaatgaggtgaaaatattgaaaatgggtgagctgaacaacttatacagaagttggaaaaagttgatgtgaagaggtgtaccacaaaagtaacactaaaatgcaaaaactggaccatgaattgatagaaagggaaataaggcaaaatttcccaaaattaagtttacccaatactggattttgttctagacagggcacagtatctccaaacaaacgctattctcctcttttgtttggacaatttgtccacacctctttgcctttcgaatatctttttttaggtgttttcttttatataaactgggaccagaccattatttcactaccctagctactacccccgtacgccattctcctatcattttttaaccgctaggatgatgatctcatatcatagtgactgcatggtaaatccgattatcatgatcccatcccaatacatatatatgtgaaccgcttctatatttcgtatcaaacatgtacgtttttcgactcgtgtttaattttctcaatccttacccgactcgtaaaaaatcgtatcgtgtttgtgttgattcataatgatctgttttgctattattgaagctaaaattataaaaattatagagaaaaatgataaatttaacttccatatataaaaaaaagttatatacacttatttatgtatatataattttttatttatataataaaaattaaaaattttaaaatattttcaatttcatgttagaaaattaaatttaattttttttttaaattgaatcacaaaatatatatttttatataattatataattattaaaaaaaattattttatttatttaaaaaaaccgtgtcaaacatgtcaaatttgtgttaagcggattgtatcgtgtttgatctgtttttatttcgtgtcaagtcgtgccgatctattttcgactcgcgtctaattttccctaccctattgtaactcataaaatttatgtcatgttcgtgttcgtgagccgtgtcgaaatccgttttgcgattctattattactagacatcttaaaaagtactcaacaacataccaatgtagcgcgttgtgagtggtttttagttttttatattataaaatttgtaagatctcatatagaatcagaccaataacaatttgatatctcttgtagtataaccgataattttacacagtcacctcaatgcttaatattattatttcaaaattttatattgtttgaagtgtctaataacaatacttgtatatagaagcccgagaatatgacccaacttcggccaattgctctgtgtaatgtgtcctataaaatcataactaaggttgtggttaatcgcatgaagcctttcatggacagagtggtgtcggagaatcaaagcgccttcataccaggtagactcatttcagataatgtgcttatttcttttgaagtcttacattatttgaagagaaagcggaaagggaaagatggtttcatggcgttaaagcttgacatgagcaaagcctacgacagaatagaatggaatttccttgaagccatgctccgtaagctaggctttgaaaactggtggactaggcgtctagtgaaatgtgtttcttcagc

SEQ ID NO: 70855 - DNA, 2050 bp, Cannabis sativa
tgccaagatacaagtcggtattatctaatatgttatatgcttttcttattgagtctgtcaactcacagttctactttcacgtgtaggtaaaagaaaggtgaaggctgaacagcagtgagcttgagctaggatgggattgtacatgtcatggcagcgcgacctgcagtgttcggtctcgggacatctagggttatcattttgtagtcgatgtgcaacctgaataatgtaatttggaatattttgtaaagaagttcagaaacgggatctcgacttttataaataattatgtaaagtttataaagtttcatagttaatattaaaagttttaatttgacacgattttcaagaaaattctttaattagcaaagattgcactataattgtaaaatcactgtaacatgccttagcattagggcgttacagtgtaagtcactgcggccaaatcctaaaggccaccaaaagagagcctctttggctcaccgtcatcaagctcctaaagctcatcatccacagaggaaaggatctgtccaggtgcttgcgagctacctccatggctgaacccgctcctcgactaggcctctaggcgctcctgcccgaatgccattccctcctcactagagggtcatccatcatgggatgcctagctagtgcaggccctgaaggaggaagaggaagagatgaccacgcggcatctctcacatgagtgtccagaccaccttggccctcggacgacctaaaggctcctctgaaggtccaccagctagacctctcaacctggaagacatatctacaagaggaaggtaacaaagtcagaatacaagttacaaatatttaatgtaagataagaatataaaatatggtataatcaactatcaaataccaccatccttagaagaggaatcatctaaatccttaatggtcacctttcccttgcctttagatgtaggcaaggggtgagtaagctttgcagagctctagcctccaggcctaatatgaagagtagtgtccccaactgtacccccgcgagccaagcgctggtggagggccctctctctcttctctagacttggcctatccgggacagaggcacatcttcatccatgtcaggagcatgtccactaccaggacagacttcctcagcagctagggctccatccacaccaactgatgggccctcggtccctacaactttagaagcaggaggatacaacttgtacttctaaaagttagctacattggccaacctgattatgttcctcttctccatggggagggataagatgtgattcgccctatccctcatctacaaagtagggatggagcgcttgtatgacgacactcactggaagcagtaatgtcaaatctcatggatatcccatgtaatgaagtagttatgggcatatccaccaacttttgacatatgcatgctattagtgtcacccaacaactgatggccaacttgactgaagtagaaatacccagtctagttctgctttggagtagatttcagttcaaagtaatattcaatctcatatgaagtatcctgaggccatcctagatccacatataaaataaacatcgctgagaggtattttatactttttggggtgatttatgttgaacacatcttaaagtaagcaacaatatctcagaagtataagtgtaacgacaacaccaccccaactgaatatggtgctccgaccatgacatccaaccgagggtgagctggtgtgctctttgatcccttgtgggtatctcacactggacacctctaactagtccactgaccaatatcctgtcaaaagtctcggcaggaaaaacaaatgcgggagagacccacctgtctccttgtgatccagcatcaagaacctgaggctctaaaaattgaatcaagacatggttcagacccatcactaaaggctgacctaacctgttcaatggctgcccataaaatgtcatatgtgcccagagggcaattgggaatgacaacacaaattctgtaagtcctcctcctaacaagcgtagcctcctccatcttagactcggtgtc

SEQ ID NO: 70856 - DNA, 1539 bp, Cannabis sativa
aagatgaaaaaaattgaattacatgtgtaaggctcaaagggtttttggtgaatagcacgtggaatacatttgagagacaagttgtaaaggtgtttaaagaagactagtggtttagataagccaaaggcatctaagcttggaggaacacaatcctattcatgcaaaaaaaaatttaatatcatatataaatataacttttctctctttcttttagaaacatttttaatgcctttatccaatccacaattgacaacattatgctcaagctcactaaaacttgatcatgatcacctattttttcaactcatttcaataaaactcttaaaataatagaagtggaagcacatgaaaaaacttttctcatgtttgatgcccaataattcatttactagtttagactagagcatctataatatgtacttagaatggttcaaatattgatcaatattttatcccaaatttattattattatataaataaatataatatatataaatgtatatgacccaaaactccatcctcctttccttactcttctcttccaataagcatagtacttataggacccataattgttttaatccaaaaaaaaaaaatccaacgaaagagggacaaactatccttgtcagcaaaaattatagtaatctaacacacattgttctgtcctcatatcattggtccgtgagtttcacgcgttgatagtttatgatgaaaatgatagagcaatagaagagaaggagattccataacacattatgttttaattaaggattaaaaatgttaattaccgcacttaagttgcatgctaatctatgctttcatttcattaattttttccaagatacttaaatgcaaagacaaaaaaaaaatacaactttaattagctttttaaagggatcaagaaggttccattttttctatgctaacctctaataaacatatgacatctctctaatgacacaacaaatatcaaagcttttttttttcaagtactaaaacataaagattttattatacaaaatgtagagtatagactaatcattatcattgattgaggccactatatatatctcaaaggaaaaaagaaaagggttttgaggccataataatgtgccatttggttccaaataaagttacatattcttgaagttgattttaaaatgaagagaagggatgtgataataatcacttaatcatgttttagtgtccaactggattaagcttcttggtgcacttggaatacatgatttaagctttgagaacatctttgtcttgagttttataagtggcaaacctatttcactatactattaattaaatatttcttctttgctttaaaaaatattggagtaaataggagtgtgagtaagttttgatgttttttcttcattatttttctaagatggggtatttgataattgcgtattgtgattcaactctcaattataggactctaaaaggtatactttttgaaagtggggtaaagaaagggtttgaagacagatagatagagttatagggagagagagagagagaga

SEQ ID NO: 70857 - DNA, 1702 bp, Cannabis sativa
gtagatctaagatccttgtaaaattaatttcaataaaaacttctggtgtggtaggtagaaaaaataaaaagtgtggaatggctgttgaaggtatttattgggtaccaagaagaggcaccttccatgagaagcaaatggtgtgactcgcttgcccaagagaaatctgacagttggataagtgggaagccaagagggtatatttcctcccaacagttagttttcatcaccgcatgcatcgagaaaagtgttcagcaaatgaaaagtctgcacaaatccaatctccactatgtttgggcatcccacagaacacgcgctcatgacgcgcagaaaacccaaaagttagcatttaaaatcctagaagaaattatgccttctgaaaaatgacacttcaattggtggctgatgacgtagtgtgataaggagctcgtcataaatcccacatgctcaaaaccatctaggagaagatgttacaagctccgaaaccatgttacgcctcgagtgcttgggaggtaaatgttattcgcatattcgtaatcatgacacgttgatttttaatcaagaaaggttaagaaatcatcagctgcccaacttcctcaatctatgctccaggaagacaaaggcactaacttcgcaggaagagtctccgtgaaggggagttccctaacttctagctacaccgagggtatccgtaagccaaggtctccctccgttctaggaactaaagtcatttattgtcacgaagagtatgggtttccctaagagggccaaggcattttgagacacattaaaccgggctacgactttagcccacggaacccttgcctatgcatgtcaaaatacgaacctagtaactaggcttttcatgtacgacgtcacaggctcccccacaacacgctatcgtatagagcatggatgtccttgtgtacctgaccgaatgatccaatagctaaggataagagaaatttaaaagggaaagccctaaggtgacacgcatctgtggcccagctcgtaaaatctgacgcccttaaatgtcatatgggaaatatgccacctaccgatccaacagttagatttcatcccaacgctgttctatccaaggcagcacatgcaaagaagttggcctataaatacccccaaaaaagtgcaagaaggggagacctttttttggatggaagactcattcttcatcatcccaagcatgcatattttgtaaccttattattaactcccgaatattcctactaagctttctcttcttcaagaggaacacgatgtaaacgagttatagtccattgtatacctatttttataaacagttatcggctaatgagcctaataaaatatattcgtagactaaggatagttaacgcttgaaccttgtaaaaatctcttatttgttattttgctattgattctatctttacttcctaagctcaaaaaatatttaattgtcaaaaaatttggcaaacacattggtacccctaaaaattttgctaccatgtataactaaggatttgatgctttattaggctatttgtgatctaaactgatgtaggaatgcattgtgagattatgaatggttatttgcaactaggaatattcctatttcactactaattaatacctaaaagaaaaggtaaaaatcatgcatcaattagaagggttcaactaggtcttacttttccaagtaggatctagcttg

SEQ ID NO: 70858 - DNA, 1195 bp, Cannabis sativa
aattagttatacattttctaaatctcattttaaaaaagtatacatttatataataataattatatcttaataaaatatatataatttataaatttatttatatagaattaataattttattccaaattgtaatacatgtaaaaatattatatttattcaaaaataattttattatgatatagtactaaggattgtttagtgttattgttgttacatttgatactttttggtgtttctttttttagtatatctatttagttataatctctcaagtgtattcttagatagaggttctaatgtagtatcattcttacattctaatatttcctttaattttaagaagaagaaagaaaaattagactcacgttcccaagtcctccaatattgcagctgcacctttatacatctgcataagaaagtataattaaaatataacaagtgcaacattccacactcccaacaatcaacggcataagataacagagacaaagagataacactcactgttgacccacagtcaccatcacctgctttgctatcccactcattcaaactatccacgatcttgattactgcatttgcggctgcttcaatagccacctcaagaagctgcccttcttcattcagttgcaacggccgacctaatgactagaaaaagaggcaaacatatataaaagtcaggctttaatcttgttgctaaagttatcagggatagcaataatctatatatgagaaaaggcaattcattataagtataacgatgaaagaacaaacaataaacgcaaggttttaataatagaaaagaggcaagattagaattagcacagcccttgtaatttatgatacataaggataacaaataccaatgcaaatccctagcaaatatcacaaaaactaaataattaatttggaccatcagactccagttgaaacatggtaatagttgacatccattgaaaatcagaagagttgggcaattgtaaatttcagacggcgaagaaaagtgatgaaatggaccatataaactaaatggtttgaatttattgctcaactttgaattatgattatataaaacatagcttcaataattcaaaatattgagccaaattatgtttaaagcacctcatgtatctgccacttaaatctgtgagttgaaaaaatctgagaattattcttttatatgaacatacctcct

SEQ ID NO: 70859 - DNA, 2010 bp, Cannabis sativa
  modified_base (764)..(768): a, c, t, g, unknown or other
tccattatatcaccccattctggaatttcttgagcttgaatgaaaattcaggttcaaaatgacttgaaatggccaaaatagttgctctaaagtggaagacaacctgtgataatcaaaaacatgagacaaagggtgagatgtaacaagtgaacactatgatgaaaatagtggcattagttgtcgaataacaatgaaatcattaaggtatgaaggtttgttgatttgtctccctgatttgttatgagaagaagaagaaacaggagtgagatcagtagagataggaatagaagacacattgtttgaggattgagaggttgcagaatagggaatatcagagattaaagtttcataggctgtgggaagacctccagaatgaacaaaaggaaaaatgtgctcataaaatagacatctctagaattgaaaatttcattagtatttaagccaagaagcttgtataccttcatactagtacagtaacgaagaaggatgcatggagcagatctaggggaaaactttgatctagattggtttaaggtagagggataaactaaaaacccaaaagcttttaaatgatcatatgcagatggtttagagtgaagaataactaaaaatgattttttcttagatttggtgtaggtgtcctattgattagataggctgcagtggctacacactctccccagtggaacataagattaaaacagaagggctctagcaaaattgagtaaatgttggtgttttctctcaacaacagagttttgttnnnnnctttgcacacaagaatgataatgcataatcccaagctcactgaacaagtccttaaattgaagttctttttcattatcagattaactcccttaataattttattgaacttgttctggataagttttatgaactggggaataaaaatctaagcatagaatttttgcttaatgagcaggtatacctagaacagtcatctacaatggtaataaaatacttgtaaccttcagttatcatagtgttaaaaggcccccatatgtcaacatgtagatcaaaacaactcttagcaatgttgtgattagatatcaaagtaatttattttttttgcacaatgacaaatagagcaaggaaataaagagttagaatctgaatgaaatttcaatgctttattcaacggatattttttacacaagatggatggcccaatgtatagtgtcatacagtttcatttgagattttagaataaaaaatagaagatgaagccgaaacagaatgattattcttggactgttcacagtttaggtagtagagattgccaaacttttacccatcccaatcaccttgttcttcatagtgtcctggatgacacattgaccataggtaaataagaatgtgcaattagttgttgctgtcagagaattaatagatatcaaattgtatttaaaagtaagagcatgtagaatattttcaagaataagatatggagctaaaataattattctagtgcaattaatttttgtatgtaaaccaattagtaagagtattgttatccgtgtttttggagaagagacatgtggtgtaaccagaagataatcaccacctaaaactaggtttgacttccttcttgcagaagcccaagccagtcatggaacgggcctaagcctagtgaagactcagagcttgacctccaagacataatgtttgtccaagatctgaaattttcctactcttttgagacacataaggaatgaagaccttcaaatgaagataaggatgcacctggaagtagaccacgtaggaaactcttagacacctactaaaaaatggcatcggatgtctatcggggggtgagtacgggatgtgtaccacgagacgagaggtggatatctcccctaaaatgatgtgtccacctctctgacacatgatcaaatattgtcccctgtgtcatatcatggcagtgtgcgcaccacacgacatacaccccttttgtctgacaactcccctaacacctttgtatgccatgca

SEQ ID NO: 70860 - DNA, 1534 bp, Cannabis sativa
actaaaaccataccaaacatagtttggttgtacattccaatttccaataacctaaactactatatcaaacaccctctagacatggtttaaagaagatgctaaaaggtaccattagtgtttagtatcttcttaaatatcatatcgttatggatgcaattaactatcaggtcctatataatttgatttaataacttttagtgacaactttttaatcacaacataaattttttataattaaaggtgacttttaatgataacaaaaagtaacttgtcactaaaatatagtatttagatacaattatcactaatatagttttagtccacaactattgcacatttagtcacaacaaattgatttttgtgactaatatctttagtcccagactttttaatcacaacataagaaattatttataattagtcgctgctttttcacttttagttacaaattttattgtgactaaaaatgagattttttgtagtgaatgttccatgatttatattctcagaagttaatttgagtgtattatgaagctcaagagcaatgaagcataacaagatagagtttgatgcttgcataaaatggaaggaaggacttgaaggacaaatcttaaaggaaacatcaaagaaacaacactaaaatcaaaataggttcatttctatgtattcgtcttgaatccagatcaaactttggcttaatgtttctcgagagaataattttataagaaaaaccatttggtaatccaaattttggttgcgcaggaaaccagtaaagtactctaattttgtctaaatatttaaaacataaatctgttaaaaatgaaacaaagtttgacatataccttaaataaattcatgaactatttcaaagttcaatatagttctacatttgtttgaaaatgaattgttagtgaactgaatagaaaaaaaatgttagtttagttaccagaaaaggtaacatttttcataaactagaaaaccctgtttgtaacaacaccaatcgactagagaatacatatacattgtcatcaatgcaaagtgttaataaatatcaattgttcttaaaccttatgaagaacttttcaaagcatcttaagcaaactaagttcatatcatatacagtgcatattgctatattttttaattttcttttgtctaagaattattgtagtaaatctacaaggagagttttatcgcttctatatcattttgtaacggtaaggttgacactggtttaacagcccatatcactctgaagaacataacagcaattaacagacacaaaattaatcaaagagtttgtaaacaatactgtaaagaaatcaaaatgaaaattgatttgaaagccataataaaaatgatcaagaagattaaaagtaacatgtgaataactatgagactttattcataattgagatcagtacaagatagattactttaagtagattagcatttcagaattacacaataccttaccaatgaggaaattaagatccgatgcacgtatttttcttaatatttttaagttaatatt

SEQ ID NO: 70861 - DNA, 1849 bp, Cannabis sativa
  modified_base (1370)..(1393): a, c, t, g, unknown or other
  modified_base (1581)..(1585): a, c, t, g, unknown or other
tagatgatcacatgaactaaataaaatactaaataagtaatgaaaataaatctgtttcattattgataattgaatagaaaagattacattgaaatagagttttatttagggccccaacagtaattactcattttcattaacggtaatgaccgtatctttccctcgatcataaccgagtcataaatgataataatcgttacctcaatcataatcgagtcacaaacgatgataatcgtttctcatcattacctcgatcataatcgttcctcacattacttgcttagcggtgcatatagcttttcttacctcaattccaaagtgaggtgcgcgggctaactggagtggaataatacttgacaatctcgggtcctatgtcacaacagcggtaaatcaataagggtttattacaaaaaaaaactatctaaaacccacataaaataacttatggttttcaaccgaaacttatggtgaaaacaccctcaattaaaatgaattttttggatctaatctatgtctcatattgtagagctcttcataagcttcgaaatggtatatagaacgttttaaaacagacactcgaatgaaaagttatggctaaaatacaaaaatcggcgattcctgaaaattgatcatccagaattccggttggtgcagccctataccatccggaattccggttcactacagcagaaactcgaaaattctagatcctcaaagttccaaaacttgctccaaacctaaccaattgttcccaaacttaacagaacagttctatatcataaatacaatgtatacaatcaatcaaaactcataaattcatcaaaatgatcaaaacaccgtagttgagtgaaaattgagttcttaaactcaatttagcccaactcaaacctaacagccctaatttccatccaattcaagtttaaacaacctaacttaaactcaaaagcatgctctgaacttaaatcaacaccacagtcccgaaatcacaaaatcccctaaccaaactcaacctaaacctcaaaatttaaagagacaaagaggaataagcttacctcaaagcttaaacaactcctagtccttcttgattcaactaggaaatggtaaaattgatgaagaatgctctaggttgctgctgctttcttaggccaagttcatcataaggaatggaattagtaagatcaaagggatttcttttgaagttggatttggaaggggccttgagaggtattttatatgggagaggaggagagaatgcatgatcgtcacacttctaaagataagtaatacacttggtgagtgtgtgatcaagcatgccacaatggaagcatatgttgggtaagatagtaattgttggaatatcttttaccagnnnnnnnnnnnnnnnnnnnnnnnntttttaacatcctaaatatgaatctctaaaatgatgaaaataaacacatataaagtatagaaaccttacattggctgcagcagaataaaaagactccttccgctcaaatctctaacccttgtattctttgcgtcccagagtatcaccaagatctgagcctgaaactccttcagttgtttggattcttnnnnntcttacacactatgattgatgactaacttgctatggttgggcatgcactcaatcactaaagcttgaattttaatggtgaagaagactaggatttcaaattagaagaagagaaaaagaaaagaagaagtctcaaactctctagttgtctgacaagattgaaactaggttaagagtctttagaagcattagttggataatgagacctttcttttctttttatactaattcacttagggttaggattaaattatttggaataaaaaa

SEQ ID NO: 70862 - DNA, 838 bp, Cannabis sativa
gccggcttgatctgggctggtggcgctcgagaaccttgcctctttttcgttctcgtgcaaagtcaaaggtcccagcaaatggggttcatggttggatgatgagtgtaattagcgtcaggtcacgctccttagggccagttctattatcctttattttttaggcgagtggttgccgttctcggtggttgagagtctctggtgagatgtctatcgtcctttgccgagggttgcagatggaactgaccttttgggccatgagggagtgatcttggtgggtattgacagccttctatctctcgcttttggggttggctttttgcaaaaatctttttcaggcatgtgctttagccgtggtgtggtgttgctcttccttatttttcagttctcggactacttccttaggttactattccagcgtccttgctccagtgtgcaatggctcgtaatgagttttcagagttttgtagatgtagaagggggctgtacttttcttatctcatcaccttcaccgttcagagccattataggaggcctagcatggatgttgctcgtcggaagatggcagtgctccgttacacatacagcaaccgtactaaacgcaaatgacaaaagtgtcgcaacaaccttactatccataaatgttgcatattccacaacaacagtctggagagaatggcgatgatgatgatgaggacgacgaagaggagtccacacaattagggttatagtgtggtcatttgtggcaatataagtattatttgaacaatgaatttgataatataagtattttatatttgaacacttattttagttattttaatgtgacaatataagtatt

SEQ ID NO: 70863 - DNA, 1455 bp, Cannabis sativa
ttaaatatattacataataaaaaataaatattctttttttttttttttataaaaaaaaaataaaaacattcattaaacaattaaacagttagactttgcggtcgttacaaaataaattttccggtaaaaaggagatcaaaatagagtcatacagttggttggtgggaaaaaactcacttagttacattatggctaacataattacaagtcctactaacattagaaaagttataacaaataaaagcgttaaataacttaatacaaaaaaaaaacatagtttttaagaggccaataaaacatctttccattaagcacattgagtatttagagtctttggtataataatttcacaaagcactaaattttagcacatttcatatctataattggttaagaagtgatatatatataggtgcatatttaagtagtgttatgatagtaaattttttatttaatttttttatttttatattatatgaattgaaattaatttattggttgaaaaaataaaaatataagtttttaaggaaaaaaaaattgaagttgatttaaatattttatatataaacatatttttatatagtataaaaaaatattttttaattaaatataaaaaaataatttttttttaatattaattattaaattaaaatctaataatttaatatttttaaaattaatatctctagttaaaaatttgagaaaccactaatttttagcacatttgatatttttaattggttaagaagtgattttttttttttttttttttttaaaatagatctatgaatatgaaaatgaaatgtttagttatataaaataaaaagtttttttatggaaaggaggaaaatttagctgatactctgtaccaaaacagacattaaaatatattaaattccttgtagcatttagtacattcacgtggaatattatatgggtttcaaaatatattcaattgtataaaataaaaatagaataagttgatttatttgtactttacttaataagattttgtgaaattatactttcttttttaatcgggacctcatttaattggagacaccattagagtattagaatttaaaaaagagccaaataattagatgtataatttttagattatttaataaaaaattaaaataaaatcagatgaaaaagattgaagtatcacaattaattttaaaaatacttatatttaagttcataaaaacttattatttttatctactaacaagaatacgatggaagaataaaaaaaatcaacaacaaacaaaacaaaataaaatcatggcataaaaataagactaattgcagtattaaagattaaattgtaatagtaaaatacaattccgaacaagccacacttaaactcaaaaacgaccaacggacttgataagagaaaaaaaaaaaccctctaaaactataaatttagaaagaaaaaaaatcctaattttt

SEQ ID NO: 70864 - DNA, 1723 bp, Cannabis sativa
tttcaaaaatgtaatcaacatattttgtgaggaatatatattatctgaagtatacattcattggttagcaaattccttgagcactatacatcaaacaatcaagcatttcgacaaccgtatgttacaagatacttaaactaagtcaaataaaacagttatcttatttaaaataaaagcagttgcacattatttctcgcctattagttaaaaatatataaaatgtgtagaatattcacattttataacttttctatggattggataaaaaataactaatatcctactcttataaataggagagcaaatattgtaaaatggaatgaccaaatttctaacttagagaaattctttcaaattgtatttctattcataaaattccaagtaagcgtaaattaatatgagtaatttgcggtataattacctaagtttaattctcgattgcaaataagtacttaagtttattttttggcggtaataatacctaagcaataattctagaacttttggaggtacctgattattaaatgttaagtaaattaccacgtgacaatccttaattgatccaagtcattaaatttttatttttattttttaaaaaaaaaattagtttagatataccaataagaaaataacatgtggataatgacttaacatttaaaagtccaatatttttagaattccagaaatatatgtattattactgttaaaaattaaatttaaatatttatttgcaactacgagttaaacttaaatatttatgtcacaaattactcaattaatattaacgaatttatgaattaacacatgtctttacacatatttatcaattaaataaaaacacaaataggcaaaggttaaatgaaaagagggagaaaatataagataattaagaaaaagtatacacatttattccttcaaagagtggtgctctattttacctttatgtgaagaatgtacaattttatattctttagctattgtattagactatgattaatggaaatttaaaatttgacataaaaattgaatttgtgctatatttcaaaaaaaaaaaaaatatatattaataatcatttattttttgagaatatatataaaaattctttttattcttttattatttaaataatgataatataaataaaaaatataaaatttagtaaaagttaataaattataataattagtgatattttagtaaataaaaagatattaaatttaatataatactatattttgtatcaaatttaataaattttttagcacatgtcaaatttagtacactttttaaatatcattagagtatacttatttttcgaagtgtactaaaatagagcaataaaccatttttggaactccattaaatatgctcttatctatttaagtagttaacctcaaattatggacataatgctctaaaatagtgcaagagtgtaatattcgagtggttggtttaccatattttggtcatctgattagtgatatttgtgtagctttcattcagatttcagactgatttttagatttctaagttctaaccgttcaattataaattataataattatgttctttcaaaaacaaaaaagttataaattataattaaactgaaagttgtccttttaaaaaaattaataaataaaatttaaaataataattaattatcatatctcacattaaaattttagagttattatttttaaaataaaaatcaatcattttttt

SEQ ID NO: 70865 - DNA, 1241 bp, Cannabis sativa
attgatattgcccgagattgaaataatatagtacatttttattaattgataataaagtatttttattaagtgtataattattagataaaatcaatatatatatatagaaacatattactaattacattgcattctctctaataagtttttccaattaattttaatattaattatatattattgtcttttatatagaaaaataaattataaatatatgatttatattttcattgatgaattttaattgatagatgctcgtgaatcatatttattatattttcacaaaaaaattatttttataataacgttattttaatctcttgagtactgtatagtacatgcctttactagtatatataagtataaatatatatattgaccaaattaattaaaaatgatcgaagatatgccatatattattcaactacatacattaattgtacttaattggtcaagagaatgattgttcatattacgcgcgaatgcaattaataagcttcagaatatatatattatattgattgatagaaacaacaaggaaaaagaccgtaaaaacaaatatataacacatatataattcaaaagtccaaattataattagagatgctctaaatcaaagtcatcgacgtcgtaaataagtttgaggctttgagtgagttattgtcaatatttactatatatagtaatgatcaactttagttctagggaatattgatattacaattaagagcacacattaatcttgcacgtattcttaatttaaaatgaacaaagtcactcctaacttctttatcgtacgtgcaagtccaaagtcaataaaaccagcgtgccctagctagctaattaaggatgcttataagtaaaaataataacacgtctatgcataatattaattcagtcttaacatctattaaattattccacttgttatatcagtgggtttttcatttgtaatgtcgaccgaataattcgttgaagtttggtatatttgaaagagatcgctgacagtgatatatatcagttgttgatatatcccgtctttaaaataaaatcacaatgttatagctctagcttccaaactaatatgttgctatattgccccaatttttctctttatttggtaattgataaattataatttaattttatatataacataataaatctcattaattattagtacatacaaaaaattaaacgctagtgctttgactcgatcgaaatgatattattgtaatttg

SEQ ID NO: 70866 - DNA, 1671 bp, Cannabis sativa
ttgtttatcttaaaagtattaagaactaacaaagaggttgtaaatcaaaatcagtcaataatagtcttggataaatctgtaatacacccctaaaagagtgtttcggtacatttttattatttttgacctctagtagaattttttagtgtaattttttccgagctaaaaactctcttagataccgaaataaataggaatgtaccaaaaagtctatttaggagaagacaattgctaaaaggtattattggtgcctaacatcctcctcagtgtcatactgctattggtgtaattaaatattggatctcatataacttaatgaaatagcttttagagaatatcgataatcaatcgtgagatgctaactattgaaggtgctacacatcatgctgatgttcaataagaatacttttaggagaatgtattatagagctgattctaactcaaatacaattgacataatcactatccaatacaagaaaaagaaaatgtgatgtgattcttatgattcacctgaaccaactctgtacatgtaagggatgttaacagcaccaggggcatgtcctgcactgaattcttcaggggtcctaaacacaataaaaaatcccattttttctatcaatcaaacagaaaaagttacacataattctctcctcatttggaacaaataaagcaacaaaaatttcacacctaacatccaagtagcggtggccagcttgtaaaagctcatgagcaactctaactgggacagaaattggcactctggttgtctctaaattccttctcaaagttgtagccttaggactttttcccaccatccaaacaacaagttagaaaaccaaaaactaaagactcataacatatcagagtaaaaacaagcttaaatcttttaccagaagtttggagctttgttgggtttgattcttgaatgacaaaagtgttgagttggtgtcctgaacaagatcaaaaaatgaataaagggttagtagagaagaagaagttgaagatgaaagcacaagacccagatcaaaaaacaaacctttgagtgagaatcttaggcctaattgatggaactagaagagacccatttaagcaagaggagggtacaagtgatgaagccatgatttccttcataaagttttgagctttttaatgtatattgatgatgtagtttggttttgaaatttatgcaaacacaaggcagggagggaagtaagcaagtaaagtgtaactttattaatatgagtaatggggttatgatagtgaaggggtttatatagttgttgtggatggaacaaggcatggttgacacgacaccgttttggagtttttttaactgttgaaaagctcagttttcagataaacccaaagtaagaaaactaaattgataagcaaagtagggaatgaatgcatgggcaattaggcattggataaggtggagaagtgaagagagtacaatcgtgtggcacagtcttcgatgacttaattaagtctctttgtacacgtaagactttttttatctaaagtccaaagtccaaaacacaatctaatctattattattgctaatggctatataatttgtgtgttaatagcttaatgataagtgcatatttattaacatatgatccaccgttcaaaaaaagtactatgattagtgcagtaaatatggtttg

SEQ ID NO: 70867 - DNA, 1904 bp, Cannabis sativa
attgtattggattcgagagaagattgaggatagtgttctggaattggaaaaggtgcacacaagtgacaaccttactgacattggaacaaaggttctcacattcagcaaactgatgcattgtctagtttgctgaacattggttcttgctgaacattttgagatatcaacatcatcaaggcttcagtgaaaagattactggtagtttgctttagagaatcaaggtggaaatttgtggaagttgatcctctaaaccaacttatgaactaactcacctacaccaactaacttaactaactttctattatgttagttagttagttggtatcggttttacacctatttcctagtgtgagttatacctataaataagactactcttttcactttagatagatagaataagagagagagtattatgagagagttgcttagagttctaagctgagagattttgttcttgaagagggtcaagaacaaagggtgtactcgggtagcgagagaggaaaactgagaccgttttctctggtgttttttgagtacagcagagctgtgattgctcttgttctaatgattgtattgacactctcttattccatatgctaatgaagaattggtgatgctttctcagctggagtatggccagggatcatattgatctctaggagcggaaccaggataaaatcatgtgttgttctttgtttaatttatggttttgattcattgtgttgttaactgtttttttgtgtccattattgctgtcaaagttgtgagtttattgcaggtttaggattgaattcttgttgttagtattactgaaattacaacagagtattttataaatactcatacttcacgtagtttttcttgcttccactattggaaggtttgtttattcctaaacgtggctgtggcggagcctcttgcttttcatcaagctatttatcattgttgcatttttggatatttctacattcagattgaattgaattgtaaaaaatctcgtgctcaagctcaactgtgattctaggtttgaattggctttaggattaattgttaaatacattatttcaacttgttatttatgttgttggttttttaaaccccttttaaatgtgttttcttaggctatatttttttcaaagagaatagaaaactacggtagcgtttgattggaggtaatgacatggaatgaaatagaaataaaataattttcattttattcttttgtttgattcattttaaagtattagaatagcattctaatgaaatacctttttcactattttggtggaatgactattttattttgaaatgaaaggaaaaactattctaatgtaatatggtaaaaaagtaaatttaataatttttttattaatattttttatacattttaaattttattctattcctattctcatttacattcttattcttatgtttttattctttccaaccaaactttacttacatttcatttctccatggaaagagcataattgagattttttttcccgtatacttaaagcttaaagctcaaaaagagattttctttttactaccccatttgataagtcgaactgagtagaaactgcttggacataacatgagagagacacggaaagaaaaagaaaaggttatggtaccttacacaagagacaaaaagacagtaaagaaaaaagaaactaaaatcacattttgtttaatctattattttctttcttcctctgttaattttttcccaccacgtatagtccactctttattattcctacttaaattgagagaaaaaaaattaatataaaaaataaactaactactatttttacctagtcaaaatggagaaatcaatatatatatataaaaaaacctttacattaataaaaaagaagaaaaaaggaaaatta

SEQ ID NO: 70868 - DNA, 1206 bp, Cannabis sativa
taagcatcgatttaaagttaaaacggaagaaaaaaaatatattttaagcatctattttaaactaacacttacgctcaatagtataggttatgaaccgacgccaaagagtatactttatacatccatggaatatataagcgtcattttatgaattaacgatatatgtttaggagtcgatttaaaattgatgcttaatgtgagttttgtagtggcattatttggcaaattatttaatttactatactaataagaaaaaatagccatgtatgtaataaaatattatttgaatttaattttgacaatgtaaattattcaaaatgttctagtaatttacatatagtcataataactataatataataactataacatatacgatcatattaataaaataaaattatattacaaaactcttaaaatgctgaaaaaagataaaatatatatatatatatatatattgaaacacccccttaaaagaatgtataatagacttacttccgctctaaaatttcaaatgatacacctttactaaattacacttagtaaacttgggtatgtaatttgtacattctctctttttgatattgtatgaacttttataaaaatatttatattgtcttaacttacatattcgtatttaaaaaaaataacaaacaaataaataaaatacaaatattgaaaattaaaagagtatttggcattattttctattttgagcattgtgattttaagaaatgaaaactagttttcaaaatgcaagatatgtttggttagagtaagcaacaaagaattttttacaaaattaagtaattaattttacttagtccataagttaatattattttcaaaaattgtatgtagattttgatagagttttgatcttttcctcttgggttcaacccatattcataataatacagtagctattattcagtaggggagttacacgggaatagaccaagtcaatttttgaattgttaggatgacacatctttttcgagctattcgataatatgaaatgaatgcattcagcaatgctaaagtatctcttctcaacaatgaatttataaacgttatgatccttgttggatgagattactctactagtcatgatttcggtttttcaacctgtcttacttgtctttactttgaacagacaaattacgacatgtgttgtgcaatgcaacctaatcatttattattatt

SEQ ID NO: 70869 - DNA, 875 bp, Cannabis sativa
caataacttcttatcacaattgatcaaaaataaaaattggaaattcgaataacaccaagccaagcccagaatagcctaattaggaataatattcgctggttttattatttaaatcaaatttttatattttcacacaatacgaaggcgttaaatttaacaaaataaacaactttggacgacaaaagcagtcaatccaaaaaaaaaaacatggaagaaagagacgaaccagtaatgggaataggagagtcatcaatcccaagtttgttaagcttcaaagaagaaagtctatgccagaaaccctcgtccactgcgctctgaaacggtgcaaattggagtagagatcgattaccttggtccgccattggacttgctctcgaggaaatcaagtccctgttattctctcacaaaatcttcaacctgctttatttagttattttaaaattttaaattatgacaaattacaaattacagagaaagtgctttgagtcgggaatctgaaatttctgatcagttagactgagaaaaatcttttataaataaaagaaaacacgaattacatataagttcgtggcgtgttggctccggtttccagtttgtgtcttttttctgtcgtttacactatttagttttagtaatttgggatataagtttaagtttgtgaataattatttaaatttaatttttagcagtaataatatttatattatatttgtagaattctgtaggttctaaccgagtcatgttgcttttgagctcattcacaatattaaacatagaaagcgaggttccaaaggattcgctgctcttaaattggatatgagcaaggtatttaatcgtgttgggtggtcctgtttagcagcaatcataggaaaaat

SEQ ID NO: 70870 - DNA, 2611 bp, Cannabis sativa
  modified_base (27)..(41): a, c, t, g, unknown or other
aggatgttaatgaaacatacatggtannnnnnnnnnnnnnnggtaaaatatttccaacagtggagccttggctttccccttgcccttgcattttatggttaccccggatggtgcagcctctggagtagcctctagggtaatgtcctgctaaagtttctggacaggagcctctgctagaacttcttcaatagtcacctccttcgcaagagcgattgctggattttcttcaatgtctactgcttcgagatggaattcctcattcaaatttatcaatgaaaaaacaaagagaaaagaaaaaccaagcaattagacacccaacatccaaatgacagtacaggcattggggaaggcctttcccaaaatttctttgagaggtccccactggacccatcactcccaaaagcctgtctttgccagtcgactcaaagtgacagatcaggaacccaaggaaaaattaccaaaataagatttaaagaaaatttttggaattaagtccatttggagtcctaacaactccagatagcatataaaagatggatgaattcaacaaccactcgaaagttcatttagcctggttcaaagcctaacttcagaaccctaagtacatgaaaaagtccatatagttcagacggtcataccttaaccatctagacaataacaacactcccttggcaaaaaaatttcaacataatcctgtcctagatatgtaactctatgggcatcattttaccattcacacatgtcaaatatcctagacctagcttgatctaagcatttctatcctagatacaaaatagcaagttttaacaagcatcgggatacttaattggtatataagtggaaaatggaaggttattgtgaaaatatgcccaggagttgtatacacagtcaattacgtgatcgaagctggcttaagcgtcgaagtcctcatcaggctggggctagagtagttcagggtttaacggctttgtgtctaaaaatcgggttgaatgaaggtttaagaaatcctgaatcaggatatcaaaaacttattgcattcaccattagaaatcattgcaaggtaaaagtttttctggagtaagaagttttggtttgaaattcaaaaatgggagttttgaagagtttgaagtagtgaaaaaaggaaaagtgggtttgatgagtctatttatactttggccaaatcctcgcaatttaaaatgaatggtacagatcctctctccaaaaagcacaatttgatccgagggatgggaagtttaaaagatggcatttaaaacttgctcaaggcattcattttttatcattgctcgccttcagtaccgcacacattaaataagggtcatttcaatcgacatgctatcattataacattttttgaaggacgcacctcctacacgcatgtgttatcaacggacgcattaaaagcgcaacatgtatgccacgttgtggcactatcagttcttggtcctgtaattgatgatagctcaaggaatacatccgtgatcccagcaatcaccacatgttgtaaacttatctccgtgagctggaagaagactgcaagctcccataactcgaacagtcgcagaagcttgggggtaaatgttatccgtgtttctggacaagtgacacgacgcatagaaaggagagatagtctcataatcttgctaattaaaatcctttaacaaactcagtcacagagaatcctcactgatccggtaacaggtcaagattgagaggtatgatgaggtctacattgccttacttcagctaccttgacatagaagacttattaccactctggactcagagtggcccaagctcaaagtctgcccaaatgatacctagacgggtacttgaaaggcctatcgcggacgttgactgccccaaagcatcgcgaatgtctaccttggatgaaaacttggatcgcccagtgacgattatgctttttttgacacaaaattagatcttctcccttgtgtctagacatggtagtgcgcgcacctcatacacctttttaccagacggttattccaagcatctacttttcaaggtcaaaccttttagtgacacgcgtccattacgtataatggtccctttttttctagctgctgcaatgcacgagcacaaacgcttccaaggggcccaatagtcagctctttttgcatgtattttaccccattagtgggctctttggaagaaatcctaggcgggtcatgggcatgtccatacccccccaacaacctaaaaatacccttctatttcaatatgaagaggggatcacaacttagagccaaagctctgctcatattattctaagctttcctcttctttaagagaaacaaagaatacagagttaggattttctgcaaaacattgtaaaaatagcatatacgccctttgaggctaatagactaacttgtggactaaggtttattaatacttgaaccacgtaaaattctccatctcatttatttttgcattttattatttcttaagctctcatatttagtttccaaaaatttcgataaacaaccataatagcaaatttgtagaaaaaattaattttcaaatttaaagtctcctaatacctaaaattaattttaatttgataatt

SEQ ID NO: 70871 - DNA, 1492 bp, Cannabis sativa
catttcatatgacaccaaacaaagaattgtttaagacccttttagagagtcatgggagcacacttcttcttgggaacaacaaagcttgtgagatcaaaggtgtgggaacaatcttgttaaagaatcatgatggagtcctgaagaccttgaaacaggtcaggtatgctctagatcttaaagaaatattctctctattggtactactcaaatgggatatgttgtcaaaggtgaggaaggtgtgatgaaaattgcataaggcattgaaactgtgatgagaggaaggttgagtaatagattgtatttcttggatggaaagataataacaggtagtgcaacatctattattaactcaactaaacacagtcaaacaagactatgacacctcagattggggcatgtaagttagaggggacttgaggaaatgaacaggtaaggactgttcaaagagaagttaacaaaaagacttgaattctgtgatgaatgtattttgggaaaggcttgcagattgtagttcaacaaggcagaatacaccaccatagaagggttagcttatgtccattccgacctttgggggccatctaggattccaactaaaggcggagcacactatttcatgagtataattaatgattacaacaggaaagtctggatttatttgttgaaaagcaaagatgaagatctaggttcctttgacacatggaagagactgctagaaaactagactaaaaataaactcaaggtcctaagaactgacaatggccttgagtactactcatatgagttcaagggattgtgtgccaaaatgagaatccagagacatagaactgtgatcaaaaccccttagcaaaatagtgttgctaagaggatgaatagaacattgattgaaagggttaggtgcatgttactaggagttggtttagacagaaccttttggggactcttaaaacaaccttctaactaatcaacagatcaccatctatgccaaaaaacttaaagaccccacaagagttatggacaggtaaaccctcaaacttagatcacttgaaagtgtttggatgtactacatttgtgcatgttagacaagataagttgcagcttagagctttaagatgtatgtttcttggcttgaaggggttaagggatataaagtgtggtgcttagaacttggattcaataaatacttgattagtagagatgttgttttcaaggaagatgaaatggccagaaaaccaagagcacttccaatgatagtgaagctatatcagatgagaatgtctagattgaggtggagcaagttgctcctacaacatcagctaatgttgttgctgatggaactgaggtaacaaaaggagaagacaacgaagatcaataggaactcagcagctatcagttagctagagattagggctgagcatcggtcggtttggtcgatttttttctatataaaaatccaaaattcggttttccagtttggattggtgcaatccgaaaa

SEQ ID NO: 70872 - DNA, 1524 bp, Cannabis sativa
  modified_base (899)..(904): a, c, t, g, unknown or other
  modified_base (954)..(957): a, c, t, g, unknown or other
aatatttgtattaaattagtggttaaattattatttagcataaataattttatattatttaaatatttttattttactattgtaattatgtatattaaatataaatgtgataaatttttttattttatatttgattatatactatatattattttattttattttataatttaattatttttattattcctttttattttattgttgggatttactgatttttatttatttattattatatattttttttatttaatttaagtttaatttaagtttttttttttaagttttttttaaaaaaaaataaataaataaaatagttcaatctattattaaaccaaacataaaattacttttcatctaatcttgtccagtttaattcaatctaatttttttcagtttaatcctgagctctaaacggatccaaagagaaatatgattttgataatgggataaaaatgatactttgatacgattttcatttaaaaaaaaaaaaacaacatattacaggttttatgttcaatactagggcttgcccttttactttattgagatatttttataaatacctaaaaataataaaataattataaaagtatgggtaaatagcggtataagtacccaaatttatatatttgtaagcggcaaaaacctaatacttatttttagcggcataagtactcaatatttgtaaaactgtaattttcttttaatttcgtcaatacagactctgttttgaatttattaaaaaatatttggaagtaactgatgctacatatttctatctagacccaatgatcaagaatttaggccttatatgtgccctatttaatacaataacagagtctgtacggacaaaattagagaaaaattataattttacaaacattgggtacttnnnnnnctaaaaataaacattgagtttatagcgcttacaaacataaaactttgggnnnntatgccgctatttaccctaaatttgcgattttctaaatatttttacagatttggatttttttacgaaagtacatactattattttttacattgtttcacaacaatattataatatattattttgatgttgtttaatatatgtattatgtttctcacacgttttcataatcctttcatgaggctccataaaaatatatttaaaaaattcgtaaaaaattaaaacataattttgtataaaaatgcatacattattttcatgataatttaagaccttttaatactcataatataattggtcacttaattttgtatcacactttataataacttatatattatagatatgtgcacagaaaaaagattttaatccaacaaacaaagccctcattaaaaaatcgaagaaactagggtctagggaaaagaaatgaaactctaaggtagagtttgattggcaagaatgaaaacataaaaataaaaatgtgaatgagaatgagaataagaatgaaataaaatttaaaatgtataaaataattgatatatgttataaatattaataattatgtggat

SEQ ID NO: 70873 - DNA, 2423 bp, Cannabis sativa
taaaataatttccaacataatcatcatcagccattaaatatgggtagataatgtttataaggaggaattttttttcttatttttcatcaccaaggctcacaatgagagtaccaaactgttaacgcagatttttattaactaaatttatagcctctttgcaataaatataatatagaaataaatgtataattaataaaaaccagatattttacgtggttctgtagttaaaatctacatactccacgagtccttattagtaaagatatttattgagtacagaatgcaatattagtatttgaataataatatttttcctctcaaattcattgtctctttatccatggattctgtcgctatttataggaatataggttgtcagttattctttcagggattggttcatgtataactgttcatgaaacatgaacactcccacatttcatttaactacatatgggataatatctaaaaactatccaatcgctctttaaacttatcctcttgacgattattattgatttagaaggttgtgtcttgtcagatatgagttctccttcttgtccatcttaataggaaaaaattactaagtgttggaaaataattcacctcgttgtattcctttattggtattagcaatgcaagacgatcttctcgctatgtgtaatgcaaggcggctgtatgttgctacatttaatctgctcatgtcggagagtatcctcttcttgtatatataaatgagcttatcctgaagtaaatatatgtctcgtcaatacaagtttaataattattattcttgtctcgcataagactgagcggcacacgtgtttgaacattatctattaaacttatattaaatagggacaagttattttaaattgatttgaggatacatcattattatattatcaaagttgattcacattccttctgtaggacacttgtcagcctcgtgtatataattgaattttgggtataacacctaagaataattttgttatagcgcaaagaaattacatagagtagtgctcctagtgtggttgttcgaagatccttaaaaatcgtcatagatttgagcatttgtctcagtttcatatttttttatgtcaaccacaaaattattatgtattattcataaatttaattcaatctaaaatattatgaatattttatgaaacttaatgtgctaatttttaactaatttgcatgttaaaattttatttataatttatttagcactttaaattaagattaacgtctaaatacttatatgatccatatattttatataattaagaatgtgtggttgcttcctaattatttaaacttatatgaaccacttagaaatattatatttatgattaaattttatgaagttttatgagtatattataatattacaaaaattaattaaatatatttaaattttaaatatttacagatgctcatacattataatgaactacatgtatttaagcataaaaataaatcatacaattaagtcataacattaaatcatacatataacaacttagaaataattatgctaatataatgaatgttgtatgaataatagtaaatatacatacaaaatttatataattttatttgtatgcataaatataaagtccatataattaatgtatgtgctaaaaataaatattaattatctagcacaattatggaataagtcaaacatgtaagatcatataataacttaaataattgtactaatagtaaatttttataattaaaataaatacaaattagtacaattaattatattaaaatgaattaaatgcgaaaactctataaaatagcagattatcaaaatcaattaattcaattaataaattacttaatttagtaataaatataagaattcaaaacttattataacattaaaaatgttcacattatcaaaattattattattaaaaattacatgccttagtgtcacattttattacagaacaatgtgaatggaatgttccacttctcaatgcatactttcaaccgattgatgtagacaagattgtcacaatccctcttagttttttccccaacaatgatcgatacatatggcaccataccacaacaggaatttattctgtcaattcgggcttccatttggctgaaaatttagctgaaaatcgtaattctagtggttcaaatgcacacaaagattggtggaaaactttttggggtctaaatttaccatcaaaggtaaaaaaatttgcttggagagtaatgcaaaatgctttgcctgtggctactacactatgccgaagaaaagtattaactcaaccacttgttccttgtgtcacaatgcttgggagtctataggtcatgccatgttcaattgcacaaaagctaaagcagtttggagagaaacaaagtttagtatagaccatgcacatgctcag

SEQ ID NO: 70874 - DNA, 1372 bp, Cannabis sativa
cacattttttgcctaaaatttgttttaacaatttgaatttgtgctgtttaggtcttttgggagtcaaaattgtggttcaagttgtcgtctctctcccactctctcttaatgatttttttagtcttgtatttagggatgggatgtatgtttgtgtgcatggacgtttgaaaagcttccacggtaaaagaaccttaaatgaattctccataaggtaagaattttttttccttatcattttaatatatcatattcttaaaaatatttatattttcctctgagttgtgcaaagtaataggatttatatggttcattatgcaataagttggggctaggcgatgtgtctagacatgtcagacactagtcaaatgtgcaatttctataaatgtatgtatatttaaataacatatatatttatttagatgtcatatccttttttccttttatcaattatcaatttttcatttatcttaaagtttatgagaatatttgtttccatgttcggattgcatgagttggactgctttgataaaatttatgttgtgtagtatcaatgtaaatatttgtggaatatcttgaaacattaaagtaaggcttgaagccactttggtggctctttttcttttgcattcattcatctatttcccctacggtaattctgttagtgtccgtttccttttatatttgattttatttatcattatttttggtttttagtattttattagctttttaacactgtatttttatgttgttttcaggcccatagaggaagaaaacgagattgcgtaccattttattgagtgcatatatgttcgtttgaacaacaagaaggtcagagcattggtctaagactctttttgatcgaaagttgaaacaaggctctgtgttgatgtttcatttcgatgtggacttctgctccagtttctgatgttgtctgtttgtaacaaaaagtacaagcacaaggtagttgtttcattttgatgtggaaagattggggctttatttagaattttattctttgatgttttttttttaagacgacaatcattgtatgcagaacgaagatgagtgcaaaatacaaacatttcactatttaaattgctgagttaatagaaggttaagataaaatttttgttttagtttttctagattattctatctttaagactttatttaataattctttacctttatttttatttttagatggtaattttttttttttttttttgcgatataatgttttctcttaagttttgcaaaatatctttgaatttttaagaattaaataataaatgttctcaaactactatctcaccatttactttaataatttcatttatctaaacaacactatgttctaagatttctt

SEQ ID NO: 70875 - DNA, 1639 bp, Cannabis sativa
aaaaaagcttaaaattaaaatatactataaaaataattaaacttaaaattgccctatatttgtgtaataaagtttaagaaaaacatgttgagtatagtttcttttaaaaaaataaataactcttgttcgaaaaaaaaaatgaaaggcaaactcgaccggcttgctaattggagccaacctgacccgatactgaaacaagtcgggtttggagaaaaaacaaattttctgagttttttttctttttaagtttatttatttacatttagttctaaaagtggggaatataaaagagcccagctctgagcgagagagaagtaggagtaaaagaggttttcttgtagaggaggaaatacctttcttcgctcatctgtataatctagggttttctcgacttcatcaataactatggcgccagatccgaacagcgccggcggtagtggaagcgcctcacggactgagtccaccgtcaaggccccagccaaagacctcaaaaaggacgaggatttggtaatctttctcctcccaatttcttttgactcggatttgctttattttcctgttttgttgccattacagcgtatggaagaaacgaagtgaatagcatttttgggtcaatgttaaatttaggaagtgatacctagctgacgagctttttttgaaaatccatgtccttgtttattatacattctcgaattcactgcctattgatttcaatattgaagttttattttttttggggctttgagttatgatgtgtatttgtaatttattgttcttggcacagtccgatgaggatttggctttgaagcagcagctggagctgtacgttgagagggttcaggattctgatccagggttgcagaaagttgctcttgagagtatgaggtaatttcgttttactaaaatttcactaagtatgtgtaaattatgctttttccctactactttttttgtttcacagtcagttcaataagatagaaaaatacgaagaaaatgaaccgagaaaaaacatgaccccaagtcttcctgtgctgaagatattgttttttgaaacatttgtggaagtttgtgttcttaatcttacctagttcaaacttcagatttcatagtatttaattttacttccattttctttacaacgtctgggattggcaatggcctgatattgtttgctacaattgtggagataatcctttcagtgttgcttatgttctgaatgaagttttagccacagtgcatgtgtagatacgtttcctgtcttatgactttgcaatgaatggaattttattatacaggcaggaaattcgtacttcaacaagttcaatgacttctgttccaaaaccactaaagtttcttcgaccccactatggaactctaaaagcttattatgagcaaatggcagggtcagagttgaaggtatggtgcctataataggttccttcttgttcatttactgtagttttattaattttttctgtcttgtattgcagaaatatctagcagatatattatctgtattggccttgaccatgtccgctgagggagaacgggtatgcttaattatcttacactttctcttcaataggtggtcaattttcactgtgttcggatgtttatgcattctttacaaacttttaat

SEQ ID NO: 70876 - DNA, 991 bp, Cannabis sativa
attattgcagaaataaagccaaacagtagcaaacaaatagcaaaataggaagaacaaactgatattaaactctcaagactagttttattgcttccctggcatgtaccgaataccacagccacgcctaagtctaactcaactaaccaattatctcaacaaactcacagagctaacaccctgctgttgccggtaccttacccttgtgttgcttagaccttcaggaataaacaaatgtgagtgggggtctatcattttcgtattgcacaattggattagtatcttttatatttgactcctaagtcctaagtccttataggtgttaatgtagggagttcggtttcagtgtgggggtgggagtcattctctctcaaaaattgataaaatgatttttaagaaacaaattttgttcatatgttcatcacatcccttctaacatgacattaggattacctaggtgatctaatgtgtattaaagaagggtgttctcatgcataattttgttcccaagattataacagaaagttctgcttttattgtatcaaagtttgttatcacatggctgctcaagtttttgctaatggctatcataccttgatcggcttctgaagactatagctgaacaagaaaagctgaaagtgattttggaaggggacactccagtatttggactctggtagtggatggaaacatatgggttttcagttttgttacttttgttaacaaatgtagtttctcctttgaatttcaacatggctgaaggtgtctttggtcttaagaaggcttatcaaagtcgaattactcatagattgcttatagttgacattcaacgagggctaatatgttagaattgtttttattcctactttttttctaactctccaatatataaaaaaagattgatgaaatgtgtagttgactggcaaatgacaattcatatacatcaaattactgaagtgtactatttaagaccatctaatatagtttttcttga

SEQ ID NO: 70877 - DNA, 5591 bp, Cannabis sativa
aggatgttaatgaaacatacatggtagtaaatctagaccctggtaaaatatatccaacacaatatacattgcagcttacgattctgtggtcccctgtttgtaacagaattagtgtattttaaattgtgtaatttgtcttgtgcgaattctgttatgcctagtcattgtgtaatcattggggaatattaagggtgaatattctagtcctttgctcatgtaatcactgccaggtgtcatgcctaacgactgctttgtattctgaatattgctataaataaactgctctggctcatactgaaaatgagctgagattcataatttgccttctctttaaaatccaaacttggtatcagagctattgctggcctctgccatgtctactccacaagacaatcaacccgcctcagctgcgagttcaccagccaactctggtgttgccggagctggttcgaataatagcaacaacaccaaccaggcatctcagctcccgaatgccttcgcccaaccaaccctaaatcagccattttcactcaaacttgaccgcaacaatttcacactatggaagacaatggtctctaccattgttagaggtcatagacttcatggatatgagaactggataataagtgaccagttactcatgggctggctttacagctccatgaccgaaggaatcaccacagaagtcatggggtgacactctgcagcaaacttatggagaaatctcaagagtctatacggagcctactcaaaatcgaagatggacgacactcgcactttgatccaaaccactaggaaagggtcaactccgatgagcgagtatttgaggcagaaaaagaattggtcagacatgttggccttggctggagatccttacccagaggctcaccttgtcgctaatgttttatccggacttgatgctgaatatctctctattgttgtgcagattgaggctagatctaacacaacctggcaggaactctaagaccttttgctaagcttcgacagtaagattgaaaggctccaaattcttaccctcaacaacaacaagactacaagttctttgccacaagctaatatggcttaagaccaacaacaatggtcggggttgaggatttcagtcacaaaatgctggaactagcagtggtggccgtttttccaacagtcgaggaacatctggcagatttagaggaagaggacgtggccctggttctggttctggttcgagacctacttgccaagtctgtggcaagtatggtcacacagccgctatttgttacaatcggttcgacgaaagctacatgggatctgacccaaacaactctcacagccagaacaaagcagggaaaaccaacaacaatcacagtgcattcattgccacccctgaaattctcgaatcagatgcttggtttgccgatagcgaagcgagcaaccacataacatctgacccttcaaacctaactcagaaataagattacaatggttaggagtctgttgttgttggcaatggcagtaagcttcaaatctcacacattggtaatggtaaattgaacactaattctggcaactatttactgctcaaagacatgttacttgttcctaaaattgccaaaaaccttattagtgtatctaaacttgccactgataacaatgtgttgattgaattttactcaaatttttgtttggtgaaggacaaggtaacaaagaaggtgctgcttcacggagtgcttaaggacggattgtatcaattggattcaccctacaccaaatcaaatctttcacactagaagtccaaccttatttcagcctttaccattccagtcaattcaaatgtaactcagcctcaggctgatagctttttaatttccccaatagatgtgtcgcataggagattaggtcgcccctcaatcaaggttttaaaccatgttctagagtctgttgatgtaagtgtgtcaaaaaatgaaatgaaaaccttttgcgatgcttgtcaatatggtaaagcacatgctcttcctttccgttcatctaatactcgtgttaaatctgtgttggatcttatccataccgagttatggggccctgcacccattgcttctaacataaatcaccactattacatccactctgtggatgattatagtcgttatacctggctgtatcctctcaaactaaagtctgatgcccttcctgcattcatacaatttaaggctttagttgagaaccaatttgacaagaaaataaaaaggcttagatcagactctgggggtgaatacaagccttttattgatctggtgcagactcacagcattgagttccagcacccctgtccacacacctctgcccaaaatggacgtgttgaacgcaagcaccgtcacattgttgagatgggacttaccttgctcgcacaagcaagtatgcccctcaaatattggtgtgatgcatttcacacttcagtctatttaatcaataggcttcccacacctttactgcaccagaaatcaccctgtgaaattctgtttgctcgaaaacccgattatgcctttctgaaaacttttggtgcagcgtgttttctgtgacttcgtccttactaatcccacaagttctagttccactctatcaaatgcgtcaatctcggttatagtgactcctataaaggctataaatgtcttagttctactggccgcatctacatctcttgcgatgtagttttcaacgaattagagtttcccttcaaaaccggttttctgaacaattataccactccacaacctgtcataattcactccacttcctggtccacccttcccactcattaccccactccatcgtccacacaagttgactcttctcccactgatacatcacctaaagcctctcctgtagcattatctagcagcccccgtgctcgcccttcagttgttaattttgactcacctagttctgtttcaggtcctgacagggacaatgatctatatgcccatgacctgcaacatgaacacaatctgcaacaaccagtttcggcttgtgttgagcctactggtactgaaactggttaagatgtacctgctgaacccaatgttcctttaccttcacaccctatgattaccagaggtaaagccggtatattcaagcctcgaacttttatgagtcaaatacaatctgaatctgccattatagaaccggttagtgttgctgaagctataaaacatccaggctggtttaaagcaatgaatgtggagttctatgctctaaaatccaaaggaacatggattcttgtacctccttcagatgcatacaacttagttggaaataaatgggtgtatagaatcaagttgaatgttgatggtactgtaaatcgtctcaaagccagacttgttgctaagggattccatcaaaggcctggaatcaattacgatgagacttttagcctcgttatcaaggctgctactgtgcgaattattttgactattgttgtatctaaaggatgggaaattaggcaacttgacataaacaacgctttcctaaacggtgaattggaagaagaagtttacatggttcaaccgcaaggttttgaagagaaagggaaggaaaattttgtctgtaagctgaaaaagtcaattatggcttgaaacaagctccaagagcttggtttgacaaactgaaagagactttgacagcttggaatttccacaattcaaagggccgacacatcattgttcttctacaaagatgcaaaggtaattatacttgccttaatctatgtcgatgacattattattacgggaaatgacaaaagcaagctgcacaatttcattactgaactgaacaataagttcaccttgaaatatattggacctctgcaatacttacttggtattgaagcttaccgtgatgcatcaggtctttacttgacacaaactagatacatagaagatatcttgagcagagttaatatgtccaagataaagacttgtccaacaccaatgactgttggcaaacctttgtcactcactgatgggaagcaaatggaaaatcctactctttataggagcaccattggtgcactccagtatttgtgtcacacacaacctgatattgcatacgctgtgaacgaattgagtcaattcttataaactccaactgacattcactagagtggagtgaaacgcgtgctacgatacttgcagagtaccaaaacaaagggtcttcacatcagctgtagtgacagacttagcatcactggttttttagatgccgactgggcctgctgtcctgatgacagaaggtctattgcaggttattgtgtttatttgggtgacactcttgtgtaatggtcatccaagaagcaagccattgtttcaagatcgagcactgaatcagaatatcgtgccttagctcatgtagctgctgaaatatcatgggttgagtcattgctgaatgaacttcagtttcctttcccaagtccatttgtgacatggtgtgacaacctcagtgccagtgctcttgcagcgaatcccgtcttccatgctcgaactaaacacatcgaaattgacgcgcactatgttcgtgataaagtactgcagaaaattcgatacattccctcacatgatcagattgtcgactgcttgactaaaggcttatctccttctcgtttttccttccttgttgacaaactcggcgtgagaaactcaccttttcatttgagaggggatgtcaaggaatagcaattcagcattcagtatttctacaccagcaatatacattgcagcctacgattctgtggtcccctgtttctaacagaattagtgtattttaaattgtgtaatttgtcttgtgtgaattatgttatgcctagtcattgtgtaatgattggggaatatttagggtgaatattctagtcctttgctcatgtaatcactgccaggtgtcatgcctaacggctgctttgtattctgaatatttctataaataaactgctctggctcatactaaaaatgagctgagattcataatttaccttctccttaaaatccaaattatcactaatgtctaataggtttctatgtgaattcccataaaaaaatatatattttaaaatataaaaataataaaaaaaaaactcaacaaaaaagaacaaaaaatcttttaaacaaatgaggaaagaaatcatttgtccccaatttcctatcccattcctgtccctccaattattaactgccacctaatttttttttccacatcatttgcttacttttttctaaacgtttgctctattaattagttccgtttatttcttaatcttcccacccacaaccttttcttcattaattacaatattttatggtttaaaaaaaaaatatttacaatatatcttcacaaaattcaaaatcgtttcaacttcccttatttatatcctacactcttaagcaaccctcaatatataataactaatatttaacacataattatataattatgcgaaactcaattgtgtgagctacccaaattaatatgcaacattcttaaaaaaaaaaataaaaaactatcaaaaatatcaataatttgtatctaaagttaaatatatatatata

SEQ ID NO: 70878 - DNA, 1146 bp, Cannabis sativa
  modified_base (530)..(560): a, c, t, g, unknown or other
tttttttttttttttttcagaattttcaccgcataagttacaattataatttttttacttattagtgtacattgttttgtagttattaggatgttttttaaaagaacttgaattaacttacaatactgaaaacatattcaaatgatttataataggtatttctctattttatgatacacactagtgtcaaagaaattgtttgaacattatttttttaatatataaattattaaaatttatatgataaataactataatttgtattatcatatcatataaaagaatgtgtaaaggtacactaatacatttttagtttttaatttctttggtgcatcctagatgccccattaatatttgctgccctactatatcatagaggtatttattttaacattttttccacattttaataaatataacataatttagacaattaatattagagcaaggtttgatgtagtgttctaattcaaaactgccatttccacccaccgaaaaaagagaaagataataacaataataataataannnnnnnnnnnnnnnnnnnnnnnnnnnnnnnaataataaataaaaaaaaaaagaaaagaaaaaagaaaggcaatcaactaaaatgtgcggtatatgtatgtgttagtccatctacatggactctagtggaaagctaaaatataacatttatattatttttttaatattttatatattaaaataataataaaattgataataaggttattaatttttattttttaaataaaattattaattttatattaaatattaaaattatgtattagagcataatattataatttaataaaaatttatcacaaacttattttttttttatcaaatatagtataatttttatatttttcattaaaaataagtatataatgtggtttaaatttgacacatattaaaaattgtgtcaaattgtcaaatttaatacaaaatataatatgagtaaaattttacactacataaatattatttttttattttttttttgccattcattaatataattaataagtttttatatttttatttatatatttaatttaatttttatatacttttcatatttttttctatatatttgtattgatgttttacagttttttattaaaataaaatttatt

SEQ ID NO: 70879 - DNA, 821 bp, Cannabis sativa
atcatagtaaaatattcccaacatgaggttctatttaacctgaaaccagattatcttacacttaaaacctttggttgcagctgtttttccaatattagaccttacaataagcataaacttgagttcaagtctactccttgtacttttgttggctatagccttaatcataaaggctataagtgtcttgatgcatcagggagattgtatatctaaagagatgttgtattttatgagcattcctttccttatgctcaatctgctgtcccaagcatcactatgccaacccctgacacatgtattacttctggtcacatacctggtcctagtcatcttgtctctccacctggttttccaagccatcctccacctagacctacaattcccaatgcaactccccaacaatttctagacacacctgcatccctactttccacacctcaaccaaatcaagcaattgcagctgaaagtggcaccactcagcaaaaatctgaagagactgctgctgatattagcaccaatgagccatctctccatatcaatactcctgttgaggatttcactcattctacaaccacggtacccattcctaaagaggacattcatgtctctcaacccattcctagtgttcctaacagtgttcctgttaatcctattcccaattccaacaacactcaccctatggaaaccagattcaaatctgttatctccaagccaaaaacttacatggtgagtagagaaccacttacactgaaagaagccttacaacaaaagcactggaataatactatgggtactgagattgttgttaggttttatgccct

SEQ ID NO: 70880 - DNA, 1846 bp, Cannabis sativa
tgtaactctattttgccgcttaggtcggctagtgaaaagacttacaatattttgtaagatatttttgggatcccgaaacttgtcacttttgattgtaaaggttaatgctattacaagttttattttcattctattttagtttaaagtttaatttttccacgcttatctttctagtaatcctggattaggggattagtgtttcttaaatagctagggtaacgtgcctaattgttagggcgttacattgtgaattggaattttttggctgatcttctaaaagggttatgttttccccaaaagtttgtatgttgggtattggtttgcttaagtggtacttcttactcgctaatgttgaatgggagattctatgactctttcaaagaacaaagaggtctgcctcttgtgcttagagctttgggttccatcctatgtgtaaatctctagagatggtcaatctttgtttcgcaaatagtcttattatattttgcaaagacaatgccaaatctttgagtttagttcatgaggccttcatggagttttgcgctacagctggcttgttgactaactatggaaggtcttccatttactttggtgtggcatcaatgatgattgtaagaaagagcttttgagtatttcaaagatgacaattggaactttccctttgcaatatttggtagttcatcttcaccctaaatggaaagaaactgactatgaggggatcttagagaagattagaaggaagttacatgactggtctagctgtcacctatcttttactggttgatctcaacttatccactctatgcattaaaaaaattacttatgccatcaatgaactttatcgtaatttcctttgggacagtaatgggaatgacaataagttgcatttaagttcttaggaacattttacttaaggactatggtggtttggctttcgtgaaagaaaaaagtagaacataactttgatgtctaaatatatatgggccatcttgattaagtaagattgcttatgggttcggtggatttaatgcactttatctaaaggatagtgacttctggatgataactccaatccatgatgcaatatggtactttaagaaacatttcaaacttatactttacatcgacaaggagactatgattaaggcgggtgattgagaaaatacaaagttgaaaagttctattactctctaatttgcaaatataaggtgaattattattaaattgtttggcataaacttaatattccataacacaagcttattctctaggaagccttgaatagtggtaggctagttttaggtgcattttataaagtattttagaggtgtgtttcaattttatattcattttgtataaaattatgcttattttctatttattttatatttaaatggtaaaattcataaattatgaattgaaaataagaagaaacatgttaaatgagatgaatataatgaattatcatagaatttggagttctagggtatgagtggcaaaaaattctaagttttggatgctcaacatgctctttttgtgatcgaaaattaagtctaaagcttcaagagaattttcgactatgatctctcttttatcttttcaaaacatctagaatcgtctaattctaagcaatattgaaagaattatggccaaagcattatcagtcgttgtactaggacgatcgctgccgaaaattgtgcttcaaggaccgcgacactagtgtcgcagctcgcctcttttaaacggcaaaaaataggttttttttttatcattttttagctatataaatgcctcttttcaacaatttttaggagacaacttcgggagacaaaaattagaggtagaa

SEQ ID NO: 70881 - DNA, 669 bp, Cannabis sativa
ttcgtcaggcagttgaatacttatgtgagtatcgcttcttttttgtttaaatcatgagttcaattatattttcttttcttttattttcgactcgactgtggctttccgagttttgtttttgtttttgggggtatgtttcctttgaaatctttgatttatagagctagtttgggcttttgcggttgttttagtgtaaggattttctgatccgtgggagtggatagatttttggtaactttttcttcctccttttgagaagtaaaaattataggtcggcactgtaggggacattttttagtgaattgtttataggattaaggttattttgattggagttgagatgatgtagttgtgtaatataaagtatatgtatatggtctgccttggcgaattgtttcaaaagcttttgatgatattattatccggtattgacctttgggtgtatgtttttgcatatctttgtctctctggtgccagctattacggttttaccaagccaactgcttgatcattttacacattgatctggtttaaaagttttgattcttgttaagaatatttgccattggaggatttatattatttgacttgatacagaattttataatcaaggttgtctcgacactgactcttacagaatcacagatgacagctttcaagtaaggatcc

SEQ ID NO: 70882 - DNA, 2035 bp, Cannabis sativa
tatgataaaaacaaaaacaatataagataaacaaacttgattcatcttatgagtattatcttaacaactttgagtaataaaacaaatataaaaatgacttcaatatttttcacaatagtcactaattaataattaatttttttaagctactttagatcgacacattggacaaaatctactgatttgtaaccacttcacaatacattcttcatgatatttgtgttcgcaagataacttaataacttccaaaccaactgacatatcctccaaacaaatcgaacatataaattcttgattatccttaataatatatttctctaatctctcaatcgactccttacttgctgccatggaattaatacgaatattattcatatcatgtacaagaccgtcaacatcactatcatcatcctcgtcgtcgtcattattatattctgaggttaagaactcaggagtctaaaaaagtaaaattaaaaataaaagagatcaaaatattatttaaagaaagttatcaaaaaatctacgtatttattttttaaaatataataataaaattgtatgaggtcttacctgatcgattctgtatctattatattcttcatcattgtaattaaaagtcacccgaggagtaggtagttcatcgacaaaaacatcaatatcgactctcacactcaaataattatcatcccattctgttcttagtctgtaattgataatttcatctattagaaaaaatgtggaagaaggaagacgaagcgtatatgcaaacgaattttttagcgtagctatagcgtgagtgttgttattatctgtgaacacttcaaaataaataagtgagacaacatctgttaaagttatagaagtttgcaaattatcttcatcatcctctaaaaaagtaaattctcttgtgaaatttgcaaataagtgaatttcaaatataaagatttcatctgttagtctactactactacattcatatggtgatatattaatatgtggaccatgtataacttgaggaatagccatatgagacaagttagtgacaaaaaagagtgactaacagaagaaaaaatatagagaaatgaataatttggatttccatcgagtatttgcatatatatatatatatatactaattagtactaattcaattactattaggaaatgaataaacttcattaaatacaattaaattgaattaaatttaaatttatataaaaaaagatatttgaagaagcttttgccgcgtttagattttatggtctgaattaatgggccgttattgtgattaatgggcttgggaatgggtcaaaacttcggtccaagcttttagcgtgatgtagttgaaacgatgccgtttcttgcgctataagaaatttcattagcttattttatattgatatataaatataaatttgataaattgttcaaacttggtttcgtggtgtagttggttatcacgtcagtctaacacactgaaggtctccggttcgaacccgggcgaagccattctatgtctttttacattattattatttttggcatagaacttaatatactattatggaaaataattataaaaatatgtattcttttttggaaaaaaattaatgttcattagtaataataataataaaaacttagacgtcattactaataatatttgtttgaatagttgaaatttcaaccatactaattaagtttagaatacatgtccaattatttatattatgagccctaaaattataaagtttaaaaataaataaaaaaattataagtcaaaaagaaattagagagtttattacattgatgcacatagttatcaatattccagttggaacaagtttatttcaaaattttgatgaccatttcagaattactttcaattaacacaaaatggtgctttcaaaaaaccgtcgtctctagggtaagaatacaagtcgtgacttcaccaatcagagaaggtgaacctatcgataactactcataaaactattcttaaatgatttcaagccaacaccaccacacacgagtg

SEQ ID NO: 70883 - DNA, 1768 bp, Cannabis sativa
  modified_base (174)..(180): a, c, t, g, unknown or other
actaatctttaataagttgtacatcttaatcattcgaaaaaattggttttctcatttttgcacttcaaaataattttctttgtatttttacgaaattttagataaaaacccttattgcaactggcgctgcaacctaaattgcaacaaaaaattgtatagaaacccctattgcannnnnnnctgcaaccactttagaaactcaaaaataaatttgaaaaaaaaaaagttaaaaaaaataataatataggttaatttccctagaaaaaactaacttatatcttacactcgaatataatatacaactaatttgttatgtaacaggtttcagcagccttcaaagaatagccatagggctagttctctcaaccataggaatggcggcggccacactctcagagatgaaacggttatcagtggctaaaaccgatggcggcggtggaggagatcttcccattagcgtgttcatcttaatccctcagtttttccttgtggggtcaggagaggcattcatatacacaggccaactagacttcttcataacacaatctcccaaaggcatgaaaaccatgagtactggcctcttccttacaaccctttccctcggtttctttgtcagcagcttcttggtttcggtggtcaaaaaagtcaccggaaccaacggtagccaagggtggcttgccgataacataaacgacggtagacttgacttgttttatggtcttttgacaatcttgggtgtcgtaaattttgttgcttatttgatttgtgcaaagtggtacaaacctagtagtaagggtaataataaacaggctcagatgtctgctatgaatgggagtggtagtgttgataattgctagctaattatgatgatgacgaagaagattactataggtatgttcgagtagttctgtttaattaattaattatgtactaagttattcagggcttttgtttttattagcctagtggttattatcatgtttgtacaaataatcaatgtttgggtgtgatgttttcttatcatctgatcatcaattgatgcgtatgtacctttcttaaattgctctacaatgaaattatagttagtttttttttttttgttctagtcaatttgcaattaatgctataattccaattaataatagtgtaattgactcaagtagttggttgcgagtgtgaaaattaaaaaatattagttgaaaaaattgaagcaagaccctatacattcattgtaagcatgctcctctttcgatattcttatttattaagaaaaatgaaagaaataaattagattccaataagatattaatattaattaaattatagggatatcattaattattattttatttatttatttatttttttcttgataaaccaaggaagtttatatttgaacaaacaatttacaacctatccggcacttgtataacaaaacaagcctgctcctctatttacaaagattcataccattctctttatttttgacttaatttcttaggaaaaaacaatcctcatctattctttacatctttaattctttgtacaagagtcattatgtaagacttttcccattctataaaatgccatttgtatttttccacaatctatatatcatagcagccatcactgctgtaaaattttgttagcgaaacctgctcaatcgttttttttttttttgataaatcagcaagtttattgacaaaattgtggaataatcaagtagaaaacattgatgtaattatacagaaagttaaacatagtgtta

SEQ ID NO: 70884 - DNA, 1054 bp, Cannabis sativa
  modified_base (60)..(73): a, c, t, g, unknown or other
ttgatttgagccattggattaaatcaatggctataaattactatccctattgataggtannnnnnnnnnnnnntattgtattagctcccatatatattataagtatataaacatagatctaaataatgatctttgtggtgattttgggtaatgatctttcaagaatacaagacttaaaggttctttagttttttctcttaatgggagcaaatgagaatagagttgttctagtttcttagggaccactaccagggtcggccctaggcataggggggctaggctcgcgcctagggccaattcattttaggagcccaaacaaaaaaagttaccttttaaaaaaatatatatttttttaataacttaaaaatactattttagagaaatttacactcaaacacgtaattttaaaattaatattacaactaccggtaaactacttaattgtgaaaaaatataacgatggtctttttttttggaaactgtgtaaagtatatgttgactattatacattgcctaaactaattactattatttttgtttgaaccataatataattaatttattctcttttactttttttttaatcttaaaagtttaaattttttttataatcatattgataatcatttgaacttaaaaattataccattataatctactctctttaaggtgatcatttcaacatgtagaaagcatatatttttttatcgtcaccaaaaaaataataaattttttaagtaactcttaagtttcttttatatttagttaacaaaataattaaaatattaaattttattaaatttaatatatcaactaattttattggatttgtaattaatattttgttattttatatttaaaagtaccaaattgtattctacataaatttattttgttaaacaagtttgttaagttactaaaataaattataaaaaaaccaactttattgattactttaaaaaaaattattatttttttaatataaaagttaccaaatgatatacttagaataaatctatataatagatatattttgatatgtttcaaaaaaaaa

SEQ ID NO: 70885 - DNA, 1578 bp, Cannabis sativa
cttacagatcgagcttccaaaaggaggccattgtgattccgagcaatgtaaccaaagccaaatttttgttgagtttggaagatagctccatcgacatttaccttaaccatatcaacacttggtttacgccataaattactaattgcagattcacccgtggcatacaaagcagcaggggtctgaaatttagcaactttccaactgttaaggacttgttttgccgactgaactacttgtaaaacagatctggttttgtgttgccattgcacttcgttccttgtcttccaaatgctccaactgagcatggcagcctcgacaacaacatcagtcgagctgttctccaacagatcaaaaaaccagcaagagaactcagtgaacacactagtcggctgtgttgcagctgagaaaaaccagcaacctttcgaaaaattgcagcccaaaagaacatgaaaaatagtctcaacctccaaattacacaagggacacataagatcaacattcacatgctttgtttgaagttgtaccttagttgggagacaacccgaacaagctttccataagaaatgatgaactttgggaggaactgaaatctgccacaattttttccagccactatcatcttgtgtaaaaagccaatttccacttgaagattgaaggaacttgtacgcactcttgactgaataaaatcccgaggtttccatattccaacaccaactatccacaaagttggagctacttaactgaatatttttgatcaagctaatatccctctcctcaaacatgtcatttaaaatttccatatcccaagacctctccccaacattcagcaggttagacacatgcttatcaacaagcccaggatgtgttgtagcaacatatgggttcgtatcatggggcaaccaaggatctttgagaatactaattgaggaaccatcagcaactgaccttcttgcaccctttcgaactaaatcttgagcagcccatatacttcgccaaataaaactaggattctttcctaactcagcatcaagataggaaccatgaggaaaatacctagccttatagatttgaccaacaagagtgtctcccatcgtgagcaaacgccatccttgttttcctagaaaagacaagttgtagtccctaaggtctcgaaacccaaggccaccaaaattcttatgttgacaaagacgtttccaactcacccaactcactcccttacttgagtttgattgtgatttccaccaaaaccgcgccatcatactctcaagacttgaacaaatctcttgggtcaaaagaaaaacactcatagcatagcttggcaatgcttgagctaccgactttatcaatacttctttcccagctttggacaagaactttgtttcccaactaaagatctttttcctcatcttatccttcaaaaagccaagaattgcattcttattcctccccattatgcaaggcaaacccaaatagaaactatcattcgaagctgcactaaggcccataacaccacatacccgatcacgaatagcctcataagtgtttttgctaaagaagactgatgacttagcaaagttg

SEQ ID NO: 70886 - DNA, 2543 bp, Cannabis sativa
aaacaacttatttcatgagcctataaattcaaccctaattttgaccttcgtttgggtttgggatcggatccgagatttgagattgggttcgggatcagatccgagatttgagattgggttcgagtttcggtccggagtttgggactaggtcggggtcagggtctggtccgagtctagggccgaattcaggtttgggtcaagatccagggctggggctgcattcgaggtccggggccggattatttcggttcgggtcctagttcagaaatggagtcggggtctccaatcccgaaccctttataaatattataatacaaagctaataagaatcatttattcatattgtattaaaatttatggtcgtaataatcattaaaacaatacaatattttattcaaaataatacgattcttatatagcgtactaaaagagcccataatgtactactttaatggtatttacggtgcactttctaaaactaggagtatctatgcaactttttcgtgtttctgatatttgatttataatcttaattttttatatgatgtgtatattatagttatttaatatatatatatatatatatatcttgtaaagttttaaaaaattcataaaatgtgcaataagaaattaggatttaaactgtctatttcacacgggtataaaataaaagagacacatgtataatatactgtttgaacattatcttcaacgcgttaaattattctaaattcctttaaaaaattataaaatttcttaaataactataatgtatgcattttcatattaaaaaattaaaattaaaattattttaacctggaaaacaagaaaaaaaaacatatactagatatgtaccttaatatcgattaaggaaggtagcggagagttgataacaacagcatgaacaggaatttttttttttttttctttttgagaatgtgaagtggattttgttcgttatatattatttatattcttttaatgtgctaaaaaatataaataatatataatgaacaaataaataatcaagaaacggatataataagcatatacttttgtaagttatttctctaggaattattagacgttcaataatcaaattaaggtagtgttataaattggtgttccatttatattttttttatgtttttttatatataaatcatgtcctgttaataatttcgaggaattaatccaacacgattagtacgctcagtatttttatgttgcactcagatttgtattgtcttttacgtagacatacatttttttagccatatcaagcccttttcatatttggagtcaaattcatgttttacttttctacatttttttacaattaatgtgctagttactagctatatgtatttttttatattatttttcaactatgttttataaacaattgtgttaaaaaattattaaaatttaaaaacttacttataaattcttaaaatttaattagttacaccttacaaataaatcaatatataattataatattcactattatatttaagttttattattattttacttatttataattgacaaacatacattttttttattattataattattacaataatgtgtaatgtaataacgtgttgtgtcgatactttttgtgtgtaatgtcttttaaattagtctattcgtgcttatatattgtgttatgttgtgtcaaatatttataccatcgtgttatgatgcgctcaagtctataattttttcatgtcatattcgtgtcatgtcataaaaaccccactttatatttacaattagaaattacttatactgttgttattttgagtgtgtgagaggagagttagttagctggacatgtgagctaaactaacttatttaaatacatgatttctcttgtattatgtaacaattataagagagaaaagaagtaagttatagagaaagaaagacagagagatagagagtccaagaacagaagaagataaaagatgaactatggtgtaatatttcgataagcttaataataaataattaggatttatatttatattatgggttaattaggtaataagtgagattatgatcctactaatctattttagcataaaatttaaattttgctataagtgagtaaaaagcataatttataaattacggagatttatatagtatgtgagaatgtaatatgagttatatgtagaattaaaatatttttaggtttggcgatcctgaagaattgataagtggataaataagcgtaatttgttaattacagagatttatttgaagtacgtggatacaataagagttatttgtgaaataaaaatatttttaggtttgatgactttagagatccgattggaggctaaaaatgtcataacaattttaattaaaaatgttaatgcgattattgagatcagtaaacataaacgaaacgaatgaacaaaattcttcttctccgtcttttgacaaaaccttctccttttatatttatttttttgtaattttcaaccaaaacctagcaatctaagctccggtagtagcaggatagcaaa

SEQ ID NO: 70887 - DNA, 1255 bp, Cannabis sativa
tacacactttagtgtcacttataatgtctaattgatttttacaactttttagtttacgcataccatatttaacttattttacaaaaaaataaagttgcaaaatattaactaaatttcatctagggtagtattcattcactaaaagtagtatgccctatgtaatgtaatgtgtgaagtttttttattttttttaatgaaatgaactattgccatggatattttagtttgagataaaacaagaaagaaaatgatatgggcttacagagagggcaattgggccagcatgacaagtgagctcttgtttgacaggcccagcagctctgaactcgatactgggcgtgataatccagaacccaacaggagactcatcagtactaatccaaccatggaccctgttgtccttgctttcagacgaatattggtacttgtcgtccacctgttgaatagaagaaaaaaaaatatatttttggtatgaaaacatgaatgaatggaataaaaaattgagaaagagtaaaacttggggcgaataattcaacaaagaccaacattgttttgacttatgacaacatataaaaatcatatctattggagggtaccagttcattgagagagttttttgtttttttgggagagtttgtttctggaataaattgactaggaaaatgttgaaaagaaagggtaaatagataaagtaatggagaaattacaaccatataaatgttttgaattgtagtgtgcttcacatgaatgtatggattgtaaatgtttatcctctaaattaatgaataaaattattatgaacacttatttaagaactagatatatagagagtttgtaattttatttgaaatatagcaaaacgatggttggtttgaaaacaaatttctcattattctttatgtatacaggtaataaattataataatcatgaataagaaaccaaatcaaaatttcataataataagattagttataatttttatcccctaaattttaacacgtaccaaatcatatttactgaatttttatggtcgttaaaaatactccataaactattgagattgttagatttaaggactttttgtccagttttagtaaaaaagtctaacatggatgaaagtttggggatatgatttagtacatgtcaaagttcaaggggtatgatttactagatatcaaaatttagggagcatgatttagtaaataaacaatcactgaaatagtaaaattgaatgaaattagacaaagtccttaa

SEQ ID NO: 70888 - DNA, 1008 bp, Cannabis sativa
ggtagtgtgaacagttttcacaaccccctcttggaccttttccctcgcgagatggcaatcgatttctatgtgtttagttctctcgtgaaagacaggattacaatcaatttgttgggctgctttattgtcacaatgtcacaaggcaggtccaatgtgatcaatgcttaattctttcaacagagatgtcaaccatataagcttgcatgtggtatttgacactactctgtattcaacttcagctgaagaccttgagatagtatgttgctattttacttttccatgacactaaagatctcccaaggaatacacaaaacccagttgtggaccttcttgtgtcaacagatgctgcccaatcagcattggtgtaggccacaagttggattttcgaatcaaatgggtagaagagcccttgtccaggtgtccttttgatgtattgtaaggctcttaatgttgcatccatgtgattagttctaggactaacaaagaattggcttaatttgttcactgtgtaagcaaggtcaggcctagttatagtgagctattggagctttccaataattatcctatagagtttaggatcaacaagtttttcctctccatcttggcttagctttagattaacttccatgggagtattagcaacctttgcatcccaattgtcctaagtcttcaagaagttgaagagcatagtgtctttgggataaaaatattccttgattggttctagcaatttcaatgctaagaaaatatctcaattcaccaaggtcctttagcttgaatctcttattcaagatttcttttaaattctttactgttgttatattgttacttgccaagatgacatcatcaacataaacaagaagaatgatgatgcttgattctttcctttgaatgaacaaggaatggtttgatgctgaatgcttgaaaccttattaaatcaaggctgtagagaacttttcaaaccattgtctaaaggcttgatttagaccataaagggatttctttaac

SEQ ID NO: 70889 - DNA, 1074 bp, Cannabis sativa
  modified_base (211)..(218): a, c, t, g, unknown or other
  modified_base (1014)..(1025): a, c, t, g, unknown or other
ggcctcgtctttcaagcataatactggggaacagatctagtcgtggtgcccaagggtagctccacgttggccattccttaagtacgacgggccaatggaggttcctccatgggtggcagaggttgatcattaagaacaactgggttggtatagtgtccacctaattgggattttatgcctcaaataaaactcatttcaatataatcttatnnnnnnnnaatagaagattagaaatcatttatattattcatgtttattgtttgatatacaatttctattgaatccaaaatatatagtaattcacatttacagtgatgtctcaattggattagttgttgcgaagtgagcaattgttcacgccagaagttcacatgcttgtttttaaggcttgtttgtacacaatttggaaagggaggaataaacctttgtggaatattattaattgtacaaaacagattattgtgagaaggattcgaaacttacatgaaagtcatataggaagagagaggatattgtttgggtaaacaaaatatgtaatacctgtaattagattgattgattcaaggtgtaaggttgtaaagtttgttcagaaatgaatacaaataacttatttatccaattagaaaaaaaaaattatgtgagatgaaagtataaaacatataaatttatgtacatatgatattaatattatatatgttttaatggtggaaataaaacattaaaaaaattaacttataaaatattgaggatgccaaatgacgtcatcctccgtcgtcatatatattaaatcataataatattgtaattttaccaaattatggtcacctttcttactcataggcccgtgattgacgttcagcagaaaagactcaaccacaaaaaataatatagttagtctctattgatagaaggtcaagccgcctgtgaataatattttttcttaaaaaagataaaataaagggtacataaaataagaaactattgtgaatattatctcacataaaataaatggtnnnnnnnnnnnngagagaatgttgtggacattatccgacatagaataaatggtagagaatt

SEQ ID NO: 70890 - DNA, 1054 bp, Cannabis sativa
acttgagaatgtggatttgtgtgtcggaaccttttgatgagatgaagattatgaaagagattcttgaatttctcaaagtttatgatgcacaaaacataactcagttggaacttttgacggaactcattgctgatgctttaaaggggaaggtgtttcttttagtgttagatgatgtttggacaacaaattatcaaaagtgggagcatataaagtggtgtcttaaaagtggggatccaagaagtagaattttgatcacaacacgtaaggaggaggttgctcaaatgatgggagcagaggaaagaatgatcagacttatggtgttaaccaaagaggtatgttggtctatattcagtaagatagctttcttcaatagagaacaaaatagccaattagaaagaattgggagggaacttgttcacaagtgtcaaggtttgccacttgctgctaagacactaggaagtttgatgcgtttgaaaagacatgtgcatcaatggaattatattttgaatagtgctctgtggaatattgaagatgttcaggttaatgtttttgttccattcatgttgagctaccatgatctgcctccccttgaaaaagtttgtttgttatattgttgtgttttccccaaagatcatgtgattgatagagatgaattgattacaatgtggctttcacaagatttcttttccccaagcaaaaatcttgaacaacaagatttaagttgcatagagcaatggtttgagctgcaggctaaagattgtttcaagaacttagcagcacggtcgtttttccaagacttcaaaaaggataacgatgggagaatcgaaaaatgcaagatgcacgatctcatacacgacttccttcaatatcttacaaccaaagagtattttatggtggacacttacagcaataatcaaggcagggaaggtactgttagtactactgtcaaccaagctaatgaaaaggctcgtcatgctacattattgctcgaatctgatagtcaaattcccgaatcagtgaacatgaaaaggcatctgcgtacgctctttattac

SEQ ID NO: 70891 - DNA, 3194 bp, Cannabis sativa
ttgtgcaaaagaagacattcccccatcaacacacatgaacgtcagtgcttatcttttcttactgctcgtgttgaccattagactgtatttattatggcttgatggttttaggaaaagaaatataccacattgtttaatcgactagtttccaaacttgtttgagcatacgcatatggaggatttcacatgttttagctgtagaatgtgattatatacattacttagcaatcttctttttctgtgtcagggtgttgcattgagaggactcttcattattgacaaggaaggcgtaattcaacactctacaattaacaatctcgccattggccgcagtgtcgatgagacaaagagaacgttgcaggtaatgcattcagagatctagtttctcctttttctatacatactatatataatatacttagagcagttgttatatatatatatatatatattctattgcttactcatgttgcttgaattcggtgtctgcaggccttgcagtatgtgcaggagaacccagatgaggtttgccctgctggatggaagcctggggagaagtccatgaagccagaccccaagggcagcaaagagtacttctcagccatataaagaggagtttttttacattattgcctgtttcatatgagtgtcattagaaaggtgtaatctaattttgtttgtcagatgtctttaagttaatttttgtgaattttgagtgaatttctcaaaataaatgcgatgaaatggcacttgtccagattttctgcatgcatcattgtagcactacacaaatgacaaaaacttaatatttatgttgaataagttcttgcatatatcaaatgcttttctatttttatttcttgtgaaattttcttctgaactcttaaaaaccaagttgggcagtaatcattttgcataatatttgaaattatattctaacatagaagaagctcacaccaattcgaaaagaaggaaaagagggtaagtaagaggcaccaactactgaaattagcataaagaaaacgaaagagtgataaatgaaaacataaacttcaaattctgtagcaacaaaatttatagccaagcaaaatcaaaagatggaaaacaattcaaaaactgtgcccattaaaagataaagaggtctttaaactcttatccattcctgtccacaacttttgatacacggattaaaggctcagacgatgggggtagaggtagtgattcatcttcgttcttggacaatcccatcagtggcacttagctgtagctctcatcaactcaacaaactccaaactctgaaaccggtcaagtgtggcctcctccagcaatggccgaagccgaggaagaggactagaatgccaccaccaccatcaacaacatgtcgtacaagagtgagacctgtatcagccgcagctcttccgcagcctcagcaaccactggacctgaccgaggacaacgtgaggcatgttctggccgaagcccgagtcgagctttcgcagctctttgacgattcagttggcattacaggtgaccctttttcttgtatgttacttttgtcaaatgccccaaaaaagaaagataagatttgctttggtggtttttgattatatgggttggtttttcagggcaagttgatctggctgaattggatggaccctttgtgaagattagtctcaagggtcggttttggcataaacgtagcactgttgttgctagactgggtaattatctcaagcagagaattcctgtgagttaattctactattaattcttttaaattttgatttttgtttatggaaagtgctgaattatgcgataatggcatctgggttttgttttgtttttgattttcaggaaatcttggaggtagatatagaagatgagaaacaattggatgacagtcccgcaagcttctgataagtacttcttttgccacagtttactgtaattcttttttaataaattttactttttcatgaactttcactattggaatttggaatgaatcatgttcatttttctctgttcttgctgttaaaattttgatagtaatggttgaaatagaaagtacgaaattaccaaagcactggaaaaatcatttgcatatttgcatatatataatatatatattatttcactcccataatctccagctcattgttatatgattaataagtgacatatttccaactagtggacatttattttagtgcaattgcaggacatagtaaacttttatatatgtaaggcatagacttgtaaacattactatcaatggaaatacaataacttattctttagaagcactctgtaagagctgaaatattcgattttgagctacagtttgctgtgaggggcgtgatcagaagctgaatcaatcctttttaactggttaggatgaatccaaaaaaaacatgaaataagtttcaacataatgaaacaggggacttaatagaaaatgtaatgtgctttatttaagagtatgcactccaacaaattccacctctgtatctcagcctcatgtactcgaagttgtccttatacacactactttatagtcttcagtgagaaaaaaaaagacaagtcattctctttgttgtgcttaattgcctttatctcgcttcctttccttgtaacattcctatttaaagctaaccagaaattcattctttcaagaattctacctaaagtcaagagccagaatctcagattgagctacttgcttcttgaaatgttatgtttcttttagcttctttgttttcatgacatatcagaattgagagttagtaatactaacaatctcacacaaggtgctgtttacaggctccttttgctgtttgggtgaatgttaatgtcgacgctgatattaatagtatttttgtactctgaacttttattttatcagaccgtacctctttgatcatcaccaaattttacctctttttattgaaaaatttaattaaacaaaaataaggactgtgctgcgtaatgcaagaggagatattctcgaggtcctctgctaacttctgaatgccacccttgaccctcacgtggttgaagctatgtggatgcttgagtatcgaaatctcgaagtggaatcggtttgtcaaagcttagtttaagcataagagccggatatgtctagcttaggagcttgtgttggaggatgttcattacacttgtagtgacctttt

SEQ ID NO: 70892 - DNA, 2384 bp, Cannabis sativa
gtagcttttggattcccaagtcacttcatttcactaataatgaatttcataagagccccaaagttttccctactcctcaatggatccatgtgtggattcttcaatgccaaaagaggattaagacaaggggatcctatgtccccattgctctttgtattaggcatggaatgcctatcaagaatacttaagaaagttggggaatggccaggttttaagttccatgacagatgctctagtctgaagttaaaccacctctgttttgctgatgacctcttaatattcagtattggggattttgtttccattatgttgatgcttaaaggactgaaattgttttctgcaacctctggtctccttcccaatgagcaaaaaactgctatttattgctcaggtatggcaaatggagatgttaacagaatacttgatgcatctaactttaagagaagttcctttcccttcaggtacttgggaatccctatatgttcaaagaagattagcaaggccgaatgccaggaacttcttgagaaaatggtgagcagaattcggtcttggagtacaagaaatatttcttatatgggaagagtaactctaataaatgttgtcttgatctctatccatacttattgggctcaaataatgatattgcctaagaagttacttaaggatatagaagccatatgtagatcctttttatggaaaggaatacaaggaggagcagggcctggtttaatagcatgggaagttgtttgcaattcaaagaactcggggggacttggcttcaggaatattcaacaatggaacatagcagctcttggcaggtacgtttgggacattgcaagtaagaaagactgtttatttgtgaggtggatacattcagtatacttgaaggatcaacaatggtgggagtatgatgctcctaatgattgcaactggtattggaagaaaattgttggagtgaagaaccgtttgaaggagaagctcgactctgctggttttttactgcagaagtatacaattcagtttggatacaatatgtttttcaccaacaatgagaaagttccttgacatagagatgtgtgggatagacttattattccaaaacacaagttcatactctggcttgttatgtggggcaggttgaacaccaaagaaaagcttgccaagtatgatatgaacatagatgagacttgtcttttttatgggaaggagaaggaatcgattaagcatctcttttttttttgcttgtgattatagtaggaagtgcttgcaagaagtaaaagcatggctgctatggagaaaaaaagctgattcaattcacaacctcttacaaaacatcaagaacagcaaaactttttcagcaactcgaagaagtatgctgaaagtagtactagctggactggtgtatcacatttgggaggcgaggaacgatgtcttgtggaatcaaaaggtgagacatatcacagcagtggcgaaacagttacaatgggagagcaaactcgggattatagaaacaatgcctaggaaaactaatgatgtagatagagaatggattggtaatatatgattccctgctgggaagtgtaatgctgtaatactgtaatggaattgcttacataggtgggaaaagggatgatttcggatgtaatcaagtaagttgtaaaaatgttgtaaatgttgctgagcaatacaagaaccttattcatcaaaaaaaaaaaaattaaaattacatttttcatcattagtactcgaaatatttttttgcccccactaaatgtaacgctcccgcttcaagcttccatgggcccttttctgagaaagcgtgcaagtgaagacaaagtacgttgaaaacattcagggtgggtgtgtaaggtcagtcatcactccatgaagtaaccaaagtggcgtatcatgtataagaaccatgattccatgagggaaggctatatggtggcttgaagtagggacgttacaatacaatgtatacatgaaaaaattctattcctccacgtaaataattattcaatttttttttaaaagagaattattaaagaagaaatattttttttttttcatttttttttctttctttcttatagatcagtacacatcagtgaatattgctccttttttttttctttctagtttttccaatttttaatctctcttcttcttcattcttcataccatcactatattatccaccgctagcaccaccgccaaagccatcactacccaccaccaccttcactgcaccctatgttttatatctattgacctcaaaatttagtcaactgatagcgaaattgtatttaatgctgatgcttggcacgtgttacacaataagaataaaaaattaaataagacacaagattttatggaggttc

SEQ ID NO: 70893 - DNA, 1793 bp, Cannabis sativa
  modified_base (36)..(55): a, c, t, g, unknown or other
agaagctcatgtttaggatgttaataacatacttgnnnnnnnnnnnnnnnnnnnntaaaataattccaacaccacgagcatacgaataggccagtcaacccgatgataactctattcaacaaagattcatttagctagaagacttgtttaggaaatactaggatggggaatatgggaaacttctaggatctgatttagatgacgacccagaacctttccattcaaaaatattgaatagccacatgtgataccttatgatgggacgatcgatccagtggctcatttagataatttcaacactataatacgagccaacaatgtgggattatgatgcattctatttccaaccctcacaagagctacgagtagctagtgtgacatttaccgaacattctattacctccagggaacagttatctcaggactttaagaaacaattttttattactagaaataggagacacaagtcatcatctttaactaacttaaaatagtaacctgattaatccttaaagtcctttttgagtcatttcaacactgctgcacccaaggttaaaaatttgaatgatagcaataaactaactgccatataagcaggaataacactaggaggtgagctcaggatgatatacaagggcacctagtaagatcaataaatgaattaaatgacaaggcatttatatacgtctgaaaggaagaagctcgatcaaaactaaagctgctaaaagatggctcagggaataaacctagctcgagcaagactggaacaaacgttgcaaacacaagcataagcaatgagccacatggaaaaagaaaagatgaatccaaggagtcatccaaggattaaaataagcataaaaaataggaggaatacataacaatctatactgtttacacagaattgaacgagacttgtgaaaacatatttctcataaattcaaatagggtcgcttttcgcaagtcagaacatatgagaaatgtgaggaacaaatgagatcaaaataagtattgcagattccacaaagatatcggccacacgagcgaggaatgttgacaactcaaagatgagattgaaagcctcatctctcgaggatactttagacagtacgtgagaaatgagggaaatgaacaaaatcaacccaataaataatccaaatcaaaacatctagccagcaccaattgatggtgaggatatcttagtaacttctagaaggccccatctagcaaaaataagaaatactgcccagaagcggtatatcaatcaagtgaaaaattgatccttagccttcacaactaaagtgccaaagcgagtaaaaactgaagagccaccaattattttcactaaagacaatgtgacacatgtgagatttccacatacagattggctcgtaataactattgaactggcaaataaaagggtaaagcgggtcttagttgacaatagaagcttggtaaatattctatacaaagaaaccctaaggaaaatgggattagaaaaaattcaactgaaaccatgcatggtcattatgcggattcacaagagacagtatcgcaagtctcgtaacagttgatctccctttgacaatgggggtctcgcaattatcaattacccaactacaagaatttctggtagtggatcgtccttcagtctacaatatgataatatgtcacccaacactaactggactatgggcagttagctcgataaaacgtttattgttgaaatttctcaaacaggaattagactgtgagaggagatcggttaatggcgagagagtgttacaacatagagt

SEQ ID NO: 70894 - DNA, 1208 bp, Cannabis sativa
tcaacctaaatacaattacaacaatcagaggcatcccacaagtgtagagatcatcaaatccaacaaaggaaacaaaacccagatgagcaatgttgaaattaacagacgagagataaagagaatcgatacctgaaagtgtggtgaccttgttatgtttgagaaagacaaaattgagatttggggttcggatcggaatggggaaaagagatgaattagattagctgaaggagttgttgaagaaggtctatatataaagattgagactttaattaaaagtcaggtcaaaattggccgccgttgattgggttaggtgtggatgtggtggtggtgagaacaaacccaataccatcatgattcatggttggtgaattttgctatatgtattagaataatatcacttttactttcattattgttattatttataataatactaataattgagaatgtgctcttcaattttatttatttatcattctttttttttttaaatgaatttatttatcattcaaaataaacttttcccatttttacaataaacaatatatttttaacaagtggtttaattattaagaaactttttttttaaaaaaaaaaacagaaaaaatccaactaacaagttaatcatgtatatatttatactaggttgatgtcactctgacgacttttccagcacaacagctactccgacgacttttttcagcaccaacagcaaacttaaaaaaaaatcgtcggaattggcattgttcccggaaacaactccgacgatcgctgtagttttatttttttttatttttttaaaaaaatatatgaaggaaaatttaatattttttatggtaatttaaagtgacatatctcatgtatgttaagtttttattttaaatgtcatatttttttcctattaagtttcctcaccatatatatttatgtaaactaactttattttttccatatatataaatatccctttatttttttaccagcaatcaagattcatgatgaagatgataattttttttactctctcaacataattgaatttcattcatgataaagaaaataaattaagtatgttaaagtgatttttaagtttttgtcaggatatgtatacaatatagttatttaatagattttgggctaattagtaatttttcctcctgaactttgacatgtactaaaacgtgtcccctgaacttttttggccgtta

SEQ ID NO: 70895 - DNA, 1529 bp, Cannabis sativa
aaggggttcatagaatgagcactaaagttttcatgatggatttgttttatattgttgtttccatattaattttggaattttggtaaatgcataattagttttataatctattgtttggttgttcttactgactcaactcaacatatatataaatttggtgcaacttctgcaagcaggaaagctagcacctttatctctcttggactcactctcggtcacggtgctacgactccaacaactttctcaacctttgaaagttgtaaaaaaactaagttgttgctctagtatgccatagaagtcaatttttgttgtaaagtgatttcatatatttttgggatttcttttttttttttttttgttagtttcgtcttctgcgaacaattacatttggatttctttatgcatgttgattctagttttatttccttctttcatctcatcctctctatatttctatcttgtctccttctgcttagccacttagcaagtggacgacgagtttctttgctgccgagcaagctcacgacggactttgtggctgcctcatgaccgtcttaaagtgttgagaggcttagagagaaatttgaaatgaaactttttttttacaaaaatttaaaataaatattgtttaaattttgacacaatatcaattttaattattttctttccatataataaatactttttcttgtcaagtatattaactcgataatgtaatatttaattactaataatatctttggagtgctatatattttaatacttttgtaaaaataataatagaaaaaataattgtatataaaaaattatgttaattttaccttaaaatactattgtacattatatattcaagtaatttgataaaaaaaaatatactaaatataataatttctccaattttttatcagttcatattttgaaataatactgtacattatatattagagagtaatttcataaaaaaatatactaaatatttactccaaaatattatattcttatgtgaaataaataaataaaataaactttacaaatttaaactaattcttaattatgaaaatattttgtttaccgagatttttagaaactgattatgtagaacttaagaaaataaaagatataaaacaacagataaatgaatttttacgtggttcaggcgttaatgatctttagtctacgagtcaatagtattagcctctttgggtaagtgtttagatattacaagtgtttacaataatgatctctctattcttcttgtttctcttggtgggagaaagctctataggaattttagtagagtgtttgtaaataaatttttttttacccattgctcaaagaaaatgggagtatttatagacacacatggggtaaaggacataccctttatccacctagggtttcatactctacacgctgccaatgtcggcattactataggaccatctaaccattggttggtaagaaccttcttcatcgtgtggcgtacaactacagtgagagattttatatacaaaccagaacacgtgtca

SEQ ID NO: 70896 - DNA, 1928 bp, Cannabis sativa
ttattttattttttaaaattaaatatatataatgacaattttgtcttttaaaatatgtcttatatcagcaagtgcaactcttgatcattggagaaaatttcaggataaaactattctatcatctttgtctcttgaaaacattgatgataaaatagagttttagataaaatcggacagtaataacattaagattgatactgccttatttgataagaaaacttctgatggatttgagattgtagctcgaaatagttcagatagacttctgaacatcagggtcgagtatcatggaagtctttatctagcgagagttattgaagccatgcatgggtataaaaggtcttagttgggccaatcacaagaagtgaaaaaatgtagagattgaaactgatagcatgttcatttgctcaccgttcaagcaattcgtagtgatcaacaaatgttctttgtttttggtttgattattaacgattgtaaagcgttacttttttatttacagaatattcaaatatgttttattagacgaccagcaaaccaagtatattatgtagctagacattctcggtatcattctggtcatagcattcttgagcataatgttccatctaatattcagactcttttgtattcaagatgctaaatttcaatgaagttgctattttattttcaaaaaaaaaaatcaaaaggctaatttagtcaatttaaggaatcctattacgttttctaataaagtaaacaagataaaatcgttatcattttaattccaaataattttagtaagggttattggcggccaaacccttttatattttgattttatacttaacctctttatatttttggtgacaaaacccttttatgtttatttttctttacaaatttgaggagttagttagatatcactgttatataccaactggattatcaatgtattggcttcgaggtttattaatgtcacgtatacacaagtatacacagtggtcatttaggtagtatttaacggtgatatttatctgacactttaaatttgcaaagaaaagtaaacttaaaggagttttgttacaaaaagaaaaataaaggattaagtgtataaaaattaaaacataattttcatcactaattactcttttagtagataacatattataaatattgattccgattattcttttattgtgttacattttttctttaacttaattctaaatagtatataaaaaaaaaagtgtcatgactttatataaatatgaacattgattcacattaaagaaaagaaaaaaaaaattgaaaacttattcaaggtgcactaaatgcccctttaatctctataagggcctcttcaaaaaaaaaaaaaaaatctctacaagggtcaacactaaattatgtcaaggatgaataacacctcattatttatctgcattaattatatgttaataaaaacaaatctatatttatatcattactcttatggtgtttttgcacctaattggaataactaataatatcctcaattgccttacaaaataaataaataatatcctcaattgaattcctagaaattaatgagaagtattttacaaagatttttttttttttttgagaacagtattttacaaagatttaaattaactatatctattttttttactcaatcaaaataaaaagaaaagttaatttatttaaaaattatatgtattttcaaatattcttttaatcaaaacaataactgaatgagtaaaaataatagttttttattttttttttttggttaacaaaccatttttttaattttttttttagttaattgaacaatcttaacccatataatgtaaaataaaaaaaaaataatttaataaaaaaattaaacataaaatctcaaaattttctattacttaaatacataaacaatacttaaaatacttaacaaa

SEQ ID NO: 70897 - DNA, 1108 bp, Cannabis sativa
ttttttttcttgttcgtcttctttcactcagtaatgagagctccacccgagtacccccacaagatctcaggacaccaccacaagatctcaggaccgagataggtcatccatggcctccactttggcctgtggtgaccagagcaaaagaaaactcagaaaataataaccaaaagaaaacccaaaaaataataacaataaaatttcaaacaccattcttgacaaatttcaaattcaaattaaaatttcaactcatatatatattattagttaaatatattatttttctcctctaccctctattccactaaagccaacacctttcgattgttgtttggctttagtaagctcctaggaccaagaaatgcatcttcttctattattgctttgaagcttcgtccatagggtccgactactcaatttgctcaactggagaacaagactcaaagagttaacttggtgaggagcgattatgtggcaacggacttcaaggaccgattgtgattgggcaagcttgtaaggctttaaaggaagagggttatgaagtgattttgattaattcgaaattcgattactattatgaccgatcctaacctttgcccagccagtagagtcatctccagccatggatcttcgaaaccattatccctacaaagatcccggaccaacgaaactccctaaagcctcgcctccctctctcgttctttctctttctcaagccatcctctctgtgtctacctctttccgttttccagatttgcagaagttcttcaacttgttaactcagatttgcaaagaagaatagagggaatgaggttgaagaagaagacaacgacgacgaaaagatatgctcctttaaagttgggcgaagaatcgtgtgagagagaggattcacatagagagaagaaactttagggtttgggattttaagggtggtgatcttgattatggacttagtttgagccagggatggccgaagatggtagcacattctgggcagaaggtttgcttgtgtccatttaaggaagaagacgaatcagaagtggaaaaaatacataaatcaatggcaatggttttgtgtatttttttttaattattattatttatttta

SEQ ID NO: 70898 - DNA, 854 bp, Cannabis sativa
ttaggaccaacgccaaagaaagggcgacttgagcaaagccacctacaggattatgaacgacggggactatgaagaagcctacactgtgccgagatatttagaggcgtattgttaggattccacgttgactttgtatgaacttagttggtggtctataaccaccagggcatcctcctttcataggctagtgctttgggaatgagatctacttctacataagtgttgcaagtcgaactatctgaaccagaggtggcttgaggagagtttatagttgattgtgatataattttgttgtggtgaagaagataaaacagaattaattaggatgagttgcattgcacctagtactggcataaccctaacatactatacttgtagtctgtattcatggttgttatcattgtttatctttcttttattttttgactgaagcatagaattctaatacatgtctttctgtggtttaatgcagacacaagatgttgcaagagattttggggcagtttgcacccctgaatttttcctgtttaaaaaggtgacctgagctgagatgcgaaaagtcaatttttcaagtgcacctcttagttttagcttatgaggaagattaatataaatataaattaataaagcattatatttcttggatttttagaataatttagttgttgtttttgtgttataaagacttggttggtaatgtatagaaatttctttacatgtttttgcatgcattttattaagtccatctataacaatagcatctaacaggatggtcggagaccatttgagcttgtgtatcatggacaatttgatgattccagaccaagtaatggtgttcctgtaactggaaggtt

SEQ ID NO: 70899 - DNA, 917 bp, Cannabis sativa
aggggaaaaaattaaaacacatagtaatcattttacttagtttttatttttgaaagtaaataaataacctttttttttttgctgctaaaaaagaagatatattaactaagcaaaaatgagcatggtagatagatacaaaggaacctaactccccaatacaagtcggttcaattttgttggttgaagcagtccaagaagcaagtctacgagccgcttcattcctagagcgaggaaccccaataaaaaagaaatcatagaaatcattaatagaagcaaaaaatttagcaaaagtagtaaacaatgcttgatggaattttttttaccagaattttaatttactactcactcatgtatgttaaattaattctaatctaacattctaaatatgaattttctaaaacaataataaacacataaaaagattaagaaatctttacagtggttgcagcgaaatatattgtttccttccattcagatccctagcccttgattcatgtctgtaacagaacattatcaagatttatacttggatattctcctccttcgattgtgttcatcatagtcttccaaaaatgtctgagtatcaccttgaatagtgtcagctaatatgcaaacacctatggaactatatttgagagagggaaagcaatgaattttgaaattacaaagaaataagagaagagagttgtgtgacatagaattaggttaggttggatctctcttctcatcactttctttatttacgcattcacttggagttaggttagatgaaatggactgaaatagaaaacttaggcttaaatcaactatagggccgaattatacaatgggccttagtgttaaattttaggaaatttacatggtatactaattttttttttacaaaaatactgtcaggtggtattttttactttttt

SEQ ID NO: 70900 - DNA, 1009 bp, Cannabis sativa
aatgaaaatgttctctgagaatgatacaaatgaattactactaaactttttcttcaatgaattgttttatttatgatttaatctctttatattaagatctgaaatccttgtctcattatacataccaagctggttaccaattctaactaagatttaatctctgtatattaaaatctagaatccttatccttattgctgttctttattgatcagcaaaatagtactgcaaaactgtgaatttggcactttaaatacttattttagttgaaacagatcaaaggtttctcatttaccaaatttaatgtgaaccaaattcattataacatctttaatataaatttcttccaagctcattttcgacaccatatctcattagtctattagattagactagagtattaattaatttcttccatacatcaaaactcatcgtctatcctgagagcatgctaaaccaatccatatgtgaacataggaaagagatgctccgaaaaatttaacatctctgaaagaaaacctctaactcataatatcattccacaaccaaaaaagtctgcagaaagaaggggattagtatctaatattaatgtttataaagttttagatgtaattgtatgttcttttaaggcttattatatgtcactttttctcatatcagttaagtacctgcaatgaaaatttaactctaaagtgattatcactttttcttcattttggaagcacttataatctcagttataaatatatatgtataagaaatgttaatagtgatgtttttgatcaagtaatgttattgttttagataattcttctcaaatataggctaatgagctttgaagttggcaaagagtgacattgattggaaaatgatatagcagcaaggaaaatggaattcagatgaaatatgaacaagtttcacaactagtcaaaaaattccctttctttttctaagaaaaagggtaaaagtatgtaatctacaaaattgttttgtgtgaatctagctatgtca

SEQ ID NO: 70901 - DNA, 2142 bp, Cannabis sativa
agggtattttttacttgcatttacttctttcataacatgcttatcatcatacttgctttttaactttttgttttgtttgtgcagaaatgtctcaaaaagtaatccaggccttaaagaagagagttggtgacagctcgggtcagactcctccgcctaagagggctagaggcaatgaggctccatccaaggagaaggggcctgttgaggaagtaatagacctctctgaagaatgacctactatggactttccagcccagaaggtctcaagatcaaagagttccaaaggtaggagctcggatgggtctggtcagactaagacctcttcaaccattgtggtgctgcgcacggaggctaagaagggcaaggacatgctccaatactatttggatcggtcacttctggaagtgagcgatctgttgtccagggcggacgatgagtggtccctggaactggtcatgggaggagtcttaaaggaggctactcaggtgagtgtttttcttctttatttttactgtctttttcctagttcgggttttaacattttcccgtgcaggtcaacctgaagatggcatatgcctattcccgaaccaaatccactgcagccaagaaccttgttacaaccaacacattacagagggaggtggatgcggggaagaaagagattaaggatgtgaggaacgagctcggggaggtgaacaaaaagctccttgctgtcaacacccgagtcaaggagctaacaaaggaaatgcaagggatgccctctaccgcccagcttgaggcaaacaacgaggctttgtcctgggatgtcaattctcttaaggaaaagagggagggtctccagactcttctttccaaattggaggaggatgccaagactaggaagatcagtgaggaggagcttgtgaaggaggtggagaacttggaaactaccgccctggaggttttttacgagttttgaaaggctaaccccaaaggccactttgattaccttggagattccaaggaggcgtaccttaactactgtgcaagtcaagcagccaaggaaagcctcaaggtagacgattccacggttccagccgaccagatcaccgagacacctgcggttcagaatgtcgaccctccagccccttcagacccagttgatccgtacagagagcccgggacccctgccgtttgagacacacatatatattttgttttaatctgctcgacccataggccctttttagagacaaaactaaccagccaagcggtttttaaacttgggttatgtttttcattttaagacaacaagctgtccgggcagcctttactcccgggtttaccgtgttttgtttatcttttttcagtaaatagttcccttgttttgataattatctgtgcaactgttatgttttttttagcttgttatttacttttaccaatgctttatacgggtatagttaccccccaagtgactgagcagacctttgactcttggtcacttggatttcagaagtatgatttttgtctgttcaggtctttggattcgagctgacctttgtacaaacttaatggcaaagttataacttgctaataaaatcgacacaatgaaaatttaaatagacatatttattcattcattggtcggaatatttttgtcaccgtagtaacttacatttatgggagccattatatgatctaatacgatctttagctaaatttatatttttgtcatgccacctgagtagttaatcatttcatgagaaccattgggcgggatccacgcaaaataccatttacttattctccatttcatccaacccggtacttttactgataataccttttacagtgaagctagatcactatttatagagccttaatgcatgaaggaaggtttcgcttttgcttacaatgtctataataggaaggaacattcaccacataaatagaatacatgaaatgggggattgagacaacatgtcgtatccctctaattcaatcccatgattgtagggattgccttcgtacttagacaccacgatgccattctgaaatagtcaagttctggtaagtagtttggaaaaccaaacttgttctctgctcggatagtctccccttcaccctactcgggtaagtagactgtaacaccctaactag

SEQ ID NO: 70902 - DNA, 817 bp, Cannabis sativa
gaacatggttttgaaaaatattttcacttttccacttttaaaaatagaaaactcattaaaaaagtgttaccaaacgccacctatgctatttggtgaaaccgaaataagtgtgtttttgatcttgcttgtaactcatcgcttagagctgtttgtgagtctgtcaaactagaataaatttttccctttgctaaaaaaaagtgaatcatttagagtttcattcaagtactgatttttagtacaatctaaaaagactatgttaaactattattggacccttataaccgacgattcaaaattcagttatgacagttggtactcgaaatagagagagcaataaagagattatcgagcccttgaggttggttttggccgaagactagaatggttgagggttgtttggttgtgatttggccctattttccttccaatatgtatcttcagtccccttgttagtttatatgcttaactgtcagttattacagttattagtgaacctaattctaacttaattttaataaaacttgtttaccattttaatttttttttatttttttttaattatttttaaaattttaaaataattaaaacgagttgaatcaattaaaacatgtcatatgtacacacatgaatagtcaactaaagaaaataagcaaaataattttttaacctattttaccatcaaaaaattagttttcatgagtttagtgtaccatagtttttgttagagagtcccacattgtcaatgtgtagaaagataatagaatatataagacgaatgggctactcctcccattgccaattgattttgagttggaac

SEQ ID NO: 70903 - DNA, 1132 bp, Cannabis sativa
aattgtcatttcattcatagataggcatatagttctcggaacgagctttctaacgatataaagagcatcccaaatggagtttcaagtcaaaagttataatgaaaataaaaacccaaaaaatttcttggagaaaatagggcctcgtcggggggagcaacaacaggttgctttcgctgcggcgagcccaaccatggccgcagcgaggggccctgtaacccaaagatctgccttatttcccacttcgagtttttacctaaaaatcaaaccaaaactattcatgccatccaaatcatgcataattctcaaattcaatataaagacaacctatactaatattaacatccatcacaacggtaatcaaggctcaaaaataccaattcatactcatcacacaaaacacaaacacacaaaacacacaaaattcaccaaaaatataactttaaattctcaacatgcatcaccaacatctcaagaacacaccaatatttttttaaagcttaaatataaaaaattaagcatacacaaaggatgaattggaagcttaccacaattactcaagctccaattatgcaaaaccactcaatttcctcaccaattttcttccaatcaaatgagaaaattttaaagagatgagaaggagaaggagagggtcggctagggcatccgaaaccagaaaattacatttcattttacacaaaaattgattttgttgaatattacatcatagtatcaaattactaaaatacccctatagccaataataaacatatctatgcaaccaagggcaaactaatcatttcatcacacccatatataaaacataatttcagatttcaaaattatcatattaatgccaaattaaaccccaaaaacgtatttcgggccccgaactcagtttggcccaaaatacttggttgtgattatatcccaccgacttatcaaaaaatacctacagatagacaaaacaaatgtactatatattaatatagtccacaagcacgatatatcatagaaattatgattttaccctttttatgtcaaaactacgaaaatgcccctagtacaccaacagggtctcaaaatacaatttatcagtatagtttcacacatttaattatataataatataatt

SEQ ID NO: 70904 - DNA, 905 bp, Cannabis sativa
ttggacgctcctcccagtctcctcaacttttctactctgatttgtttggaggatcacagttacaacaaccgatgtttggtcaatttgggagctcatctcagcagctaatagtgtttgggtgttcaatgcagcaacttttttccgatcaatttttcagtccacaaaatccatattttttttgtcagtttcaacaataatctctgaatttttttgcaacagcaacaatctctgagttttccacaacaaccacttgacaatttgttgagatattatcttcgcaacagccatattacccttcaccaccagtattgcaagctcaggacaatgaacaaacaacccatttaacactagtacaaaaatagtttttctcgacgtttttaaacagttgtttaaggtattcctgtcggtttctataactgtcgcctatacgaccgtcgtaaaacgggcaaaataggtgacggttaaaattgtcgctaatgtggacttcccgaaggtttaaaacccccgacagtttaaaatcgtcgggaatgtaaaaaaaaaaaaaaagagaaaaaaatacacatttttctgccatattcctctattttttttttttttgcattagttttataattttacctaaattaaaataaaataactaactttaaaacacattaaattaatacgataacaaaataaatatatataataaataaaaaatatataagtaaataaatgtatttataccgagctccgagagagagaaagagagagggggagacggactggaggtggtggtggtccgacgaatgagacggagatgagagggacaccgacatgaggtggaggtggtggtggtccgatgtatgcaacgagaggagagggagaccgacggaaggatgggtgggtgtagatcgatggacgag

SEQ ID NO: 70905 - DNA, 1290 bp, Cannabis sativa
  modified_base (43)..(52): a, c, t, g, unknown or other
  modified_base (436)..(439): a, c, t, g, unknown or other
taactagttgataaatataaccagtttctttatattatatttnnnnnnnnnngtgttattatttgtgtttatttattttggtatggaactggttcttttaatatttatgcctcaatattttttgaaattgatctctatttttttttaaaaaaaaaattataatcgattttatgaggttttatgtgttatgagatttttttattgtagaactagttttgtttataatttatgttttagtgttttaggaatcgattttccctttatttttttaattgaaatcggtttgaatttttgtgtattacttgtttgtattcattatgttatataaccgattctattttagttataaccggttttgagttatttagtgttattggtttttattcattataatactattgtagaaccgtaactattttaattataactggtttgnnnnattttatgttatttatttttatttattatgttacataaccagttatattttaattataacccgtttgagttattaatatttattcatagaaccggttatatttttagttatatttgagacatctacttctggtgactttttcagtaattttttggtgacggtgaatttttcggcgacagtaaatttccagcgaatttttcggtgatactaactttctagtaagttttccggtgccgacgactttttcggtgtcgatgatttttccggcaaaacttattattattttacaaatatggtatttctacttttttttttacaaaaatatggcatattcccataaaaaaaacccatataaatataaaaaaataataataaaaaaaaaccataacactgtagtgttatttatttattctttgtaaactataccctcaatcccatatctatagatatatatatataaagtatgaggcggtgacatgacattctaaaatcactccaaaattatttttctcttctctccttaggttgtgtttggttcacttgaatggacaatggaatggacttgtcattccttaggagggcccaatcaagtgtttggttttttttattaaagcttgaaagcccattccaatgaaattataaatcacctaaactagggatttccttttccattataaaatcagtagaaagctaattccttaccaacaaaagtccattttgcccttatcaattcttgtccaagaagttccaacggtactttctcatcctttctctctttctttttcctttaacagagaatttcttcttcttccttcttcttcttaaatatcatatgtatatatatatatata

SEQ ID NO: 70906 - DNA, 1316 bp, Cannabis sativa
ttgctgccgaagtgaattggctcacatacttagttaaagaacttcaagtacccttaccttgttgtcctataatctgggttgataatcagggtgttgcctctcttgctgctaaccctgtatttcatgctcgatcgaaacatatagaaattgatcaacacttcatcaaggatcaactgttggccaaaacactgaaagtttgatatgtgccttctattgatcaaacggcagatattcttaccaaaagtctgtcacagatcgattcctttacctcaagacaagctcaaagtgtgttcatcaccatttcgctggaggggggatgttagcaatagttagagttcgttagtgtgttagttagcactgtttcttttactgttgtaaccgtttgctatgccacttgtttttgctattttcttttctctgtttcttgttttcctctgtaacaaactctacctctccttctataaataacatctcttttcaaggcttgcctaacttttgcaagtcttgtgatttctttcactgattgagtcctattagattgcatagataagttcacattctacagtacgaaatgcttcagctaccaacattacaaatggtacttcgatcctcccaataccatataaattaaatgtagatgctgtcttagataaccgaaggcattatacagggttaggagcgattgttactgattaggaaggaaacatgatagcagaatttttatctgctctggtggtttctgcctctcttttctacgctgaagttcaggtctttttttatgctctcagatggtgctccttaatcaagatcccaatcacacacagagacaaattgcctctagctgatattgaaggttaagcacaaatggaaagattgttcaacagccttaaggttcatctcaaagattatcgactctttatctacttttcttaatataactttgtaccaagtttctagaaatctcaatgtttcagctcattatattgctagagatgcattacgacaagattgagaattagtttagagagcttatctcctctttctttgttgtaattgtaataaccttttacttgtttcccttttttctagttacaattatctctaaaaaaaattgtcacaacgtacatcgcggaaaacattctgactccatacgagggaagattaactcggtgcccaatgtatagtatacatattaaatgttcctaagagtaaatatacaattagcacttacaaaaaaatactaaaatcttgtggttctaatacaaatgattctaaaatttttgcctattttgaaatttatgaagtttttttttttt

SEQ ID NO: 70907 - DNA, 1961 bp, Cannabis sativa
aaaaaattacaaaacataagaaaatagagaaaatagagaaatggaaggaaaagatgccacatcaatgctcttatgctttcctttatttagatatatagattataatagaagagaaagactgagtttctttgatgaaaaaatctgataatttgccaaaaaaaaaaaactacataataaaatacaaagttataaatgtagatattattttgtaaggatagtaagtgatagaaacattgacattattttttttttggaagtcaaagatttcaagttggtgtgataaaaatagttgtatctattaaaaaaaaaccagctacattagaattgtaaagaaaaactaagcacaatgttaaagtaaattataaattctaaagtgttgttgtaatatctaaaaaaatatactaatatttaaacagacatattttattaaatatgtaattgtatgaatattagagtaggattataatcttacttaagctaattacgaattaattagtggaatttgagtaatgaataaataaagcgtaatttataaattacggagattatatcggattatgggggtattgtagataccattttcaaaataaaatattttggagttcggcggtcgtggaaactcgcttaagtggtcaaaaatgtcacgataattaagatgatttttattggatttatactggactagtttaaaattttaagttgtcggttttgtggaatagttagaaaatgaccaaaatgcccttaggttatgatttaagcttaagagattttgattgagggtaaaatagtcatttaccaagttttatctcttttttttttgtggtttctaggctgaatgagagggttagtattattagggttatattaaaataatagtagtaattgaagattaatctaaagacagaaaaaaaatcacataacacttgtttctctctctccttcccttcgagccctagaaaccagctaaagaactagggatttttcatctcaattcaagtttttgctagctagattaaccaagtttagagattgttcaagcattgaggtaactcttcactaaatctatttgatttcttaggttttatgttaagttttgattgggtttttatatgaattcgggttgtgggtgatgtttgagttcaaagtatatttataggtttaatttaaggttgtttaagtatatttgtaatattgttgtgagctgttaggtttgaatttgaaagaatgaactcaaggttcactcaagcatggtgattttgttatcttgatgtattattgcgttttgaaggcttgaatatgttattggtatgttctggaaggtttcattaggatcggaggagatttggttcgattttggagcaaaaactagagtttcctgtttctgcagcagggaaaccggtttcacaggtacagtgaaaccggtcaatcggttttgccagtagaggaagccctagttttaggcttcgaaaccggttttgtttggggtgtttcccagaacttagaatagggtattttaatgatgtttgagttattttgaaccagggggagttagatatatccggttacaaagttagggttattctagagttttgaataagttgttcattgagctttgttgtcgtgacataggatcccggatcgtcgagcgtagttccactccgcgcacctgactattggactgaggtaagaaaagctttatgcactgctaagcatattggtaagaaacgattattatcgtttgtgactcgattatgatcaagtaatgatgaggaacgattattatcgtttgtgacttgattataatcgaggtaatgatgtggaacgattattatcgtttgtgactcgattatctatttttctcaaccattatctacactagttagatttttgtcatttttctcatccatttatctatttttcacaaataccactttttccactttcaaccctataaatgccaa

SEQ ID NO: 70908 - DNA, 1213 bp, Cannabis sativa
gacatccattaattattatttcataagactctgccctcctcattaaaactttattataaaaaaaaataattaaaaaaaaaccttgtaggaacaaaattctggtaaagatagagtacattattttcttatctctccttctttgcagcctctatttcaattgatgaaatctttgactcgatgcacaccaattttatatactaacttctcaaatattattgtaggaagggcttttgtatataagtctgccaaataattatcacaagaacgtatctgatgaacatctatatcccctttcttttaagctcatgtgtggaaaagaactttggtgaaatgttcttagtttcatcatctttgaagaaacctccttttatttcagcaatacatgcaacattatctccatacatgttaggattaaaatcacttaatttgtcagtagttccatcttatcactcattagatgaatctgaagaaagttgttgttagttataatagttggctttgtcaccaacttaaagggagtcccaccaacatctataaatagaagtgtctctactctctcgagaaaatctcatacttcagatttcaaagtcaagtttagagagagagagatagagtcaaagatcacagtgagtgtgtgtggagggatgttacgagagtatcactcttgaagtgatttctcttattgtgtgttgtggtaattttacacgcaattatacgtatcgctttaacaagtattactcaagtttaggactctttcagggaatcataggtgcacagttcttaactacaattcttatggaatcaacctctctctttgtgaatctattacttgttaacgatacgtatacctgtatgttgaaagtaccacaacaataagacttcattaaaagtgcatcaaacacaatcacatcagtttctcaacatcttttagtctagctggctttcaatggcggacgaaaaatttcaatccaaatggaaaggaaaatctttagtccaagtgaaaggcctaacgacaaatcaagtttggcctttcctagaagatttttgcaacttccacaagttacactaggtggttgacacgtgttaccaagtagatcagaacccatcagccacgacagttgtcagtaataggccaggcttgatccgctactgctcctccgcaagcacatcaccattcggtgagtcttcaatgatttgggccaaagagaggctc

SEQ ID NO: 70909 - DNA, 1267 bp, Cannabis sativa
taataaaaatatatataataaatagaaattgtaatatcatgtgaaaaaacacttaataatgataccaaattaatagtagtagtaattaaataaacgatctttttcaaccatgaataaaagtactagtcgttatctcagatggaaaaaactcaaattgggaacctaaagagctaggaccccattcatagcacctataagaataagttttcgcttctaatttgcacggtccagagggaatgatataccacaagcaaggctccggagtgcatctagggccatccggcgtgtaaatatcaaaccggtggaactgatccttccattgaaatccacaaaagaagagtgttgtaccccaaaaattacgagtaaacttgaaggtaaaagtgctattgtaagtcaaaagttgaacaccgagatcatcatctttcgatttgcaatgaacactaagttgttcttttccatccaatatgtttcgtatcacaactacttcgattcccatttcgggttgacgaggtggacgaggaatgtcggtaactccacatgcacaagaaaacaatgtgaccataacacatattgttatcaccgacgatagattcagaattgaactcatattttgtagaaatataatatttttattttttttgtgtgtgttttatgtttaagtaatcatctctttttatagggttttgagtacataactaatagattgaaagcattttgcttttttggggagtaattaattagtattaataaattcatataatattaatttattgaggaaaataaggaaatgatatgccgttatatacaaaacaatgatatacataatatatttttcttgtttaggaatattatagtataacataattattatgtgattaaattagagattgtcctattgattggattaaatggactcattcgtgtgagattatcctaaaagcggtttaaatctgattctctctccgtagttatggctattaatagcatgaaggtgttcgcaaataagatgggtgtgttgttagagaatgtcatagctttattgtctaaattttttaagacaattttgtcttatgtgtcctgcaaattaagataacactgcggcccatagtttggttaaacatgtccttaggctagacaataagttatgctggtttgaagagtttccgacaccgattgttaaaagtcttctggggaatatcttttttttttttttttgaataatctcgggaatgttttaatgtgatctgatcacgcttttttttttttt

SEQ ID NO: 70910 - DNA, 769 bp, Cannabis sativa
aaaaaaaaaaaaaaaaaaaaaaaaaaaccttgccttatgagttgtgataggaatttgattgttatttttttttttcagaaataaatttagagtgaaaattaggaagttcacaatcatatatgcaaggttatgtatgttgctatcttgacacccttataatttagttagcatgttgattaattgattgacaatcataatagtaatctaatctctatgcattttcaacaatcttcgtgtttcttatggtattatatgtcctatttgactaatgaataatatattaatagaggtctgaaacctttcacttggattaatgaaaataaaagatctttattaataatgatagtaattagttacttattagatacttatttaagatctttttttgtggcaaggtacacatattgtgacttcatgtaatgtattctccaaagcaatgctttgaattcaatatatttaggagtatgtgttgagagaagcaaaatgtgtttttgagagagactcgtatatacttcaagtttgagactcctatatggtcaatggactgttccatagtcatgtggttcaagttttagtatgtgaaattagttatttttctttttaagttataaaatacttgcatgccacacacatgtttactattttcataatatgataaaaatgcattgaaatttgggtattatttccatattatttggatgggactattatacaaagcaattggtaattcatttcattaaaatacttaatttctttaagtgctcatttg

SEQ ID NO: 70911 - DNA, 929 bp, Cannabis sativa
tcataaatctttgacctacattttctctcttcttgttctatgattctgttctgcaatgaatcctagatttaacaccatttcaatcaccaattccaagctaggccacactttctgaaaaaaaaaagaaaatagttctttttaatagtgattgagaagtgacacaagcaaagctggtagggcttcaattattattaatgtatttgtattgttgttattatgtagttattttccattaatagatttttagttgtcaatgaaatatatgaggatgttttgtttacagacatacaatttacgtacgagtaatgactcaaaaaattatatttcttttaaaataaaaaagaagaagatgtacatataataaaaccaaaatttgttgcctgacatgtttctcctctttttctttccataaaaagatgtgaattattgtttttagtgtagggtatgatattactatttactaataatttaaaggtacttttagattccaattcattacttctctttttcccctctttccctcaccagtaaactagcctcattagagcttctccaaggatggggcattttatataaatgtcgttcctttttgttctaaggaagcaccatccaacacaacattttgaggttaatgctacagtgcacggcatatatgaccacggtatatattttgttttttttttaaataatatttatatatatttatattatttgatttatttattaaattaaaaatttaattttgaaaatttttacaatacacctttttaaatataatgtattgtttcggcacctcacaaatttttttagtctaacaattttataattgtgcatattataataatttaagacattttgtaaaatttaaaaaaatttaacacgccaaaaataatgtatctttttaaaagtggtgcactgatatactccta

SEQ ID NO: 70912 - DNA, 1197 bp, Cannabis sativa
  modified_base (158)..(164): a, c, t, g, unknown or other
atacaaaatcagtgagaggtatgaggatggagtttgtggaagtgagattaatgaatccatttcctcattatgttttgtttgaatgaagtgtaacccaaatcatgcttactaacttcattcattcaaattcaattctatacataataataataataatnnnnnnnataataataataataatagtaacaccacattacatactccatcgattgaataattcatcaatgccaaccttcaaacttctttctattatactatttatcccttcttcttccattatttgatgatctaaacattaagaataaaaatatggatagaagatcatcattcatcacataataacaatgacatttttaactgtataaaaccaatcaataagttaaccgaattgacaatcaaatgcccactttgttctctttgttcatgcatattgatatagtcaaataaaaaattgaatgaaacaaagaaaaagaaaaaagaaacacttgaaattagctcaaattccatttccaaaaaaaaaaaaaaaaaaatagttccactattagcaaatatttgtttaatataaaaagaggaaaattctacaatacatctttttggataggatgcaccgatgcacttttttctatttcggtatttaaaaaatatgtagtccaaatttcttttataggcctataagttgtagttatttaaaatatctaacagaattttgagaaattcaaaaaaaattaacacgtcgaaaacaaagttcaaagagcatgttgcacaattaatttttttatttgtacgtatgtgaaatagacggtttgaacattattttctatatgatcttatttgctttagctttctataagcttttttttttttttaagtttttagaatttttaagtctttctatggatgtttgagtgaaaaataaaaagttctttttcaatttaaaaattcttttgaaagaagctaaaatttgtagcttctcctaaaagacttttgagaagctatttttataattaaaataatttacataattactaatttattcacaatttttttattgatattcaaacaacttaaaaagcactttttaataaaaaaagatcttcatataataattattcaaacggtaaaaataaatcaaaacttatacttatcttataattataggtgatatttgtggcgaaaccctcttaacatttacaattg

SEQ ID NO: 70913 - DNA, 940 bp, Cannabis sativa
  modified_base (49)..(55): a, c, t, g, unknown or other
atttctgatctatattaataagtagatctgattatattgaaatgagttnnnnnnngggcataaaacccaacaagtcttatacctatatcttggctcttttcatgataaactattacataaatggatggataactggccatcgaaatacacaatcactccccctttgatttgtttcagctcataaagctttctgcaaaccactaacgcttccttaagagcttttgtagtcaccataaattcgtaattcgtggttgaaagagcaaccacagactgtaactgggcgttctagcatatacaatttaggtttgtcaagaacacataggaagtggttattttttttatatctctattcgatgtgtaatctgcgtccacgaaccctttcaactttaagtctccttttgctttcacataggtcagaccataatcccaagtacctttcaaatatctcaataaccatttaagggctttccaatattccatgccaagattagacatgaaccgacttaggatgattagagcatgagctatgtcaggtctcgtgctcaccattacgtacattaggcatcctagaacaactgcatagggtacatcctttatctgttctttctctttagtactattaagacattgtttctttgacaaaacaaattaaccctcgagatgtactctttgcatctttcgtgttgaacttctaaataattttcttgatgtatctggactgctttaagctaacagtcccttccttatagtttcgtgagactttgataccaagtatcttttgaataggtccaagctctttcatctcaaattatcttttgagcttggctttgatactttttatcgcgaatatatctttgctcataatgagtatatcatctacatagagtaataagatcacggtcgtagattgatccagattcttgaaatttaagcagtgatc

SEQ ID NO: 70914 - DNA, 2095 bp, Cannabis sativa
gtgaaaatgatcaggtgtttatgttcaaataaaatgcaagttcaaagtaaactcacccaaatcagcatcacaagtgaacttcttagctaacacaaccacagataaatatggagtatacaaattggacataccatcagttgatggggtcagctgtttgaatggtttgtcaatggtgtcaatgtgccaagcaagtctcattgggagctcatctcaaccatgcaatgtgcctgttttaagaacctcatcagatgagatatcaatcaaatcagaacaagataatctctgtatatacagcttaaatgctctgagttataggccatctaagaggaacaataccttatgtggagttagaaagaaagaagaagacttagtatactcttccaagtgttttctcccatggccacctttacctcaattcaactttcccccattaccttttccaacattgccatggccatggccattccaagattccccatctctgttttcgccgccaccttcgccttcacagcctgcatttagtcttacagatcccagaacttggataccatatttttctccatcacctccagatagacatcagaaccaaaacccttagtattaaaatcattatcattctcattattattattattgttttgttctctatattattttccaaaataattattttcaactgtttattattatgatttgtgagtagtgctgggataattgttgatttatgcttattaacaaactgtataagcatatactccattttgatattatggttggtaataaatttgtgtacaaattatatttaattacaatgtataatgaagcattttactcatcctgctactgctaaaacatgtttcatcttaccttgttgatccttcaatccccaaagataatttttttttcttcttttcacatgttactcagtacgaaacataatcaattaaggtaaagaaaggcttgataagagaaatgctaaaagtcactaatggtgcctaacaccgtccgttaatatcgctattggttcaactaagtatcgactcccatataatttaatataatagtttttagagagtatcgctagtcaatcgtaacgtgagaagttactaagcactactggtgcctaatagcaatgctcttttgataattatttaacactagtcacagtagataaagtttctttttcattatagttgcacttgcgcaacttattttggggctattcatattaagaaaaaaaaaactatcgtgaatatatttgtcgttaggcccataattattttttcgacaaataaattcaatctctacagttgacctgagaattgttaaaagcaaatttctgctacctcaggcaaagcaaagaattcatgacaattaatttataaaaaaaaaattaaaaatttggtaaaactttaatttttagacaataggatagaaaagaatagaaaagaaacaaaaggggagaattcagcaaaatataggagtttaaattttgtttttataagtaaagataaaaaaaaaataataataataataatgccacaaaaacatgattttttttttttcctttctgtttttgttacaattttatggaaaatttccataatttagtttcttcttttaccataactaattattagtattgaattagtaacgagttactaatatcaaattaggtattttaaaaattaatagtggtaattgatgttgtatagcaatcaattaacagcatcaatttctaaaatataaaatatagaaagggaaatttaattttctatacttaaaaaaccttaatattttattattaaaccaatacattttaaactaaaaaatatatgacacttttatctaaaatccaaaaatacccctctcataactcagccccattttttctcaacccgcacatgcatcggacccccccatcggaccctgcatcgaacccccatcggctctcttcctctctctcaaaccgaaaaaaaacaccagcggaccatggggtccgatgggtcggacccccccatcggacccatcggaccccatggtccgaccatcggacgctggtttttttttttttttttttttttttttttttttt

SEQ ID NO: 70915 - DNA, 682 bp, Cannabis sativa
tataaaggttgttgatgggcttatggctactgcacctgaaaattgattagtctaatagccagaaacatttatgccatgtttggtttggtgtaatagtaatcttaatggaattaggattacaactccattgtttggattggttttaaaatgtaatcaaccttttacaatgttatcaatattacgacatttatataaataagcatacaatggagttgtaatcataattccattaagattactaatttaagttgaaaaaacactttgtttccttttacaggtatttttggcatgaacttaaggtcgtatcttgaagaacatgtggtatgttaagctcaaatctttataacccaagttgtttaatcttactttcaaccacttatatcacacacacacacacatacacattcattaatgttatttatctgaactgttgtattgtgttatttcttgatgatgatacagtctgcattctggctcacaacagctgggataatcgttggagctgttgtaggatttttcctaatgtattcttacctcaggaagaggaaaattctctgactaacaaacaaagtcatttcattttgggtacttattcttcttcttcttctttttatacaagttcttgctaagatatcttagttaatatgtttaaactcatttttccaggccattttcagagtca

SEQ ID NO: 70916 - DNA, 1047 bp, Cannabis sativa
tttgggctcaacaattctaaatttttatcaagaatttggaacagttttaatatggtgtcattggttgcttcccttatatcaaactcttttttcacaattttgcctctactgatagaaccaagatataatcttgatggtttgtttataaaacattcccacgattgtgagtagtgggtacattttgaattatatttgagatttttatacattgaaattttataataaaatcaaataaatagcccaatttgataaatgcatttccaatgcaatttatgaaagaaattcaagcagcacgcaagaagaagacattgataggtgggtggagaatataaagtagctatattaaaggttgagaaagggactgagaccaaaccactaatttgggtagatacaattaccctgcccaatacttactcagatataaagtttagcattttttctggggtccatgcaggtgattttaactcactatatactatatttttttatttataaacaaaaatatattatatactttctgttccttctaccctaattctttgaatttattttgtcattttaataaatgtgcaatgcccgttttggtggcaatacctaatcctctcccacacattttaaatgttcttattccaacaataataactctataaaacacatatgtatatataggccagtagtcaatatgaaactaaattaattagttatttattgtgtacacaagagagttggagaaactgaactgccatggcaaataaaacagtacgtacagaaaattaaatataacctgttttaaattgatgttgatatcagcaagttttagatcaaactgcttagtgaccaagatctcaaccaaagtaaagaccactctctctttttaggacagcaattgaaaggaggtcatctgggtaccacaatgtcacccgcaatcttcttcactttttttttatttcttgtttggctaattagaatttttgcccatgaattttgatatgtatcaaattatgcccctgaacttttaaggccattgaaaatgccccctgaactatt

SEQ ID NO: 70917 - DNA, 1390 bp, Cannabis sativa
tgttcataaaaaaatttagataagcctcactcacaaatttacatggaactcattttagagatgtttccgtgctcttgctttgggtagattaatactatgaaggttgagtgtatacttaactttcatgaatcatacttccaagttgtgaagctccctctaccaccaaaatcacttaagtttcaaatgtagggccattaaagctaaatgtaaatatcgctatatccttaacactagtttgatcgtcgccttcatttttaaaatcactatttatgattgtcttcatcctcgagatcatcagtatccttaggaccttaacactagtttgattgtcgccttcatttttaagatcactatttatgattgccttcatcctcgagatcatcagtatctataacaatagtttaatcgttgccatcatttttaagatcaccatttgtagagtttacaacaaattcaatttgccaattcataagtcaatgatcatataacactttcaaacttcaaacacacaaggacattaatggtatatcgctgaatttctctgtttgtttatattagaatgagaataattgcatttcaaagtgagagatcaaaataaatgaaaacttatctattatatgccatagactagatccaacaaactatttacaagagttagttatttagagtaactaacttaactactagaaaactaacttgatgattaaccatattaaatgacacctaggcatagactaacattctccaccttgattgttaatacaattaaagctaaacaataaacacactctcaaaagtaattgacctgtaacaactcaagacagtgtctgaactttacagttggaaaaactttggtgagcatgttagatgggttttcttcagtggagactttatggagtttgaacttgccttctacaatgatgtctctaataaagtgtagtcacatctatgtgtttagttctttcatgaaatgatttttgctcaagtaaagagaactttggctatcacacataattggaattgatttttgatctaaaacaagtttccttgtgattcttttgagccaaagagcttcttttatagcttttgtacaagttatgtgtactcagttgttgagagtgctaccacaacttgtagataagttttccaactgatggtgcagttattgagcttgaacacaaaacttgtttgtgatcttcttgaatcaatgtcccctgcataatcaaagtccacatatccaatgattccacaatattagatgttccccttaagtatttcatgatccatttgattgcgcattagtgctctatccctggattgctcatgaatcttctcactatacttacaacatggcataagtctagtttggtgcagaccatgatgtagatta

SEQ ID NO: 70918 - DNA, 2120 bp, Cannabis sativa
tctctattttacttagttataactttcatctcgtctatatataagagcgagttggcaaaatttcttaaagttagttctcaatacaccttatgcaaaaataagtcattgatttgatagaagacagaagaccaataagtcattgatttggacaaaattaacacaaaagacaatcctggagatgttgatattaaggttctcacattgtttgaacttactgaaccttagcaattaaagtaggttctaaactaagagcaatcatcattggtagtatgaagttaagtcttatttcatgactactcagttgaagaagcaattacttctacaactaattgaccataactaacttaacatccaattggttaagttaattattcgctcctataaatagttttctctactttaatgaagattaccatgatgaattgctcggttggagtaggagcaaattcacactgaacttgtctctgaaccaagttaaacttttcttgtgttcttattgctttatatttttattgtttgatttgatctccgatgtgtttgctaagtgtttgtgattgatcctattattgaacttgtgccatcttgggcaacaactttgttcaagtttttataatctcacaacctatacaccctaagattgtaattttgttctttattctttatatatcttttcactatttatgttattactttgtgttctaacatacttttcttctccatttctacaagttatttgtacattttgttatacaattaattgcaactttacttaatatcattctcttatatatatatatatatatatcaggttattattattggtacatttgttatattttctttgttttggaggggttgatagtggaaggtggtatattcgaaatgaagcacatgatcgatgggagtattgtaaaagagaaaatgcggcaaaggacaaaagttagggtggtagggacccccaactatgaccatgaagttgaacaaaggaaagaaagaactgcaagtgcaaaatgtaccaaataagccttcacatagaataacgtgtattttcacaaacacatatttgtaatcacatgatgaattacgaaaaagagataataagtgttattgggttgtgggtatcatgattgcatataattaacgtgagaatttgtgaacatgaatataaagacaaaatagtgcaaccaccacagtatacgtacgtacctgaattccagttcagtttgaaaatatattattacacgagtactgagcatcatatataatgatatatgttaagattatttgtgatatatgtacagtgaggatttagtttcgacaattaggatcaaattcaaactataattaagatatgaacattcaatagcatccgaggtaatttaataactaattatcaaaagacaaacaaacaaacacaaggacaaataattagtagcataatacatatattgaccaaaattaaaagtaagatataactgatatttggtgaaaagacatgtaaaattgaaaattttaatcaacaagaacatatatatataattattctttataagattatttttaattagtgatgtaaaaattgtattatctttaatataaaaatatcatatatctatatcagtttttagtattatctttcaatttataattgtaaaatttgataaaaaatttaatgtttaattaatacttttattaaaaatataaaaattaatacttttattaatttatatataaatgtaaagtgttataatttaacacaataagtatatttaatataaaatattaaaaaataaaataaaaattaataaatacaaaaacagtacatttataactgatatttggtgaaaagattaaatataaaattgaacattttaattaacaagacctatatattttaataagacatgtaaaattttgtcatatttaacataaaaaaataattgtgttatatttgatttaactttcagtaatatatgttcctgtaaaatttatcatataattttttattacaaatatagaaattaataactatatcattgattttattattattttatatataaatgtaaaatatttataattttatgtaataatttaatttaatatattaaaataaatat

SEQ ID NO: 70919 - DNA, 963 bp, Cannabis sativa
aaaaataatcgaaattaatatttgtaatatgttgtttactaaaactgcttggaaatgaaataatagtgatttatcttgtttactttatcagaaaatgtaattaaaatgcttaaatggactaaattacccttttgagttatactgtagtctatttgtaagaaatattttaaaagataaaattgtcattataaatttaatattaaaaaataaaaataaataaaatttattacccttaatgacattttttagaaaattagtaggagaagttctcctattctttactcccttatttaattaagttctccattttctaaattacataaatgaatgtaaaaaaaaatgactctttttctattaattttcattactgattaataaaccttcaaaaaaaaaagttaacataaaggaatagtaggtgaaagtgtaaaggctgaatcatcccctaagttccatatcccaatagaaaaaagaaattaattcttgaatagtaatgtagataatgatttaggactaatttagtacagctatgttgtgggaaaaagtaactgtaactgtgctgtgaaaaaaaaaaaacaactatagtagaattgtggaaaaaaaactgagctgcgtgtttgttaaattataaattttaaaatgttgcgagttattaagattctataataataataatattttaatctagttcattataatcataaatatcatatataaagatatgttatataaaattttttattttttttttatgtatttttacttatttttttcataatataaatttatatgcatttgataaaaataaattttaatatttttaaattatatttttatcactggtaaaagaaaaaaaaatgtagtttgtaagaaatttaggttgatattgttatttaataataaaaatataaatataaatataaatataaaatattttttaaaacaaaataaaaaattagaaattta

SEQ ID NO: 70920 - DNA, 2767 bp, Cannabis sativa
tgcatccgggaaccaccaagatgtatcaagatctaaagccttatttcttgtggtacggcatgaaaagggatgtagtggattatgtgaccaagtgcctaacctgcaagcaaattaaagcagaacatcagcgaccaacaggattacttcagccattatcacttccagaatggaagtgggaggacattgcgatgaattttgtggttggtttgcccaggatcacaggaatgtacgactcagtttgggttgtagtggatcgctttacaaagtcggcacatttcttgcctgtaaaggtaacatatacagtagatcagtatgctgacttgtatgtgaaagagattgttcgccttcatggggtaccaaagtctattgtctcagatagagaccctaaatttacctcgaaattcttcgtgagtttgcagaaggccatgggaactagtctaaagttcagcacggcctttcatccccaaacagacagacagtttgagcaaactatccaaatacttgaagacttattacgagcttgtgtaatggattttggagggtcgtggagcaagtatttgcctctgattgagttctcctacaataatagttatcaaagtaccataggaatggctccctatgagctgctctatggcagaaaatgtcgctccccaattcattgggacgaaacaggagaacggaaatatttaggccctgaattggttaaaaaaaacgaggcaatagacaagattaaagctcgaatgcttgcttcgcagagcaggcagaaaagttatgcaaaccccaagcaccgggatattacattttagtcgggagatcatgttttcgtgcgtgtgtcgccaatgaaaggaatcagacgcttttgaaagaaaggcaagctaagtcttaggttcatagtacattttgaaatacttgagaaggttggacatgttgcttaccagttagccttacctccaacattctcagctgtgcataatgtatttcatgtttcgatgttagtgaagtacgtgtctgatctaatgcatatcctatgttatgaggcattggagttacaaccggacctatcttatgacgaacggccagtacaaattctggacaggaaagaaaaggtcctttgaagcaaaaccatagcgttggttaaagtactctggaagaatagtaaagtggaagaatccacttgggaattggagtctgatatgaagattcaacatctagagctgttcaggttagattttgaggacgaaatcattttaacgaggggataagtttaaagaccgcttaagttttatatgttgagttattaaatattcagggtttaatcatggaattgaattattaattataatattgcatattgttgaagatttatttaattttaatatatgttaattatgctatatgtgattttctcgtttacctgtaactatgcttagaagcggtggaaagcgatgttgggccagtagagagtcacgtttagtgtgtgttgtaaaatattttttaatagcgggtcattattgttaggtgtttgaaatatcgagaattgttgggagttggaatgaccaatttacccttgtttggttttcggcatttgatttatgttaagggcaacgaggtcatttgatgggttattcttttgtcttttgtgaacataatctaaatttatgatttaagttattaaattaaaagaaaaggaaatgaattttcttagaagcattgagaataaattagtagaaggaaaccttggtcttctctttttctctctctcgatttgtaatgaagcaagctagggcttgattctttctgagcttattccagaaggtgactacaagatttgggtgtgttagttcaaggtattaattcttagctttctcctctttgattttcttgaagttgaaattaggttttgaagttgagtttgtgttttacgtggctgtttactttagaagtgtttaattttgtattctagagctagattgaagctagttttgttgtttttaagttaacttggttgagtggaatgggttttgtgcaagattggtatttgagaattcaacctagggtttccatggtgtcttcggattttgagtaaattgatgagttcttttgcttaaatttggttcattatagaatgtacaggtgttctggaaggttccattgagtttggggttgaattgttgtgtgagggtcgatttttggtttctctgcacaaaatcagtttggatctgagaaaccgattaatcagttttgccctcaggaaacccagtaaaccggttaactggtttggaaaccaattttccggtcggggtttttccaggaaccctagttttcctcaaattgttgattttagggtatggtcatgtcttttattgatagggttattcctagttgatcttaaagtccccgagaagtgtttagcgtgtctctcaccaaaattacaatgatgtgatttagggccctatgaaacgtcgagcttcaattccactcaggcttacccacacacctgagcaaggaaacgaggtaagatagcataaagcatatatatgtgaatgaatgtattttattatttgtttaccctactaacactagcaataatgtaatttaagggtgttagtacaatgtaggattttagagtagttacggtgttaccaacacgagttcagaattggcactctagtgtatgtggtacaacactcggtaactcttgggagtacaaattggccctaccaacacgagtacgaagtttttaatctagtgcatatggtacagtggt

SEQ ID NO: 70921 - DNA, 3375 bp, Cannabis sativa
tataggcgacggttttaaactgtgtcctatactataggcgacggttttaaaccgtcacctatagtgtaaggcacgactataaaccgtcgcctatacccagttatacgcgatgattttaaatcgttgggaaacccacattagcgacggttttgaactgtcatctattatgcccgttttacgacggttgtataggcgacggttatagaaaccgatggaaatactttaaacgactatttaaaaatgtcaggaaaactcatttttgtagtagtgttatgtgaaatgaatgtgatcacatagacattaagatatataagcttgctgattatgtaatgacccactggtatgtatattatgttgtgaatgatatcactttctatgctttctgtctagtagcttttcttgctgagtcactgtgactcacaggtgctttatggtgcatgtaaaatgaatagctgttgtgttcaaccatgagtcagaggtctcccagcattgtacatatcagtcgtggtgtcttggcttccgtgaagcagaatcaatcatttttcaatgattggaaatgtaacctacttttgtaataacattattgtaattagttagaaaagaattttattagcagaggatccccatattacgacagtatttagaatgaaagtttgtattttaatctaattaaaatttttaattaaaccacacttttccttactaatagattagtaataataggattgtgaaagcacacatgtggcgttcctgagagtcagggcgttacatagtcggccaggcgactattaatcttggctttattttttgttaagacatatggttggtcgggcagcctttaatcctggactaatttccatttatgttttaacaaagccactttttcacatgctcagctttcatttttttgcattaaatttgctttaagtttttcttcttaagtattttcactgtgcttgtcttatgttgtgcaggtgtaggtgcccccaagtgattgagtagacttatggtctcttggtcacttgtaattaaccaagttcttgagcatttgtctgatttcttgggcggacctatttgcatgcatgttagacatatattaactttaataattcaattattagcaagttttttaaacacaatctgagtgaaagaatcatttttattcactcattggtcttacaaatgtgtttttgttggacaacgtacatatattaaaataaaagcttaaatgcctcaaggctgctttgaaaaacttaagtagtcaaacacttttgcacaacatattgtgtagaagccatcacttaagagtgatgtgttataaataattaacaaattcctatgcggcataccgcccaagaactactacttaagagaagtgattttcataaaatagctcattggtagtactttttgagatgttctctgttccaatatcttggtaataagattacttccattttctcattgtactagccgagtttgtatgcgcccgaacttgtgatgtatgtaacttcgtatgacccttcccagtttgggccaagtacccctactgcagggtttttggtgttcagaaatactcttcaaagtaccatgtctcctacaaagaattttctatccttgacgtgcttgttaaaatatttggccaccttttgttggtaagcttacaacttcaagttggcctaatatcttttttctttaattttgtcaagggatcttgtaaagagagtgtggtttacttctttggccataggatacccttctgtgagactatgtggttccaattcaatgggaagcattgcttcatagccataagctaatgcaaaaggtgtctgtccagtggtcatcctcttggtggtcctatatgaccacagtacttctggtagttgttcgggctagttttcctttccctcttcaagacgcttcttcaatgtgtcttttaggtttttatttacagcttctacttacccgttttcttgggggtgagcaactgcaaagaatcttttaatcatatcatgccaattgtagaagtcggtgaacatattactatcaaattgtttacaattgtctaatacaatcttgtctgagagaccatatcgacagatgatgtttctaacaacaaaatctaggacattctttgaagttataatggttaatggtttagcctcagttcatttcgtaaaatttatttttagtctattttttttttcaaaaatctagatttgtttaagtaaacataacattttttatatttaatttctaattttttttcaaaataatttatattttttattgtatttttaattattttctaagatatgaatttataaatatcaataagttttattttttctttaaaaactcttaatttgtttaaattatttattagatttttaataattttagtttgatttttggggcattaccccatatactattttttattttttttttcaaatttatggtttggtttctcaggtggtttctctagttgtttctatatgagttgcgatacttattttggttacaatttaggtctattatttgcaatatgagttcttatgtggaattccataaaaatgcaaaaaaaaattattttgaagtgtaaaaagaaaaaccccttgattttttaagatatctgtttttaaataaaataaagtttaaaaatatttttttaagaatactttaattttttttttaagtaaacttaatattttatcagtttttattttattttttactttgggggaatgtttatcaggattttttaataatttttattaattttttcaatattaatataacgttataattttaaaaaatatttatttttaaaaccgaacttaatagaagagacataattttgtaattgttagccgtatattttagaggatatgagcaaatagtgtcagaagttcacagacaaaaatattaattattattgttttttttaattaacgtgctactttactaacattgaaaaataaattaattcggttaaattgaacatcaattttatgatttgaaaattaaaaaattaacatggtcagttttatcaactttgaaaattgatttaacaagagcaaaagtcttggtttgtttttctatatgtgaacataaataaattccactaggccaagacttgcgaacaccaattttttttttaatattggtaatgtcttgctttttatattattctagatgtttgcatggtggataagttttgttatcattacattattacatgcataaattaatgtatacaatgagaataaattatgtggcctaaggggttgtttggtataaccacttggggctagctcaagtggccataggtgggtgtgtgagtgttggaggtcctgggttcgagtcccaggt

SEQ ID NO: 70922 - DNA, 791 bp, Cannabis sativa
ataaaaagaccgtattttctataaataaaaaaaaaaaatcgtaaaatgtttaaaattccgtgaaaccgtatttttataaaaaaaatttgttgtatttgtgtatttgtgaaataatcccttttaacttttgtgttttttcttataagaagggaccattttaaaattagatttagattatgatccataaaatgggggtttgtacaaattccagaactgtgagaactggtggtgagggcattatgttactgatgtagactattgtcgtgttttaggttttggcccaccatgtatggacaagaactgggcccacctcgattttgggcctggcccaccatgtttcacgtattgattgcattatacatttacgagcgatcaaattcgtacgtgttcttatcttgggtcaaaatactatttaggccccgaattcacgctccaccataagacaattaatattgagaagatattcaaaatacaatatctttggaacatataattttttagatgttgacacataaaattggactttaccaatgttaaaaaactaatctctctaaggtttgaaatgtgaaaaaagtaggtcaacaatattaattatgaaagagtcataatgtttaagaaattatttatatatatatataataatcattttacatatgtgtgttacacagaaaagtaacagattcttgtttattttgttattaagagttcaaaaacaatgcatatcacgttttaccatacataatcacattatagtcttaaatcaaatttatctttactaaagcatatcaacc

SEQ ID NO: 70923 - DNA, 1204 bp, Cannabis sativa
  modified_base (1153)..(1157): a, c, t, g, unknown or other
ggctgtaacatatggctgggacatacagcaaattgacataaataatgctttcttgaatggggacttagatgaggttgtctacatgcatcaacctcaaggctttgaagatcccaatttccctactcatgtttgtcaacttaagaaggctttatatggtctcaagcaagcacctcgggcatggtatgacaagttaaaaacagctctattgtcatgggggttcaccaactctgtctctgacagcagtttatttttcagcaatacaaatggtcatcttctcctagttttggtctatgttgacgatattctaataccaggtgctaattctacatatgtccaataggttattatgaatctacaagcaaaattttctctcaaaacactaggaaccgtgagttattttctgggttttcaagctcacagaattggtcagcaactcctattgtcacagtcccaatatgctatgggtatcctgaaaagagctaatatggacacatccaaatcttgtaccacacctttcagcccagggtacaaactttacacctctgatagtgcaccattccatgatcccactctataccgaagcatcataggctcactacagtatcttactatcacaagaccagacttggctttctcagtgaataaactgagccaatttatacaacatccaaccgaggctcattggaatgcttgcaaatgagtacttcggtatatcaaaggcactgttgacttaggtattgtttttaaaccagcaacatgtctaactctcgaagcattttttgatgcggattgggcctgcaatttggatgataggaagtctaccactgggttctgtgctaaactaggaggcaacttaatctcatgggggtccaggaaacaaaaatcagtggccaggtctagcactgaatcagagtatagatccctctccactactgcaactgaagtggtttggactatctctgtgctatctgaattgggcattaaggctgctggcacaccagttatctggtgtgacactcaaggggctcaacagcttgcctcaaatccagtttttcactcgagaacaaaacacattgaagtggatgttcactatgtgagagaacttgttactgaaggaagattgaatgtcagctatgttgggttttatgccctnnnnnaaactccatttcaatgtaatccaatttattcaatatcaataaagaaa

SEQ ID NO: 70924 - DNA, 857 bp, Cannabis sativa
tatctctctaatttttagcatgtttccaaacagaatactgttgctggtttgacaccagctgttgctgaatatgttccatggaaagttcctcctcaaggacaagttaaattgaatgtggatgcaactatacactcttcaactaatcagattggattaggaggcattatttgagactccaatggtcatgtgttagctgttacctcaaaaaaaagggaactttcggtcacaagagatggaagcgaaggcattatttcatggattacaatggactagacaaatgaattttcatttcgatttagtggaaactgatgcttaattcttatccactctcttcatggtttaatatcaaattgttcttcttttcaagatctaatatttgatgttaaaaatcaattatcctattttcttaatgtttgtagagatgcaaagtgcaaaccaagctgctcatgccttgactaaacaagctttagcgttggataataattgtaattgcttacgggaaatccctcctgccattggttctgttattgtaaatgactctctatctttataataacagatttattcttaaaaaaaaaaaaactatatgaacatgccagtagtttttttatgtagaacaatgcatatatataaataagaaatctagtaataaaaaataataacaaataaaaataatagaataattatgtaatagtaaaatttataaaatatatgtgaaaatatgtaattttaatcaataaaaaattaaaataattaactaatttaaaaaagttaataaaattacaaattaaccctttaaattagggataattacataaggcaccatttgttgtaaaagaattacatttttacattta

SEQ ID NO: 70925 - DNA, 2170 bp, Cannabis sativa
atcactcttgccagtaagtgctttcttttctatggtatccaatatatgattttaagtgtaatattattatttctcaaaaaaaaaaagtgtaatattatttaaaattttctaaaaacacagatatcatactatacatgatcatataagaaagagaaatgctaaaggacaccagcggtgcttaatactctcctatgtgtcaatatcgatattggtccaattaagtatcaggtcccatgtaatttaatataatagtttttaggaagtatcgctagccaatcgcaacacgacatgtcgagaaagtgttaagcaccactgatatctaatagcaatactctataacaaaatatatatactgttggaaaagaagtaataccccaaccaatattatgcatatattactatatttaattaatctaacaattaagttgtcggtaaagtcaaatttagaagatgattaacaaagatgttagtgaaaatattaagataattattaaataaaataaaccaataattaggttatgatggaggttaggaaaaaagccaaaaaagctagtggggtccatttaatttggccgttgaacagactgttttgaaagcaaaatccatgttcctaaaaaatcaatttagcaaaatacacataatagagtcctataatcccatgaatctctctctctttctcaatttgtaaataaataattatagattatattggtccttacaaaaatatttatatattaaattaagttggtgaaaaaattatattctttgaagaggaagaaaaagtgactatgaattaaactctacatattttatgtaaaatatttatatttacatttttcaggtgcaaattaactctcaatttatattaattaatatggatttaatactttcaattttataaaaatttaaagtgacatgcaagacacaaaaagtaattaatggttggataacatatatacagggcttcaaattgatgagacatgatttccacaagcaagatttcgattgcatgtgtcttaaaataattttatagagaattattgaaaaattatatatatactattattctttaaaaaaacaattaaaaaaaaaaaagctattttatgaagagtctactcaaataagataaaatacaggtactcccgaattgattttttattttattattatatattaaaatatataataacataaatctctctgatagagctataattggatcattagagctaacacctatatatacattatttcttatattattatatatatagtgtcaaacacatgagccaaaaagggcagagcatataattaagtttgtgtgtgtgtaagtgtaatgtagtgccaccacaccaatgtccagagtccacaggccttgttgttagtgatatcattatatcattaattattaattattatgtgctataaaatatgttgtattgtgttgttttagtgggtttccactcataatttgcctcgaattttgcatgtaaatttggggagttgagaagaagaaaagtagtatatagtaatactagggagttgtgttatatattatctctagctacatcactctcagtttgatcagaacattgtttttttcttttataaataagaagattgataaagtaaaagaaagaatagcatatatatatagcatagtatattggtttttggttttaatatatggggtccccatgttaattaatttatagagctggagctggaggaactactgatcacttttggcattattatttcttatcttttttcttactttgtctttttttatttatgtctcttttctgactcagtcaatccccaactcgttatacacgtctcatatatataatatacacataaaagttttatagctatatggaaatctcttatatatgtgtgttcaaaaaaaataatacatgtaggatattatattatataaacatgatggaatatggaacacctttggattttattactatcattaatattcgaccccacgtccttctatgtcacacaacaacttcaaaacccactaaaaaataataacagtaaatattaatgaagaattgattcacctttggctctcttaaatttataaatcgtataataataatagtaataaataatgtttttacttgtactactcttctttttttttttttattat

SEQ ID NO: 70926 - DNA, 1414 bp, Cannabis sativa
tatgtaaattaggtttttaaagcccatatttaatgtttttatttattttaggaagttttatttgtcattggtgtcaaaaaagttgtcagaatttgttgtctttgatcccttctcggggcattcgccaatgtgatcttttatcgccatacttgttcattatttgtgtagaggggttttcttcccttcttcataggtatgagatgaatggttccattcgtggttgcaaggtggctaggggagctccagtggtttctcacatgttatttaccgacgacagctatgtgtattgcaaagctattgaacaagaagcctctactgtccttaatctccttcaggtgtttgaaggtgcctctggtcagcaaattaactttgcaaagtcctctgcttttttcaattctaatacggaggtcagtgtttgaactaggatctatggttttttggagattcaagaggctgatgagaatagtacttatttgggtcttcccaatatcatgggtcgtaagaagactgctatcttgggttttcttagtggtcggttgaagaagcgaatccaagggtgggaggaaaagcttctttctcgggctggtaaagaagtccttctaaagactgttgcccaatctcttctaaattatgctatgagcgttttcctcttaccactggacacttgtaaagatttggaatgtctcatgacaatgttttggtggcaatttgattcttctcaacataaaggtgtacattggatgacttggtcgcgcttgagtcgtcactaacatgctggagggttgggcttttgtaatctacatgattttgatttggctttttttggcaaacaaggctggcgttcattgactcaaggtaattctctagctggtaatgtttttaaggctagatattatccacatggcttgttcctttcagctacacttggtgataatccgagtttcatttggaggagcatctttgagtcacaacaacttcttcgagctggtattcgtacatccattagtaggggtcatgaagctctcattttgaatgagccttggttaccagataatgagcacccatatgtgatttccaatcacccaagcttgataaacaaggttgtctcaagtttattttagatgaatgagcgagtttgggatactgatatacttcatgatttgtttgatgcccgagatcgtgagcttattttaaacattcagttgagttatactgctgtacatgatgggtggtattggaagaaggaaatttcaggtatctattcagttaggagtgcctaccattttatttaggagttaaaagggtcgtggtctttagagaataatttaggcttttgaagcaaactgtggaatttgaaaattcccccaaaagcttgaaactttttttggtgtgccatttctaattgccttgggct

SEQ ID NO: 70927 - DNA, 789 bp, Cannabis sativa
aaaaaaaaaaaaaaaacctcatatactcttattatgtcaaaaattatatttattttaaaataaaaataaataaatatacacattttgtaaaaatgaactgaattataactataaaaccttgcgtaagcattaattaaatcccacacattataaaattaaattaaattttagctgaaaaattatacaactaactattcaaataatttatcaaaactattttaaattattactaatataatttatggagtttgtaattggctatgttatactgtcactatatttattagcttgtaccaaatttattatcttttgaaatgaaaatatctaaaattatcaaacagtaattctattacttaatgttatatacattttgtttattaaattttaaaaagtgaaattatatttatttttgtctagtatactaataattaaaaaaaataaagattttataatttagtaaataaatttataaaaataaataaataaataagatacgataaatgtaatgatttttatatctaagtgtggactgtacaattaaaaaaatgaaatgtgtatttaataaaatatagataaatatatgttatttttcatgtttagaaagttattttgtaactaatatttttaaagacgttttgaatatttaatctaatatcaaatgataattataatacaataaggatgctatatttataatttgtagagttataactaatcttgcatatgttatatttttttggtattgaaattgtagatataatatcaaaataagaattttatttaataatt

SEQ ID NO: 70928 - DNA, 851 bp, Cannabis sativa
  modified_base (266)..(268): a, c, t, g, unknown or other
  modified_base (803)..(816): a, c, t, g, unknown or other
cttaaaatgtccaaaaaaaaatgtctgatccaatcatcaaattgctgataatcattatccgcaacggattagattgaatgttgtataatctacaattgatatatttaagtaattataaatatataattaatattttaaaccataaaggaatagaattaataatttaaaaaagagaaatgctaaaggccaccagtagtgtctagtaccctcctacatgttaatatcgctattgatctaattaaatatcgggtctcatataatttaannnaatagtttttagggagtatcactaaccaatcgcaacgcgacatatcgagaaggtgctaggcactactagtgtctcatagcaatgctctttaaaaaactaaatacctttatgttttcccaaaattatttgtatataaaaattaaagaaaatatttatatttttcaacaaaaaaaactatttatagaataatattgaggctatcttgaagacaaaagttaaaggcaataaagtagtaggtttgatgtttcaaagacgggactatttatgtagtctgattcttttgaaggttaaatacttattgtttggttataaaaatttattttagtgaaggtcttagagcatctccaatgataacattttttaaagatcctatatatttatacataatttaaatatataatattttattttacttttatgtcacattattttttggcacatttagtataataccttataaaaatgctataattatgatctcacacattatatacataatttgtttctttattaaactattatatatatatatatnnnnnnnnnnnnnntttaatttttgattgtataaaaaaaacatagcatc

SEQ ID NO: 70929 - DNA, 1556 bp, Cannabis sativa
  modified_base (191)..(192): a, c, t, g, unknown or other
atccccaagttataggaatttctttgatgactcacaatgcgaaagctgaattcgctaagtgttggtcgcgctgtacagattgcttattgatttgcctcgagcatgcatatgaggtatcatgtttggactatattactccgagcaaatactcgaagtcgattccacgtgtcaccatcatgtgatgccacgtnngagtgcaaaaattaggataacaaatagtatacagtataatacaacacagcatggtgtaccataggaactctcaatattgagatacattctaataaaaaaggaactaccatgccaaagtttaagaagaaagataacatatttatttatttattaaaaaatatattgtaatttttcttatggactccaaagttggtctacatatcaggcaaatttttagagtttttatttttgggttttgcaaagtagtgtatcaaatcaacccattttggggaccaagttcctgggattcaggttcgagtgggtttgaattcatgtgggcaagtgggtgtggtttaggtgctgggttcgggttgagctgggccagaaaaattgcctttttcttaataaatttgtatcagatttttcttttttaagaaataaaaaacattaaataaataatgaaaacaacagtatagaaggaaaataatataaccctaaccattccatcctccggctccgtcttgtagagtctggctactagtataagccttttcactattgtgaatattggtctgtttgtcccagtttctaagtttttcagtgggatttggctgatacttttgaagagctcgagagatggcagaaaagggaaaggaaatttgtatggatgttagagatgaacaaagggataaactgctggagagggatagcaacatggagatggaaatgctggagttatttgaagacataactcttgaggatgtggtagctactaaagcttgtgttggaagggtgattggatgcaaggatatgccagcctcagttgtgaagaagattctcttgggagtttggcgccggttggggtattggagaatgaaaaaatgtgaggatggggttcttggattcttctttgaagaggaagaggactacaatttcgtaatggatagaagaccttggatcatcaatggtgtccttctcaatttgaagtcgtggcctattgaaggtgaggttagtcttggggagttcgaagtagctcttttttgggtccaattccacatactcccgacgaggttcttatcaaatgacaacatcccgattcttgctaagaaggtgggtaatctggtcaaacaagaagaaaaacgcaaggaggagttggttcaacgggggtttttgagatgttggattgaagtttggctttctcacccaataccggcgggtttctttctcaaatcggatgggaaaccagagtcctgggtgcaattcaaatacgaaaagctaccccatatttgtttcaactgcggcaagcttgctcactaggagaagctttgttcatcccagacggctatggtgattcctcgtaatggttcagcagtgcagatgtatgg

SEQ ID NO: 70930 - DNA, 876 bp, Cannabis sativa
ctgcatgggtcagaactgaaaaaaccaataacagtagaactaggactcaccctaacgagagccttcaccatggcacgagtatatgtggcattagaagtcaaggaaagaagacatgcagaggacgtatcaagagagacttcagccatggaagattctttcctctttgaagcaaaggagcgagtcctaatagcacgcctgcaacgtagaactaaaacctaacagttcaatgacaagagcacaagaggatccgtaataactaacatggcacaagtcacgcagtttaggaaccaacaaagtggagagggactacctcggatgactatcattctgaccgaattaatgcgacgtctaagaggaatgaaaaaaataagatggccataaaaatgactactgatcctaaaaaagagataaaagttggtattgtgccttccacgatgagcatgggcttgcaacctacgaatatagatagatgatggttaaagtgaatacgttggtcgaagaagggttttttcgagattatttggcagcagattcaacattgcacgtccagcagaggcgagataaaacccaagaccactctccccctttgtacatcaagaaaaccatgaatgtaatttctagaagatcaaatttgagtggaatctccgttcgggcatcagtagctcctgctcgcgggatttgatcagttaaaccgatagcagtaatagacaatgaaggacttaacattagaatcatgtttggccaaaacgaagccgctgagtttgcctactctcatgatgatgccctaatcataaccctagatgtggcccacgtccaaatgaagcgaatgcttgttgatacatgaagctccacaaacatgttgttcgctgatgttct

SEQ ID NO: 70931 - DNA, 1212 bp, Cannabis sativa
tacagttgctttttctcacagctagggccggccctaaaatttagtggaccatagaaaaaaaaaaatattttaggcctttatttagaaaaaaatgtggtatttttcaaaatcagaaaaaaaaaattacagaatttttaaagggaaatttttttttgggccctgggctaggtgggccctaggcacaggcctagcccgcctatgcctagggccgagcctgctcacaacacaactacaactgttttttcccacagcacagctgtgccaaattggcccttagtgaatttgggtttttcttaaataggtttggatcgtgtttggattgatttgtccaacctgtttaataaaaggattatatttggattaacacgattaatacaaatataatccgtcaaccacctatttaaggttgtattattattctatattttttaataaattgttaagtaagtattaaattttgcatcaatatttataattatacattaaagcacgataataaaaattgatgtaaaaatattacaaaattatttttttatacaaaatataacttaatttttacgatgaagatagtctaagatatttattatttaaaaatgttttaaaaaagagtaataattttattactaatgcttgaaaatattattagaagtattagtatttagaaatatttgcataataaactaatttttttttaaaaaaaaaaaaaattaataacaatacgttggaaaaattttcacttttaggattaattgtttttatttacaaaaatatagattttattaaactgttctatattcttttttgttttttttatagatggcatgaagttaattttttcgttaattttttttattttatagtttatatataattattgtgtgttattttttaattatttttttactttttacaaaataataataataataataataataatatctttgtaactaaaaactttacatcgtaaaattataaataaaatatatatataaataaaaaaaatatttttaaaagaattcctaatatgaattagctatggatgaattattttccaaaaaaaaaaaaaaaaaactatggatgacttagaagcaacatatatttattctatataaagtgtgtctatataataaaattcttggtttatgagaaattgatgggtgactttttatttatattaaaaataaaatggcttattattaaaaataaaat

SEQ ID NO: 70932 - DNA, 769 bp, Cannabis sativa
tatatatatatatatcatgataattgatatacatgaatatatgttagaaaaccaaacaaatctctcctacaatgtatgtatgacatgcaagtgcatgttccttaataatacacagcatgaaaactttaaccaacaagataatatttatatagtaccccttcaccttaagggaatgtttttattagttttacactgtgttttcacacgtgttttcaatatgtatagctagtttgagcttaaataataatgttgactactcaccccaattttattttggatttttgaatgtatgtatgtatatgtactgagtagtctctctctttggatttaaatatatattctaaaaacaaacaccaatatatatgtatatataattaattcactctcttgtagtttaatttattatatatatgtagttggactcatgtgaaattttctatataaacatgacatagtcaaaaagatgtttataaatatacacatataaactcacaccaaaaagtctatatatatttacagatcatgtcagccatgcatgatttttgacagagaattgtgaacgagttttttctatttaattattatatatttattttgaccttttatattgataataatgtatgattggaaattaatatcatcatcaaaattacatgtttaatattatatattcttaattaagtttattagcaataatactatttttccatccatgtgatgaacagataattaaattaatgatctgtttaattctctctctctctctctc

SEQ ID NO: 70933 - DNA, 1714 bp, Cannabis sativa
gatatcacattcacatgaaatctgggagtaattatttattcataaaccccactgctctatatgaaacattttttcttcagaaactgataagatgcattgcatactctatttatatgttgatgtttgatatataaaaaaaccccattcttaagtgaaacattgacaatctttagatgattgattttgaagatgttgtacacacatcctttcaaaagaataaacaaatcacaattagggcaaaaaggctgatattgcaaaccttggcatggagacaaaatggagaatgcttcccgagtgtaaagactataatgcatacaaattaaagaataaagaattggaatataaaacatgttttagagaagagaaggtcacctttctagctgacgttgaacaccatcctttttcctgttttcaagttaaggacttgatcaattacatcaagatgaacaaaatgataaataatgataccaaacaccaaagtacttcaaacaacatagcgagtgtgcgtgtgtatgtgcatgtataaagaaaaacgaaatctcagattacacttctaataacatgatatttatattaaaagaataacttctaataacatgatatgttactaattacaaagcatgttaacttactttccaaactgttgagtataccaggcatcatgatttccaagaataactgctttaggaaattcaagattggctagactttgaacaagttcaacattctcttcaccaaaatcacctgtaaaatgtataagagagaagaagcagaatgaaataaatatactgaaaccaacacacctctttatattaagggaagctatcgtttagaccaccaagtggggtccggaaaaccatatgcctctatacggcgggttcaatggtgagagctgagaaagtttcaccccagtgggagtttgtgtctgtgtgatgataactaaattgtttacaccaaatatgcagagatatcaaaagtttacaagagtcttacaatccattaaaagtttgatcaggagtctttcaatccaaaatctccataaacttttcatacacccctcatgcactaacttcaccacttaaataaagctatgtgggcataagaaggtaccctaaatttgcaaattgcaacccttttaaacacagtaggtaattcaaatagggagaacgaaacctacctgtaaacagcaccaaatctggctgcatttcaacacagagtcgtattagacatgtaaagctttaactaaacaaattaattagcaaaaataaataaatcaaaactcaattttagaggctcatgctttaaccaattgacatataaaaatatatgataaaactaaatatttacattatcaaaattatcatttccaaatcgaagaaaattatacctgtagcaatcgaagtgctttcgtatcttcttctagacaccaatcattatgcttgaaaattaaaacaaaaaaaaaaaagcttgcataagtacgaaaccgtaattctatgaaagaaataagcaataaatcatccgaagaaaaaaacacgagagagaaaaagtgagaaagagttacgacgtcgccgacgacggcgatgcgagcggaggaggaggaggaggaagccatgggaggagaagaaagagtggacctgggcttcgacagggaaagagaagagcccatgagggagcagagagttggggcgtggaacaacgcgcttggcatcagctt

SEQ ID NO: 70934 - DNA, 630 bp, Cannabis sativa
catttcatatcatatattattatagaagaattattgttgagcactagcagtacctaatactttctataagtgactttatacaattagttagtaatattttttaaaaattatgtttttgagttctagaggattcactatttaattacggtatgacacaaagaagtgtgataggcaccaataatacttttcagcaattccctattataaatttataataatatatataatgaatttcatatcttcacatatattctcttaaaagtaaagcaattctctctaagcatgaacaataataatttatttcatttgttctaggcatgagcaatatgttcttgagaaaaaaaaaacgaataaaaaatgtaataatagtatagcgtataatttaattgaaaacataatgggtgtcgcaatgtttgactcagtggaccactggaccatcacttcactctccaacattgttcaatttttatttttattcgaagtatttaataaaaattagtacatctctcccacccaatagggctcagcttctcaatgctattgctcccccttcacataacaaagctctataatttgttgacacacatgaaccccaacctcatatccagtctttatctaaattccaaaaaa

SEQ ID NO: 70935 - DNA, 1470 bp, Cannabis sativa
tctctctctctctctctcaatatcgatcacctttctttctctctctctctatctatcttttccgatctcctctctctctctgtctcccgatcggattttctagaatttttttgcaatctttttgttaatatttctatgtataaatatccctattaagatatttttgtgttctttggatttcgatatgagaaaagataatagttgtggggaaatagtttcaaatgagttttgaggctgagattttatatatatatatatatgtgtgtgtgtatgtgtgtttatttatttattgcatttaaatttgtttaaatcggtttgagttttgttttgttatttttttggtgatttggatttgaaaaataggttgtggtttcagtagtgatgggtggtgtttatcgtggttatggatggtggtgtggtgaccagtatgactgaagatgaagaatgaaaaaagaaatcaaaaaaatatgacatgttaggaaaaaataatatttttctaatattttttattttaatttttttaaaaattaattatttatgtggaccaataaaattgtgccacatgtatattatgttcacgtggataatccaacatggcatttaacaaccaaatttagatagaaattgtaaattactaacgctataatagttttgggaattttggcgccaaaatttgagttttggagattaattgctagagaaataaaattattggagatttttctgcaattaactcatttaaatttgacactcaattatctaacaagtaattttaatcaaccatcttcatttaaagagaaatactaaaagacatcagtagtgcttaggactacctaaaatatcataccgctattagtacaattaagtatgagataccacatgatttaatataataatttttagaattattaccatttttgccctggaactttttaaactacctagttgtgccccttatagtatacaacttgttaattataccacttataatataacttttacagtaacatggtccttctatcatattttgttcaattttatcatgagacgagtgacgcaatggatgaaagtcgataaatggatataaattaaatatattacacattttttacttcaatgattaaaaaactaaaaataaaaatataaattactataaaaaaaggtattttattttattatttattaacgtaaaaaaagtaaaaggtattttattgacatctatttatcaatttttatccactacttcaatcagtttacgataaaattgaatagaatgtgatagaagaactatactgctgtaaaagttatatttatagggatattattaacaagtcgtatactataaagagcataaattgatcatgtaaaagaatcagaggacaaaaattgtaataccctagaattaagaaatgaattagcaaaaccctaattagataattatgaataaatgaggaattatattattatata

SEQ ID NO: 70936 - DNA, 514 bp, Cannabis sativa
tttttatttatctatttatcaacccttaaatttatcatctattgctataaaaactttcctactatacaaacaaaactaatgttcctattatttacatgtcctatatacattatgaaaaaaaataaatgcaaaagtttgttataagtttgtgagtagtgataaaggcatgagacactaattgttaatttgttacaaaaaaaaaattggtggggtccaacaacatttaataaataaaaaatattaattaaattatgtaaaagaaatcatattctttgccacgtaggtaagcagtggcagagccatccacgacaaaaaaaattttaacatataaaaaattacatttataaaaaaaaaatattatttttattataaaaaaaaaatagattttataaatataaagtagatatataagaataaatataaaaatgtgaagataaaaataaaaaaaaaaatacaaatttatatgaataaatttataatatgtgatgacaaaattaaaataaaaattaaattt

SEQ ID NO: 70937 - DNA, 816 bp, Cannabis sativa
gcacttctctccaacccaacaaccccaaacctttcaagtttcaacatctcagacgatgatgttttccttcaccttttaaaatctccatgtatcaaaaaatctcttgtttgggcagccctgctttcaccctaggagaaaaaccaatttaaattcccgacaactaaaaatggaagtcagctcagcgtgtgaatctttccaaaatatgaaacaaatattgtatacattgattgaacgagaccacaaaccaaactggtgaccaataatcattgatcatatttattgtcattccaatagaaatgaggggctctttcctcctaaaaacaggaagtcttgttataaaaccacaaaatgaagaagataaaaaattcacactacaccttttctttcttttcttttttttgtttttgttcttttctttgttattctctaataggtgctctcagatgttagaagaccattatacaaggttggagaagaaattataggtaagaagattaccatgacaacaacgaataattatgcatatgcagtcagctatatcatgcaatgactgtcacaatgaagactcatccttccattgtaatctattcagcccgtcaacaatggctcttcgaaactcattattgtggagaaggaaagatgagacatggccacctgtgacccatctcacttccgaaccgggccaagccttttgaagctccagaacagagtgttttggaatgtacccatcatcctgaaacatgattgcaacaaaagagtaaagttggaactagtatttactttcagcaattgttctaagaagattctttgcttcta

SEQ ID NO: 70938 - DNA, 1562 bp, Cannabis sativa
ggtagagtttgggcagccctcgggcagggtgtcaactatgtctggacggactatgtatgtccagttaaatggaaggtagcgtctcgaccccttcttcagttcccaaatgacgcaaccgtattcttgacattagatctggtcagggtaaaagtggtgttacacctcaagttctggggaaggcatgtgttcactactatcttcaaagctagagttagagaagttatcactggatgaggatggaatggcacagagacgaggatgatcctcgtacagaagttaaagcagattttggtcgatatggtgtttgcctccccaaaactcacaaggtttcatctacaaaacgtaggagacaagctgatgagaattggttggggcaacggataaaaaataggttgaatatactaaccaggtctgactaaggaatcaaaaatcagaaatttcactcataaatagaatttcccaccagaagttcaaaacttcaaattgaaatcttattctctctaaatccctaatggataatttaaaatggatatcgtggggataaaatcaaagcgcagttagaatcaaatgttgtggtaaagcataatcaagatttctaaatcttaaacctaggatttctatggttgtcctagaacaatttcaagaacagtcaagatttgcagccagaaatctagaaaattaagcatgcaagtgtataaaagaaagaaataatgaacttactctatggtttgaagctttttgttctgatggtgttggaaagagtttcttgggaattctttgaagaatttgagagagaaatcgcctaaaaatttcattgctctggtttttcaagaataaagatgactaaaaggattaattagggttttcaatcctattcataagcaacctaaaagaaagaagtaatcatttcaaaatttaaatgtctcgaattccctttaaaagtgtacgttatgtaatcattgctggtagagtaaccatcttcacgcgctggcattaagtcgcgataacgaggggaaattgtcaatcagcattaataacccaaaattgtagagacccttggttggggtcacgtcagttcttcattcgatgcctaggacacgcgtgacctgtccggacaagactccagatcgagtgaagtccacgtgcgaccaggaaggtcttgcacagacttagggggaaaatgttatccaattatcttcacattgacgtggcaaaaggaccgagcaacacgtgtcctatatttctgatacctaggcagaggtaaatgtcccaagcaccctgcacacaactcgtcagcatctataattgttgattactcaaatagagctgtcgtaaagacatccgaccaggtagaagcttgttatgccgagcatcttacaaaagataattacttcagaatgattttgttatgaccagacacgaagacaatccctataatcatgagattgaatctgagaaagatggcaacttgctttagttacctatttcatatatcgtaattatgtaatcattgtaatttcctattctatgcattgtaagaaaaagggaaaccatccctcatg

SEQ ID NO: 70939 - DNA, 791 bp, Cannabis sativa
tagtaacaacaaactagcaccctaatttaaaacggttgaaaatcaatatcaaacagattatatttaaaataaaagctgaaaatcaatatcaaacggattatatttaaaataaaactgatcagaaaattctctataattgtaagccctcttgtggataagtgattttaattctccatacaatacaagtgacaacatcatgtatgaacaaaaaaatttctaataattatatataaattatttaatattaaatattaataatttaatattaaaaaaaaattacaaatttttcagtacataaatcttaaaaatacaccacactgaataatactactgctttgattacatatcgtaatgaaattataattttttctatataaattatttttttctaaaaacaattgaggtgcacaccagaccagttaacccacatcgatcaacaaaagacagaggcggtgtgtcttaaattttctccaaaaaaaaaaaaaaaacaccacaccaactaacccaaatcggtcaaaaagacaggcggcgtgtcttaaactttgcactttttaattaaacaataagacaaacttaaataacaaagtgggaaattccacaatgatggaaagttaaaaagaaatatatataacgagtataatttacacaataaaaagacaaactagtaggccatatgcgaatcattatgctttcagtccagacatttactggaattttcctactaaacaaactataatatatctggtctggaaacacacacttgaaaatttaagcctaaaagaaacatttca

SEQ ID NO: 70940 - DNA, 929 bp, Cannabis sativa
ataatattaattaattaattaataatggtaagtaagaagagaagaaaagaaattggtcggcaaatgatagaagttgtgatgtgttgtgttgtgtatttatttatagtggaaatgaaccaactcactcactcatactcatacacacacttttcctaactctttattcaataaaacattaaatattattttaggtttattggactcacatcccatgtgctccaatagttatccatttccttactcatttgattaaagagtattttttattaggtacaaatagtgtttaatattatcgttttataaatgattagtgatattttataatagacattaaattaaattaggtaaaatttaatacttaattacaataataaaattatgacacttaaatcagctaatactagtgttatatatttattagtgtaaatataaatttaatgtacatctatatggtaattcacttttaacaagttagattcatttcaaaaataattactagttagtttttcttttcggattgataaatatggtttgcaaattattacattctaattaaataattattataaaatataattatcgtcaaatcaagcgcactataatattattaggtgacgtttagttcagtataatagaataataagaataatactaatagcaatagatatcgtgatgttagatttatttttggaaagataaggagaatgagtgttatatattaacaaaattatctttactttaaattattaatttatttattttgataaataaaagaagatcacgtggtgtagattttttcccatttcttcggtcatatttgataattgtaagaatcacgtgtcagttatatgagttttataccgcagtctactttaattgggtgatgtaatagtgattacattataattataattacaatttctattacc

SEQ ID NO: 70941 - DNA, 1573 bp, Cannabis sativa
tgagttgagtcttgtacaagcctatgttggcagagttgatagcagtgtagtactcattctatccacatctcttaccatcaaattggatcgcacacacttcctttcttggaagtctcaagtagttcctatagtcattgggcacgatcttgatgacattcttttcagtgatgcttctcctcctcaaatcttgatcgatggcactcttaacccctcatatcagcaatggaagaaacgggatcaacttcttctctcttggcttcggtcctccatgactgaaggagttcttgcttttgtggctaatcatcacaattcctttgctgtttggcatgccttggagcagagatttgctagtcaatctcgtgctcgattgcttcaattaaaagatcagttttctaatgtgaacaaaggcaatctctccatctctgattatgtggataaagttcagatgcttgctgattccttgactattgctgggtctaacattagtgatcaagacatcgttcttcagatcttgaatggtcttagtgctgaatttgatcccgtagtttctggaatcacatcaagaagtgattctttgtctcttgatgaggttcaagctcttctcatgtctcatgagagtcggcttgaacaccatagctccgtatctgatatttccatgaagcttcaagccaatcttgctgttggaaataatagattcaacccaagcaaatacatccctccacatgctcgaggaaatgtcaatgacacatcttcaagaactgttggcagaggcggttatcgtggatccttctcttttccaaatcgtttggtgtgtcaactatgactcaaaagtggtcacactgctgttgtgtgtcactacaggtttgataaaaattttgtcccaccaaagccgaatgctgctccacttcgtgcttatctcacagaattggaaatggaaagtgactatcaggtatacaactcctctgttttacctgactttggtgatgataatctctggtttattgatacaggagctaatgttcatgtgaccaatggatctgaaaatcttgaatctccctctccctacactggcaccgaatccttggctgttggtgatggtaagcaattattcatcactcacatagggtctactcttttgtctcccaatagtccatatcctttacaattaaattctgtccttaatgttcctaccatgaaaaagaatttagttagtgtctctaaactaacacatgataatgatgtctatcttgagtttcacaaaaattgttgttttgtcaaggacaaactcacaggagctgttcttctcaagggaccagttaaagatggcctctatgtgcttggtgattccaattcctctgcccctgctctgcaatgtaatcttgctacaatgtctcagttgtatagcattcctagtattcctagtattcatcatgattgtaatcaatctactgctataccagtagactcttgtaatatacccaacattaataaaacaagtgattttgactatatctcacattgtttacccactgctttgtctactacttcacagcaagatattaacatttggcac

SEQ ID NO: 70942 - DNA, 1202 bp, Cannabis sativa
aaattactatacctggagtaataagcaattcggagatgattgaatcttctctaagattgatcgtgtgcttgctaatcaagattggatggtaaagttcctcacggctgaggcagtattcatgaatgagggaatttttgaccactcacctgctgttttaattgttcattacaaggtggtgactgataaaaaaccatttaaatactttaaaatgtggaaaaattatcccaactatactgagttggtgaaaagcacatggcaggggcaatttaaaggaactaaaatatattgtgttgtctctaaatgaagagtatgaagatggctttcaatgacttaaattctcagcacttttccgatatccaagctcaagaagttcacgcaaggaatacatttgaaaagtgtcaaaccaagctccaccagcaaccacttgatattgggctgcaactttcagaacttgaagctaggaacaattatgttacaacacataaaagtttcttatcatatttgcagcagaaggaaaaattaaattgggcaaaagacgaagatgagaattctgccctgtttcacaccagtatacaagagagaaggcgacacaatttggtgttatcaataataaatgctaatgggaaaagggtaaaagagccaatagaagttctagaagcttttatacaatactacttgggattattgggcacttgtatgcaaagaagaatgaatgtacatcagatgataatcagagagggaaatgtgttaacacgaagtcaggctgatttcctcattgctgacttcactagagatgatgttaagttaagcaggcagattcagcaatcccatgtttaaaagcccctggtccaaatggatttgggagctactttttttaaaaaaaaattgggaaattattggggaagagatagcaaaagccataatttatttccttaagacaagctgcttattgatagaaattaataatactgatcttactcttgtagcgaagctcaaaatgcctaaacactgtgaaggattacaaaccaatagcgtgctgcaatgtattatacaaagtagccactaaactcatttgctcaacacttaaatgtctacttcctaacttggtatcccaaaaccaaggggggtttaaggtcgcttcatagcgcacaacataatgatttgtcaagatcttgtgcgctattatggaaggaagatgacaa

SEQ ID NO: 70943 - DNA, 1275 bp, Cannabis sativa
cgtaaatttgaataatttccttatattgtattgagttagaaaattgtgaataaaattaagaataggctataaatatatacacatatattgtcacaaataataataaaagtttttaaaaaaactacagaaataaaaataatttactaccactcgcacactatttttcatgtatgaaccaaatgaatacatgataacgtaacgtataaatataattttgcatcaaattctaattggttttggtaatttatacagtgaggataaacatcgatcaataagtatatttcgttcgatagtaacgtaaatgattaatttaacttattatcctttaataaaaataaataaaattaggcataatttcaaaataaatgcaattaaatattaataaaccattaaaattatttaaaacatttatatttttttactcaattaaatcatttttctgtaatttaaaagtttgttttggagctctaaaaatattattatttgttgttggttaggaagtaagtaagttttaacttttattcctaaaaaactcttttgatataaatcaattttagtagttttcttataagttaaaaataaaatgcacaagcttaacgatgacctatatcatatcaaaataaaactgaacaatattaataatattctcagtaataaatagataatattgtttcggaaatttgaatttatatgtatataattagtgtatattaaatttttgaatacaaatttattaaaattaaaaaataggtacattttatatccatacccattatacacttttctcttttatttttttcttctaacttcaccatccatactctctattcccatctatattgatggggtacgatggggtccgatggtagcctgatgctacctatttttttttttatatatttttgtacataaaaaaaagtaacatcaggtgactatcggaccaccatcagatcaccatcggaccatattaacatttatagatgttaagctccatttattaaactcgttaggaaggcatcgggtcaccatcggactactatcggaccccatgtcatcgggctaccatcggaccttcgtcttcaatcttcattttaacaacaagaaggcatcagactactatcgtactaccatcgggcctgacaaaaaaacaagttttttgcccaaaactcacatctggccattttcaaccctaaatcttacatctactcacacataacaaatattaattatacaatttattcctttgacaatattaccgatggtgaagccgtggtt

SEQ ID NO: 70944 - DNA, 2309 bp, Cannabis sativa
  modified_base (48)..(56): a, c, t, g, unknown or other
ataaattttatattaaattaaaattattaaaatggggtgcctttaaannnnnnnnnggtgtaaataaaatttctcatattgaaagtattaaagtaatagtttttgtaaataaagggtattaattgaacaaagactagtatgtgaaacttatggtagtaaagtttgaagtaagtgtatgttttcctaaaaaatgcttcttttaatttgaatgatacttctctttagtttttgaatgatataaaatgtgtatatctttttttgttttttgaacaaatctttctttttcttttaaaacgaatataaattataaatattttgtgaattagtacatataaaatcatagaattttttaaaaaaatatacctaaaatataaaataaaaataatttaacaaattttaattacaataatatcttgccatgtcattaaaaaataccttaattctaaaataatatgcctgaatgaaactaatctcgaaattctcttctttttttttttttttttcaattttcttgcatttcaaaaataaccttttggttacttatgatgttgataataaaccaataagtaattttttcataaaaaaatataacttctatattatataatttaagatacattttggttacctctaaaacttatatgtatgcactttaataatcaattaattatttaagttatataaatacatttgagtaacttctaagtttatttttaaaaataataaattgccatccagtaagctatcattttagtaaattgtatttaaaaaaaatatatatcataaatattcaagtcattgatatttttaaatgtaaattaatatatgcattttaattaattaaacaaagaatgaatttacaaataacttttaacttattacaaagtcgacattttttttaggaccaattagttataatttctataagataccatttggttacttctgataaaatcatcaattctaaataaaaagatgatgaccagaccaaaaattctataattagatatgtctatactcatatatgtcaaataaacttattagtttattttggtatattgaaacaagttttcattctttgtttatatgtttcgcataacttaccatcatatatgctaacaaatctattggtttattttggcgtattgaaataaatttttatttttcttttcatatattagaacaacaattcatttcacttcatatagcctaccattatatatgtcaataaatctactagtttctgtttgttggaacaatattttatttttttcaatacagggtaaactataatcaaacataataatatacaccaataaacttattagtctatttttcgtatattggaataataattcgtttttctcaagtcgagacatcaaatctgattgtatacaaagtacataattgtaacatgttttacatactcacatagtaaatctggataacaatatatgcacttgtcatgatgagatgtcttgctcacataaaacgtgttgctcataagtttatttggcatatatggctatactatgcctatactcatattattttggcatattgaaacaaatttttattctttgtttacatggtagcctttttgtatagtctatactattgtatatgctaataaatctattagtttatttttgtaaattaaaacaaatttttatttttctttttatatattggaacaacaatttatttcatttcatatagtctactattatatatggtaattaatcagtatatgattggtgtaataagtaacataaatgtttctttgattttgaaaatagagaaaaaaatatatgtttctcatattttaaaatgttcatattaaaaaatagatcacgagaggttttttttaaatttaactgagtaacaatgtagccaaaaattattttaaagttaaaaagaggagagagaaaaataaatagagagaaaaagaataaggggacaatgaatgttattggaaagggaaaatagttattggaaaattttggcaaagatcaaaatgcacggtagaaaaaagctaatgtgaaaattgaaaattaaatgtaattaaagatgccaaatgtaaatttccctagaatcattgcattatatttctcaaatatcctaaaaatatattgcattagatttatataatttaattttaccgaatatcataatggggtaagttgaaaaataccccttttattaattaagcaatcaaatttgcctctaattttatatttatttgaaacatacctctttttatatgtattgtacccaaaataccctaacataagagagtcacatggaga

SEQ ID NO: 70945 - DNA, 2877 bp, Cannabis sativa
ttgagaatctgagaggaggacattccaaagactactttctacactaggtatggacactatgaattcttggttatgtcttttggactaaccaacgctccaatagcttttatggagctaatgaatagggtattcaaggatttccttgatatctttgttattgtatttatcaacgacatctttgtgtaatctcaatcagaagaggagcctgagcaacatctttagatggttctgcagtaactacgagaacataaattgtatgccaagttcaaaaagggcaagttttggctatctcaggtgtcttttcttgggcacattgttagtaacgatgtaatcaaggtggacccaacgaagattgaatccattaggattggctgagaccaaagacagttacagatttcaaaagttttctgagttcggctggttattactgtcggtttgttgagtgattttctagaatctcaacgcccataaccgaactcactaaaaagaaccagtagttttttttggaaagacaagtgtgaagcaagtttctaggagttgatacgaagattgatcacatctccagtattagccctgccatctgataaagaaaagtttgtagtttactgcgatgcatcctgacagggtctggggagtgtattgatgcaggtcgatcgggtcattgcttatgcctcccgtcagttaaaggaatatgaacagtgatacccaacgcatgatttagaacttgcaatggtggtttttgctttgaagatttggcgacattacccctacggagaaaagtgtgaaatttataccgaccataaaagcctcaaatatttctttactcggaaagatttgaatatgaggcagagaagttggttggaattggttaaggattacaactataaaatcatttaccatcctggaaacgccaatgtgctggcagatgtcctgagcaaaaaaggtcccaagcatgtaacaagtatgattcagatttcaacttagttggcagatgacatggtcaaatcaggcattgagtttgtggtagacaaactccataaattgacattgcaatctgatctattagatagaattaaagccgcttagttaactaatgaagatccaagaagaggttttagctggtcaagctaaagattttacggtgtcagataatgggatgttgttgtaaaaaactagaatttgtgttccaagtagtgtggaacttagaaaggagattcttgacgaagctcataccactccatactcactgatcttggcactaccaagatgtatcaagatttaagctccttttactagtggtgtaggataaagaaatatgtggttgagtttgtatcccaatgtttaacttgtaacggattaaggctaagcatcagagatctgcaggattagtacagccactggcacttcctgagtggaagtgggaggatgtcaccatggatttcgtggttgggttacctaggactagaggaatgtatgattctacttgggttgtggtagatagatttacgaagtctgtacattttctaccagtggagacaaccttattgtggatcagtacgcagagttatacgtgaaagaaatagtgaggttacatggaccccgagtccattatgtcggatagagatccgaagttcacctcgaaattctggtagagtctccaatgggccatgggtaccaaactaaagttcagtacaacttttcatcctcagattggtggacagtctgaaaggataatctagataatggaagatatattacgtgcttgtgtgttggattttgaaggctcatggagcaagtacctgccgctgatagagttttcatacaacaacaattatcatagtattataggaatggctccctatgagatgttgtatggcaggacgtgtagatctccaattcactgggatgaaactagagaaaggaaatacttaggtctggaatcagtgcaacggactaatgaagctatagaaaagaataagatcagaatgcttgcctctaacagtaggtaaaagagctatgcagatctgaagcgtagaaatgtaggggatcatgtattcctacgagtttctccaatgaagggatcaaacattttgggaaaaaaggcaagctatgccataggtttacaaggcctttcgagattcttgagaaggttgagctggtggcatatcgcctggtcttacctccaacactttcagcagttcacaatgtattctatgtctctatgttatagaaatacatttctgatcctactcatgttttgagttatgaaagtttagcacttcagctagatttatcatatgaagaacaattagtttaaatcttagacagaaaggataaagtccttcggaacaagaccatagctttggtcaaggtactctggagaaaccataaggtggaggaagccacctgggatttgaaatctgacatgagggctcaatatccagagctgttcaggtcagattttgaggacgaaatccttttaacgaggggataattgtaaagaccgcttaattgtttttgtttggaattagcagataattagggcttaattatgagtttagattattaattatgatttatgaatatatggagatttatttcaatttagggtttatcatgtatattgtatatgagattttgtgttttccatattttgtgctcggtaacattggaatgcggcgtttggccaatagaattatattttagtaattttgtggtagcggggcaacttagatagacattgagaatgtcggaattgtttgaggatttaaagatcaccaaaatacccctaagtgtcaagtgtgctttttggcttaggcaaggggcaaaatggtcttttttttagcctttttgtctcttttatcttttagtgactta

SEQ ID NO: 70946 - DNA, 2182 bp, Cannabis sativa
gagagagagaataggggagagagagtgcgagaaggttagagaagggagtttgggcaccgattgtgggttgtttggtgtggcaaccatctacaaagagagcaaagtagagggaggcattgaagaagatgagatttaggtttaggttagggtttttttattttcttttcttttatatatatattttttaattttaattttaaatcaatttttttattttattttaaatatttatgtacgtgggccaataatatagtgccatgtggacaataccctatgtacacatgggtagtcaagttggcaattaacaactaaaaatgaatagaaagggctaagtgataacaaaacttgaatttaaagggttttatcatcaaaaaatgagttttagaggttaattgttagcgaggtaatactattgggagttttgacgcaatttactttttatagtatatatagtaaaaaaaaatttgtgaaagaacatgacaatttgaaaatagcgcaccagcctaatatatatagggaagggaccttcttctattggggctccaaaaagactccatcgatgggggtatctcaaagacaatcagaacgtgtcacgtcatttaatgaagttgtgttttatttgagcaagaaacatcatattaaaataattgagcatctttatttttatattatttatattttttttttgttttgttagtttctctctctaaaattttatgagcccttttcgtttcacaaaccatcgacaaatccaaccaccacctccatcgatgaacccaaacaatacctccttcaatgaacttaccctataatcaaattctcatttttctctctttttcttcttctgtaatttagagatccacaatagattaaatagatattttttgtgattctattcttaaaggtccattgtgggaagaggtttaaaaatacaaagaaaacatggatctatagacctaaaataaaagtggaagaaaaatttcaaaataaatattgggataaaatctctaaattcctaatttaatcgaatatatgaatgtcaattacttgagttttgtctgtgttttaaggaataggtgggtcgaatatgtaaacaccattcagacttgttataaatttacagtaaaaaaaagacaaagaagaagaagaaggggattgaagagacagagagagaaagatgataaattaaaataatcacgtgtttctcaaaacagaaagcaatgacacgtgacaatcttttattcattgaatgacatcccattattagaaaattcttatatatatataaatatatagagcaatttgcgatgaaatatctttatgttttaatttttgtacacttaattccttatttttttagtagaaaatcctcttaagtttatttttctttgcaaatttgacacgccagttaaatattaccgttaaatatcaactggatgactactgtatacacgtgtatatgtaacagtaaaactttgaagtcgatatagtagtaatctagttagtatttaacggtaatatctaactgacacgttaaatttgcaaagaaaagtaaacttaagagagttttgccacaaaaaataaaaaaggggttaagtgtataaaagttaaaacataaggagattttgttacaaatttctcatatatatatatatattcccctctagcgtctactatgtctctcacaaatatatatacttttagaaaattctacaatgcaccattctaaaagtgcaacgatgcactactatttgtttcgacacttgaaaaaaaatttagtccaatttttttctcacggtcttgttcgttatagttatttaaaacattaaaaaatttaacatgtccaaaattgagttgaaataatctgttgcacgcataatttttttaatttatgaaagatgttttaaataaataaaacgtacacgaatattaaaaaaatttgactaaaaatttttctgaatgcgaaatttatagagtatagagagttcattagtgcattttttaaaaaaacattatgaaagcacccaataatttatttaatttagtagtagaaattacactatatatgggaaaatcttaagagtttacttttttatggcataaataaataaagctaaggagttatgaattttttttgtttttgttttttttttttaatatttatatggatttttttatgcca

SEQ ID NO: 70947 - DNA, 2283 bp, Cannabis sativa
tgtttagatatgaagattctctccatgctcactctcgtgttgttttaaaaaagaatccttttgaagtgtccaattatgtgcccttagaagaattttttggacagggatatgaatctaatcaaggcttgcagcaagtcgttgatcaattccttaacattggctctgacttgggcagcttttctgttgacccagttccctaacctgtcactcaaagcgctcaatttgaacaacctagatcacaatctgtctatgttgataccttcagtgctctctccactatacctctaccccttgctgtgaacacctctattataacccatactactaagggaaagggtcgtggtcaacgtgacaagggaaagggcttggcttttagcaagcttccatggctaaatccatttactattataggccttccgagaggtttgtctatccttggtcctaccaaatatgtgccggttatggtgactgtgtcaaacggtcatttttgagattaaacattaatgtgggtggctttgttaaaagcatgctcaaacgagctagagctgctcaggatgatttcgcggtggttcctgttctaactcctcaaagtgaaactcgcctggaaaagtgagtttcttaagttggaatgctcgagatttagggagtcctcgagcattccgcaacctctccctattggtgaaacaatatttgcctattttttgtttcattatggagtctaaactttaacatggtctgggtgttaatctcaagaatagtttgtttttgataatgcttttatggtccttaaaagaggtttagggggagggcttttacttttgttaaaagtccctattattgttaatattttatcttactctaccaatcatatcgactgttttgtaaagcttaatgatgaaatgaattggaatattacttatttttacggttctccttacatagcctataaatttgatacttggactttacttaatagactttttgatgttactcctttgatgccttggatgattttaacgattatttgtctgtgcatgataagaattcttcttccaaatcccccacacacgctatcacgggctttcaatctttcttgaacaagtatgatatgttgcccatggttcacactggtagcaatttcacttggaaacatggccacattctagagcatcttgactggtgtgtcattaataatggtttgaagattcttttccctaatgcctccttgttgcatctcccattttatggtcctgaaaaagggcccttaaagttatccttgaggataacctaaggtgccaaaatgggagcaaacattttctctttgagaaattggcttgatgatacttatttttatgatgttgttaaatcttcctggtttactactgaggttgaccctagggccaacaacctcgatcgcttcctccaaaaataaactacctgcattaataacattcagtcatagaaaagaagtcatggcaaccttaggaataagattaaggccacgcaaaaaaccctggacaccatctattactctcataccctaagctcaaatgacctgaacaaggctaaaactttccaagcctctctcgatacctttctttataaagataaaagattttggaagcaaagatcgagaattatctagcttagagtaggggacgaaaacaccaaattttttcaccacaaagcctctgccagaaggaaaaataacttcattagatccattacccttgaggatggcttggttgctaggggaaccatcactataatttctcactttgtgaattttttataaatctctatttacatctcaaggatgtgacaatatggctatttttgagatccttaatggtatctaatactctcccacactcagattaactaactagacaacaccttcactgagagtgaggtcagagaggctctctttcatctctctaaagataaagctcctgtctggatggccttaatgcctatttttaccaaaaaaattagaccactttagggactgacttttgcaaagtcatcttggctgtcctaaacaatgactctgacatatccctcatcaaccatactattattgttttaatccgtaagaaaaagaatgcttcaaaacttagggatttcagacccatcaatctctattctacactttacaaagtggttgctaacgtccttgccagtagaattaagagggtctttgatattatcatctccaataaccaaagttttttttttgtccgataggctgatttttgataacattctcattgctaacaagat

SEQ ID NO: 70948 - DNA, 1024 bp, Cannabis sativa
taagttttttgaatatgtaaattattgtatatgtttaaatatgtatttattgtatttttcatttgatttcagatgtaattgtgtgttcatcatcgacgagatccaaccgcgagcagaaagctgcctttgtcgttgccctaaccgcgagccccctatctctagtttccctctcaactacttggcgtcactgctccatccatctaggccagctctggtcctcgacggtccgatcgacatgcaccacgggatttcccagcctcagaatcccaaaacccccatcttatgaggttctctctgcctgtatatcctcagtgtatatatatatatttcttttctgtctggcagtgtgagcatacttagttgttagttgttcgtttgaaagatggtaattaatattattgtagatgttttgtaagaaaatgaagttgagataacgaagggccagtagctgttttttccttgttaatagcttacaatgtcatttttctactcttctctttgccattctttataagaccatcaatacattcaataatgatttttaggtcattctgaaacttccaaaataaaattatgattcaatataagtttaaaagctagcctagagttggtcttcctaaacttaggaattttacatgttcacttgctcagctcttctcctcagcttccatgtggttaggtgagtagttataagtcaatttcccattataggttctattatttaaggaagaactccctactgaaaacattaaagatatcaacatgtgatcaacactagcccttcgttatctcacagaagtggtgtctaaagtcgttgataaagatatctatggtgatatggtggtggtgtttttgatagctaatagcttgtatttgtaagtaaattgaagaatccatagtgatatgttctgatacaccaacacagtagctcttttactatatatcccaactttaagctaacacctaattgcgcttattttgttggaactgagaatatataatattcattttatttgattatggg

SEQ ID NO: 70949 - DNA, 1622 bp, Cannabis sativa
gtggttgtttaaaagggtaatgttacagtcaccatcagagagaagcaagtcaaagacgtggataaggtggttaggtagggatatagggaaaaagtggcaatttgggatccatttttcatttaggattcaggtggtggcaccattctgtattttccaatgtagtcctactttaaggagagattttccccaatgtagacttttccagacatacgagagagagtgtctaaggggagcatctaaaaaggatgacctggggaagtatttagatttaaaaagtgtggctagaagagaggtttggttttttggattctccaagcctatttggcaagcatggcctgattgtaaagggctcgccatttcttccagtggattttcagttcaccatcattcgatcccaccagaatttggccatttttctttcaacaaaattacaaaagaagttggaagtttgaagacagacatgacataggtaggaatagtctggatgactgctttaagcataatctctttgcctcctttggaaagaaattttccttgccatttagaaagataagaccgaattctatccttgatgtgattgaaagagtgttttttggattggccaaagcattagggcaatctatggttcttgtcaaggtgattagtggagggaatttgcctataatcctggatgagattttggtaggtaaggtcagtattgggggagaaaatgatggaagatttattaaagttcaccaactgacccgagatactgtcatacttggcaagagcctctttgatagcattacaagcctggatgttagaccaacaaaatagtacgctatcattagcaaaaagaagatgcgagatttttggagcagtacgggcaatatctaaaatttgttttagtgtttttagattgcttaagaatagtagagagaccttcagaacaaaggagaaagaggtatggtgagagaggatccccttggcaaagtcctctagagggaatgacattcccaagggcatggccgttgatgttgaatttaaaggaagcagttgacaggcaagtcatgattaaagagacaaacttagaggggaaatcgaatttcaacaagatcttattaatgaaactccattcaactctgtcaaaagccttggccatgtccaacttgactgctatccagctaatctttcctttttactatatttgatggaattgagtatttcttgggccatggtatattatcaaaaatgagtcagcccttaagaaaggcactttggttgggagaaataagagggtttaagactaacttgatcttattagctaggacttttgaaataattttataaacagtagtgcacaggctgatagggtgatagtctctacaggagggatcctttattttggggatgagggtaataagagtactggtattaaattgtgctatatcatattggtttatttagaaaattgagacttagaaaaaatttctcccgaagacccatgctttttcaaagcttctcttctatctattctatgaatagtatgagatcataataagaaaactaaaacctagttgaatactctaggttttttacaaaggaaacactcttctcataaagaaagatatgaaaatatgaga

SEQ ID NO: 70950 - DNA, 1835 bp, Cannabis sativa
aattttttgggtgtattcgacggtgctctacagtgcagtggggttctgatgcgacgattggacttttttatcctggggacaaccggcaaatgccaactgcttgcacactcctgagcagtgccgtgaacgtcttaaagggagcgacatagtccgcaactcaacctaatttttttttcattgggtaatatctttcctctttcattttgctagcaatttattcaatataagatcaatgagttatttctcccattgtcaattaattgtgagatgaaatctcattcattttattcaaattataacacaattggagttaattattttatgccttttaaaaaaaaaattaaaattggaatatttcattttataacttgtatgtgtaagttgagaaaaaaaaaaaaacttaagaacaaacagacgatatatatgaaaatattatgtatactttaattggttttacccgagatctctcttttatttaattttgttttaaagtttgttggattagtttctgaagcaattaattaattttggtcgtagtactatatatactatactaatcaattatacaaaagaacgttgctaaatgtcacttcctcgtacataaagcaagactgtgatgtagaaataatttcaaaaagatgaatggttttattcaggttctgcccaagaagagataatataaaaaaataatttaaaggtggacacatacaatggcaccgtattcaccctgttattctctaataaaattataggaccattaaatccatacattaaatgcttgcaaaataaatatcaaaacttcaataataacactattttttttattaatgttaaatgctattatacacacccaaattacagacaaatgtgtaataaacattaatgattgatatttttaagtaataaacatcaggtaactgttgctaataagtccctttatatttttattttatacatttcttttttttttgagtgataccttctaatatttgatactaattttgaaagtaattgtgtaattgctagagtagtaattatacaatttagtaatcacactatattttaaaatataaggggtacttaaatattagatattagatgttaattaattatatagttataatattttgtttcacaaaataatcagtaataacacaaaaaaccgtatatatttttaagtagttaatatttcaaattatttttttttaataattatacagtttaaattatacttactcatgagggtcatacaaattaaataatataattaaaacctctcaatataaatatacaatctgaataggaaatctgttagctttctgttacagttttataacaattttgttcagtctattattttcttttcttgtttaagtattcttgggtaagtctttgtatcactaaaatgagttctgttcatttcaatcataaagtgaactttgttttcgtattttctctcttttaaattctctctttttttcatgaaattcatactcagaattctacatataatatcaaattgtcattgataaacgtcaacaatggagtccaccagtgccgatccagctaccaaagctcctactggtctaactcagaccaataatgcccctccgatccagatgaactccacctaattattatctatgagagcacttaagttaaaaaatttatttcacaaacaaacataactttacttagaaactattaactatatttattttcaaaaatttactacttttacagttctattttaaaatttgtgttaaatattgttttcttaatattacaatgttaatttaattaaattatatgacaaaataatttaataaatcatc

SEQ ID NO: 70951 - DNA, 1817 bp, Cannabis sativa
aaaaatcactaaaacttaaataaaactaatatttacgtggctcgccacgtaactttcatctagtaaattaaaaagttggtataaataaacaagaaacataccaaaccaatagaccctcctttttgggtgtttagatcaaatagttccttcggcccattattatggatgtatagccacaaaactgaaaagtccaagtttccaaaccctcttggaaagttttcctttttttttttaatgggccaaaatgcccattgtttcttatgtaaagggcaatatggcctacatagtagggttgtgtgttgagaaatttacctctcaatgtaaattttttttcatctaatttcttttaatgatcgcatacattataggagtttttacactacatactaaaattttccacttttttccttttttactatggggcagaatttttttcaaaagtactatgtatttttttatattgtgtactgtgttaagttttcattgttgttttatgtttattttttagttgttctactattatttttaattattctgtttttttgttttacggttgttttataaagaaaaacagtatttttgtaaaaaaattcgtgtggcagtaaaattataaatttttgcctaaaatcaagtatttttttaaaaaactcttaaagtatagctatttaggaccacttgcaaattttaagaaaagttcaagtaaatacaatgccaaaaaaaaaattatttttttatatgtgtcatataagtagttgttcaaattttgtgtttggcactgtaaattatttaaaaatatttgaaaatttataagtaatcttaaatagctataacgtatgtgatgataaaaaataaaaaaaaataaaaaaataaaaaactaaaatactttcttggatgccaaaacaataggaagtctacaaaagaggtttctttgcacaaacgaagcaaagaatattaaggggagaagtcgaagaatacatttttttttatacattaaccaattttaacttttaaataaaatttaattcaaatatacttttttttatgagtattgtacccaaattgtcctcacacatgtaattaagacataatttcaaatatatcatatttgtattcttttatagatggatgtgtgagtttgtgagaaagttggggtaaaattttaattagagaaaaataaaaactatcgtgaagtgataggggtaaaattggtagaataattgaaaaaaaaatgtaaacataataaattttaaaaaagaaagtaaaaatcaaaggtatcaatgagaaatatatagtgtaatttcctcaaatttgagttcgagccgaactctttaacccttgagtctaatggtggaaccaagagggttggttgtaagtgtgtgtggtgggggtaagttggtgaggtccaaggatttatatatctgatgccaaaagtgggactattttgtcacctttgaaaaatatttcaactaataattgagaattccaagaacatgaatctcttgttggattctttctaaatttccttaagttaagactataagattaaattttttttataaatatctatttatacaagataagatatatgagatattataatttttttaggaaagaataatattaccttatttaattagtaataagataagattttttctttatattagtgttaggtcttatttatttttcttcttttttaaaaaataaaacgttagatagatcgaacaattacacctcacggtcattacaaatgatagtttttggtatcgagaatacctctacaaaacctgtaatgttttgggtcaagacccatttag

SEQ ID NO: 70952 - DNA, 814 bp, Cannabis sativa
ccatataccttaggatcggccctggtggctccagtcggatcttatcgattcccacactatttatgatttcactggcgttgttgctattcttttgtttgagtgttcatttcttctccattttctttctttagatcttgtgtctcgaacatttgagttgctcattggttttagattggatcttcactaatattaatccttttagttttatttaatatgttttttttttatgttttttttattttttttattttcaataatagtgttgctacacaaccttgttgttgttatggtagtaggactttattcattcatggtaggggattttcgtcttgttttctttttaggacattagtagaatctcaactggttcagagcatgtttgtgttgatactaagtagcatgactatatccttgtctatgttcaaatctgagagagactcatatttttattggccctatgatttatgatgcaattgattgttacgattgttattgctatgattggtcgtttgattatttccatttattctagattgaatataataggattgttattatctaatttttattgaaagatttttgttgataatcattgataagtgtgatttgtcacatattcatttctcctgaaaacataacaaaaacaaaactaagcataaattcgaacaataaagtaataaaaatactaaaatacacactatatatatagactctaaaagtatataaaaataaacctaacaattattagatattgaaattcaaaattcttttttatgattaggacatgcatgtatagtacttaatatataatgaa

SEQ ID NO: 70953 - DNA, 975 bp, Cannabis sativa
ccaaactcactagtaatagtattacttttgaccacatattgtatggtatagtaatagagagacttttattagcatccttccttatttgaattaagagtttaaattccaccataacctcttattgagagggattatactagaccttttaggaagcaagcttgttatagtggtcaggtgtcatttttaatggaacaagaactctcgaaatatataccaacgatcttattaaaatataatgaggtataagatcttatagctggcatatagttcccaaaattatcactactgaaagagtgaaaagaaatctacaccacgagattctttttttctaataaaaaaagaaatagtattaggtttggttttatgagtggattagtattattaggtttggctctctagcaccataataaagctcataccttaccacatgctttaacacattgtaccatacactaccaaacaattttatttttttatttttaatatattttgaaaaatgagcaaatattttaacttaattaaatattattttttaaaaaaaaattaacaaatagctaagaagagaaagcaaacccacaaacccacgaacctccaccttcgacggccgtggtggtggcggcaacaccactctgtgcttccactcttccaccatactactccaatacctcccccaaatcattcaatcactcccattttacagcgtagtttccaaaaatctcttctcatcgtcctcaatttcatttctgagacaattaaaaacaacgtcgctttcgattttgccttctgtattggttgctgcgacaactgctttggacgctaggcaaactctgtctgaggtatctactactcccttaaaggctcttcctttttgggttggtcatgtgtttgacctttatcgattggagcttgggtatcctttgataattggtggtattaacatacctcatgagaaaggttgcgaagctcattctgatg

SEQ ID NO: 70954 - DNA, 1184 bp, Cannabis sativa
ttttaaaaaatctaaataatgtacagtattggaaaacaaattagcctgatcatatttcaatttactacgcgtggttaaaaagtttcaattttattttcggtattgttagttattcgaaattttttaaaaatttataaaaataatattgtaactataatattgccataaatataatatgtatttccagtcatatagattaattaaattattataaaagaaagttgacgttgaactttaggtaaatgtatatatatttcgatatgattttgttctgttattgtactttcaccgattgtaatctgtgatgtacggtagccgtcagatgagtgagttatttgatctgacggctgagattgatctagaggtgattagggttaaaaagtagatacgtaccctgacactcatttaatgtaccttgagacccatctaatgtaccacgtaatacattccgtgaaagtatatcacggattacattatgatgacacaatctacgaaacagtgttttatgtttttggtgggatcatatttgttatttgtggtgcgtgagtacagtataaataaaacaaaattaatcatcttcagtgggggctatatatcaaatcatatccagatccagtacaccttgttattgtattcatcatgatattctgcgatgtgcttaaaataattatttctaagaacattctctaatctcggaaagaacccagcttacatgacaacataaaaaggtaaaaatgctttaataattagtatctaaaagtaataaaggaaataaatcaaaatgttcgttgtctactatttggttcgcatttgcatgcacgtgcggctctataattataataatatctttcgtattgttcgattaaattcctccaacattcactttaccattgtaacactatctatctctaaatttgttaaattttgcaaaccagaactagttattaatttaaccaaattaaacaaatacatcagtgcagttttttaagaaaaaaataaaacaaattaatgaagtatgtgggctgtcgttagtctaatattaattcaactagggaactaagccgcgccttccgcagatttggccctagttttgtaaattttcttttacttgttaagtaataccgattaagtaatataatgtaaaatataatatttggatgtatttatatatatatattataaat

SEQ ID NO: 70955 - DNA, 1489 bp, Cannabis sativa
tgtacatattcagatatataccttcatttgattcttattttattggggttcatttctacagctgtatgagaaattagcagatcagctgactgagatagttgttgattcggtaagtctaaattcaaatttgacacattcaaaattatgcattgtcaaaagcttctgctttgtggttgatcctttaccacttgaggactaatattcatacactaaatttgcagcttctttgcattcgcaagcctgaggaaccaatcgatttgtttatggtagagatcatgcatatgcgccacaaatttgatgtggacacacgtttggtatgtaaaacctgctctttccttgaacagatataattcctttctggtcttttatgaacttttttgtgagtatttcaagcaatacaactgtttgtattgtacagttttacatcatagtatctctaatatctgacctatttgtttctcaggttgaaggtcttgtccttgatcacggttccaggcatcctgatatgaaaagacgggcagagaattgttacattttgacatgcaatgtttctttggagtatgaaaagaggtagatattttaaactatgacacgttgattgaaactgtataaacttatttggatataacaaaagaatttcttcttttcagttttgccatttctgtctatgcacacacatcacaaacacttagtgtgtactatgtgaaaagatatgatgtcttaattcaatttccaattgcaagggattgaaaataaactgctaaatgcatatttgtgaagtttacttgttatgctaatctacacaataaagtgttattttggttggtcaataattggtctgtttgtttgtttccttgggcctttattttccaaacattgctgaggtaatggttttttctgtagtgaaataaatgcaggcttcttttactccaattctgatcagagagaagcaatggttactgctgaaaggcgatcagttgatgaaagagttaaaagaataattgagttgaaaaataaggttatgatagtttaactactggttataattcacactgcatggctgattttgttgtaccactaacatgttatggtcttcattacaggtttgctctgacagtgacagtaactttgtcatcatcaatcaaaaaggtatcgatccaccatcattggaccttctcgcaaaagaaggggtaagttgtatttgttagctttttatcagcttagttagcatttgtgctttattttcttcacttgccacatcaatgatgagtcctacctatagaatttattttttttaaaatcaatttctgtgactattgatgagaaatcaaaagcgagataattgtattgttcagcaacaattaaaaaatcaattttctgattaattaattaaaaaactaagaacaaactacaaaattttgttaagctaaactagaaaaaaacaaaaaacaataaagttgccgatcaggccttaagtttataaaatgtt

SEQ ID NO: 70956 - DNA, 1439 bp, Cannabis sativa
ttcatgatcgacttggaagaccaaaagaccagggtgatactctaaccagaagatggttggtggaagcgggagcttctagaggggaccataatcgggtaatagaagtttcaactgggatgcagaccaccacccatggtgtcaaaaggacagagtttaaaaacctagtggccttggtgaaaggaatcacgacctcagagctgtcaaagttcgaactgaacagagagcgacgctcaccgctcttggaccaaatcaaagctctgccaattcctcccaagttcaagaatccttcctggcattagtacaccgagaaagaagacatgctgtctcacattcattacttcgaagtgcagaccgatctgcaaggagtaagagacgacgtccaatgcagaattttccccaccacactgacaggcctagctcggcgatggtatctcaagcttcctcctggatctatcgattcatggaaggaactagtagatgcttttagaaatcaatttgctccttctcgatagtgccaaatcgaactcaattatttggtagatgtgaaacaacaagaagatgaatccctcaaggactatattcaacggttcttatagacagtcgctaagacaaaaatacttagcatggacgcacgagtaatgacacttgcaaccagactcaaggagatgagtcctctatggtctaaccttcatctcaagtcagtatacactatgaatgattttcttaatagagaagacgaatttatcaagctagaagaagctatcactcaagctaagggctcaaaaaacaaaaagaataagtcgttagactctccaacccctaacacgggagcgtagagtaatgggggaaaaggaggttcaaacagaggcaaaagagccaaacattggagggaacacaaggtaactcccatggcagaaagaaggcagaaattgggggcaagcccatgcgggagtacaaacctcgtttcgccacacattctactctcttggccttgagtgaagagatatgtacagttttggaagttatttgactaggatctagatttactaacatgtatgttgattataattctataatctaacaccctaaatatgaatttcataatacaatgaaataaacacataagagattaagaaatccttatattgatagcagtggaatgttatggctcctttcatttagatctttaacccttattcctttctgtcgtagagtaataacaagatctgaacctggattttctctccttcaggtgttggatccttcacaatctttcacactatgattgagtacttgacttaatatgagttggcatgtactctatcactaatggctcgaaattgatgaagaagaagaagaggggaattcaaaattgctatagaaggaggctctcaatttttagttgtctgacaaaaaataaaaattaggttattagagtt

SEQ ID NO: 70957 - DNA, 1164 bp, Cannabis sativa
tctattatgctagcctggtcttcaattcagtttccttgaggatccataatggagagtattctattttggttcctccttactttaatgctagcatgaaacatggctgtattatcatccccatctattgtccaattagttttagctttctgcaataagaaggattgatagtctttgtgagcttaggaaaaagcatttttggtttcctggtcctctatctgcagtgcctgattgaaagggtctaaagttagcttctgttgacattcctccattgcttctttagtttttaatactgctgcctgtaaatctgaataaccctcttgattgattctcttgaaaattggtttcaaagcttttaatttggccacaagttgatacattatcgtaccctggtatgtcttcttccaaacttcctgcaattggtttgcataatcagggtgagagctccacattttaaaatatctaaaaggtttcttcccattatttgatggctgatgaaatgtaatgagagccgctgagtgatcaaacattccttcattcataaaatttgcttcaactcctgggaaggcatcaatctagctcacattagccattattctatccaatttagagtatattcgatcctcaccatgttgtttgttacaccatgtgaagaactttccactacttcttatgtcttccaactggcagtgagaaacacaatctctaaaaggatggagattatgatccattaccctactacccactctttcttcttgctctaaaatgtcattaaagtctcccaaaactacccaagcatcttgagtagcaagtgagtttaaatcctgccataaaaatattttaccctcttcatcattaaaagcatagacaaatgtaacaagaaaattcttaccatccaaagtagttacttgtaggtggattaattggcttgtacatttgattatgttaatgaagaaggaattaggattccatgccactaccattctccctcctttatgccaagctatattactagtaaaacaccatcccgaaaaaatattagagtacaaggttccaagtttagaagccttgactcttgtctcaagaagcccaacaagaccaacattttgagtatgaatcaattgcttgatcgaactttgcttttgttgattgttggctcctcgaaca

SEQ ID NO: 70958 - DNA, 1629 bp, Cannabis sativa
gtgagatttactacttgattgcgtatacttgcgtagcgttcataaaatatagcaacaacttgcaacataatgtaccaacttagttacatgcctccaatcatcataatttcgagggactatagatcttgctttaaccccaatccatgattgcatatctgcatatgctgttcctataggttctcctttctcatttcactctagttttttcttgcgtacgtccttaagcttttagattgctgatgttattcttttttatcttgcctcgcccttttggcttattttcatctttttgattcgtcatctggaagagatacacaaattaaatcgtttagtaggaaacatcatactgaaaaacatcatactttttttaaaacaaacaagtagtactattttagagaaaaaattacttcttagttcacagactagccaaataaaatctttccaaaagttgtttctattagtggctcataacatgtcctagacagtagtagtaccgattgatgataactaaaacaaattaactcatacaaacatcatacagggacacttaattttttcaagatcgttacaattctttagggcaaacactaaaagtttttaaatcattctacgaattgtggagtttctcttttctcttccatccatgacttatccattttgaaaataaaataaaattcctaacaaacaagattgaaaaaaaacttaaaagttgctagaaaaatcctaagcacgcttatcaattgaatattaaaaaacatgttcatttaaaaatcctaaacaaaaaaattggccagagtttctcctatttctacaacatttctgaatttaataactatctaacaatgtacgcaagtaaattggataacaagaaaaaataatccgaaaagcattgaacaatataataattgccacctgttaggctatttttagcctatgtttcgggtcacaaatagagttgttttttgatgttttaggacaaaattacgattgttttccatgttttcaggtttcccatggctgtggacgctcggggtttcaaaagtacgataaaagacaagttgagccaagaaaaaaataaaaaaatcaggatttggttcacttctggccgcggcgaatttattaacggtcgcggccaaaatttggcagaaaggtattttcgtgaccggcccagtagccgcggcgagatactccaccaccgcagccaaagcaacacttgccacagcgaggtaatccatggccgcggcaaggttccgtacaaatggaggctaatttcgtcttttgaaatctgggatgaaaaagataaaggaaactgcgagaaagagaagaggagaggcgaattttagacctaataaaagcaattaagagcggcagaaggagtagagtggcagcccggattcattccaccaacaatttctttcttccttcctttttgtttcttttatgttaaattctgctttaggaatggttatggatttgaacatgaactaaattctcaattggggaagatgatgaatgttggttaaaaattttcctagttaatgtcaattgccattccttttatcttgatttgtgaaaattatctatatttgtgtttaattccatgtttaagcttgatcatcttctacatgt

SEQ ID NO: 70959 - DNA, 4055 bp, Cannabis sativa
aaatctgattatattgtaatgagttttatttagggcataaaacccaacaagccatgtttcacagcctcaactgggctcttcagcaacagctacaagtctctatagttgaaacgggcgctttattggtttcaaatgctttacagtcaagagcagtgggcatttcaacttttcatgattttgttaatgatgtttctagcctccttttctttttccctaatatatttgtaacacatgttaaacgtgatgctaattcaattgcagatagtttggcaaagtttgccttagggttggatgaggcttgttcttggtgggagaattttcctcttactatttactgtgttattataaatgactatctttaatttataataacaaagttttatcttcaaaaaaaaaaaataataactaatttttaataaataattattttattattgtatgcatagtaaagtttatattgtttttctcaatcctattcttttattctcattcttctccaataaacccaacttgtaagtaaataataaaccaactagtttataataatagtgtaatttatttatgataaagagttgattgttgattttctgattatgcaacatatatatggttgactcaaatttatatcaataatgaaaaaggaaaagcatgtataacattaatggagtattttatataatcccctaattaaaatatattaaatggtattaagatatctaagtgtatgcaaaattattatatatgttttttttaattaatgtgaaggtttggagcaatgaaagatatgagagtccagagcacagagcgatagtgaattctgaaagggataggttttccatacccttcttcctcaatccagcacactacacaatggtcaagccttttgaggagatgactgaccacaagaatcctccaaaatataaaccatataactggggaaagttcttcgtcacaagaaaaggcagtaattttaaaaaaaattgatgttgaaaacattcaaatttatagtttcaaaatatctaagtgagcagccatagagtaataataataataataagagatgatatgcactcatagagctattttataattgattagcgatgtctataatatttattaaagtaaaacaagtgagacatattgagttatactaatagtaatatattatatcttaaaagcgtgttagacactataagtgctcttggcataattataacttgtacaaacatcttacatattatgaagtctctaatcattttaaaagttttttttttgttttagaacaacattttataatcttaactcaaaaaacaacacattttataatcactttaatatttgcttttaatttatattaattttttcaatcttttttcttccttctcaaatttttaaaaaatatacatataaaataaaaataaaatatacatttaaatacatagaaaaaaattaaaataaagaattatataaaattttattacaaaaaaatttaaaaatatatatatgattttaaaaaatgtgaaaaaatataattataataattattgatattaagaaaaaataatgtgaaagagaaaatttaaaatttgttgcgagctgtttgacactaggaagaaatgcctctaccttcccaaggagaccttcttcatcaagattagtcaatctcttataagttagcacgaatggtggtgagacccatcgagcacctttcagacctcgattgattaaaggtcgagcctctgtgtatttctcctaaacgtaatctcgacctgccacgaacacatctccctcctcgaagatactctccagcctcattgtagccaccaaaaggaagtgcccgaacttcctcctcttcttcttcttcctctccctcgaccttggagggactaacaaggcagacctcaccctggtcctcaatctcttggactttaatatcccctctaacaactacttcatcctctctcggaggcctggcttgctccaccccagctgtagcaaatagccagtcaaggtgaggatcagatatcgaggccttcctcatagtttgcttggtttgtgccatcattctatgtttagacagtcattttgtttcagatgtatgtctcgcaacagtcacagtgatatcaactacaatagtactcctagcagatggggttgcctgaccctctagaagtgtatccacaacactcagatggaccctatacgttcaagaagaaggaagataaggcctccaacttttctttagttcccagataaaacgattgtacccttctccacgtatttggttggggtattgatggtgctgcaccacaggctctacggattctgtatgatttatgttgacttcccaatcctcaaaattggaattcgaaaggttgtcactagacgaagacaagttcgcacctaactgaggatgattcttgtaaaggagttgaagaaaatcttagtcgatatgatagagggtgagagttggacgggggcaaggagaaaaacatatttaatatgccagcgagactgattcaagataaaaagaaagaattttattccaaaattgaattcccaaactaagaagttcaaaatcacgaagaatatctagaaattcttagaaacccttgaatgggtgaatatgaacaatttcaaaccaaaatcagtacgaaattagggaatcaaaagacctaagcacgtgttagtaaaagttaaaatccctaatattttctactctatgattagtcaagaatagttcaagaacacagaaattttacagcaagaaattcatgaaataatgcatgtattcaatagaaaattgcataaaaaagatgaagagataacttactcactgtctgaagtcttctgaacgtgctcggagggtttcaacagtggagattctagtatgattttttcgaagatttgaaaataaaaaggaaaaattatttgctctaattttgtgaaagttaaaatggatcaaagaatccctaaaaagatttaaaacccttttataggtatttaagagggataattaattagtttaaaatttgaatgttcttcgagtttctccccaaaaaggaatgttagcacttattacggcagtataaaaaacatgcatgttgtatcgtgtaaaccgtgagtgcgtgattttaggtacaactttcaattcgcattaaatatctcaaacactgaagagatgttcaatcaactcatgtcggatcaaagatgacaaccagacacacgtcacccatctggacagcttcctggctgaataagtccacatgcgaccaaatagatctcacacggacatagggggcaaatattatccaaatttctacactatgatgtggaatccatctaggtgacacgtgtaacatatttcataatttggatggatgattctactcctagtaggttgtgcagatagttatgatgctcgaagtcacacatagaaggtgggatgtccgaatgcaagtcacgacataatccctacttttgcgggatagattcgtgtctttagagaataaaggaaattggcctaagttttctattttcttcatcataattatgaaaataaactagttttccattttatttcttattgatttaggaaaattaattttatgtaattggtccctataaatagtagactcgtctcactattcagggatacgaaaatattcagaaagagaacacttaagagagaaacctcaatctaagattaaaatactcagagattattgtaagagcatttgagaaagagtaagtcattcttgttcatcttctcacaactcaagacaacaaaaaggagagtaggctattaccaaccataagggccgaacatctataaaatctagtgttttctttattttatactatttactttctgctatttaatttattcctaatcgctttattttgactcaccgtcgttggctaaaagcaaggtcaacatataataacgctcaaaaaaaaattgacaaaaatttaacaaacaatacatatgtacgtggaagttatataaaaaaaaaacatttgtatgcatgcataatcagaagttactctgcttt

SEQ ID NO: 70960 - DNA, 2554 bp, Cannabis sativa
ttatttcataaatatacaaaaaatatattggcagcaaaatcacaaaaattttacattttttaatacttaatcataaaaaccgaaattttaatagtaaaacctattgaatccaagtttatacacgtggcgaatttttagtggtccacgtagttttaaatattaaaatataataaaaaaattaaaaattataaaaaaaatatttattcttttttttcttttttgttttttccttttcttttcttttttttcctaaacaaagtaagccctaatctattcacacactctctctgccttcttcttcttcttcttcttcttcttctatgcggcgccagagtaagcacgaccaacaacccagggattctccgaccaccctaagctaggcgggccacaaaactgaaccacacaagtcaaaaaaaccaacctgatcccccctcttcacactctttctctctcccaattctaactctttctttcttgtgtgtggcgccagagtataagcacgaccagccacgaaactgaaccccacaacccagaaaaccctaacttcgatcccccttcttctctctctccttcaatctatctttctcacccatgctactctcggctcgacgtcgatgggccactttcggtggcgattggccaaaataaaggccaccacatgcctccccttcaacattttattagttttctctttgagatctgaggggataatggtgatgttgattgtgatttagattttatttataacttttggcataggttaaggtggtggtggctgttgtgatttatggtggttttttttctgtgattttaggttagttctagggtgatggtgtggctaggaagataggttagggtggagagaattaggatttcaaggaaaaaaaaagaaaagaaaaaagaaaaagaatttataatttttataatattttaataatttaaattacatagatcactaaaaattcaacacgtgtacacgtgagtagtctactgtgacacttaactgaggtttttagacgaaattgtaatgagcaaaacagaacctgaatttagtaggttttacggtcaaaattttagtttttgtggttgtattaaaaaatataaagtttgggtagttttaccaccaatccctatacaaaaataacaaaaaatttacattttaacatttttacacatctactattttttttatattattaaggatttttttttctttacaaaaatacagagtattattttttaaacaacattgttttgacattgctactacaggaaagcaacatgatttttttttacaacaatacaaagtgttgtttttccgttacctaagaaaaacgttgtcatttgattagtcaccttatttttgagtgaggagtggttgtgactcaccaaatttatggtgaccagcaacttggaaagattgacaatagaattaaaacaaaaagaaattcaaaagtgaaaagaaaagtcaaaactcacctttttttcatcttttctctctatttttttgccctctaaaaccagaacaaaccagcaagctttcctccatttttgaagcttatttcagctaagtatagctagaagaaacatctcctccatcctatgaagcaatctaaggtaaaacctaacccaaattcattagttttctagggttttaattggttttaagtaattgttttgtgtatgacttgttcaagaagtctagggacattaggaaaggcttcctatggttgtttaggactgattagaattgttctgaagtgttttggttggttgtagtaaaagttatgcaagattcagattaaagaactcaaacttggctcatgcttaataacttgattttttgtttggaattcggctaaggtttcttcataaaaaatgtttcttatgatgtgtacaagttatttaaaaaatttggtaagattcggcttaatagtgagtaagttataaatattttaagatcgagtagggaatttcataccgtcctaatatttctaaaataggttgaccgtttttagaacgaaccgtccgttttgggacttatccctggaccaaaattttgtattttctaaatatttaggatattgacatgctatttatcaataggagaacttatggtgatgaattaaagatgtagaacggattaggtcaagttgattaatcggttcctttttgttattgtaacataggatacaggatcattgatctttttccattttgggtcaactaacatacttgaattgaaacttgaggtaagaaagtacatctgtaccacatagcatgtcaatacgactattatcgattatgatcgaggtcaagatacggtgattaccgttaagcaagagaaagtcatgacgtcaattgaaaccactgttaggtttcatacttatcgattgtcttattagataatgacaaaggtatgtggatgccaagatagggcatcatggttgtcttattaagcaacaagatatgtgtagatgtcgagttagggcatcacgttatcttattaaataataacataaatgattactttataaagtaacaaatatggctt

SEQ ID NO: 70961 - DNA, 1113 bp, Cannabis sativa
  modified_base (26)..(60): a, c, t, g, unknown or other
aaaatgtgatttctgatctttattannnnnnnnnnnnnnnnnnnnnnnnnnnnnnnnnnnttagggcacaaaacccaatagtaccttcctttggttgagttttcatattacaatagttattagagtattgtcattatggcaccatatgaaatgttatatggaaggaagtgtcattcacctattcactaggatgaagccggtgaacagagatatcttggacccgaagcagtccaaagaactagtgaggctattgagaagattcaagcttgtatgcttgcctcaaaaagtagacagaaaagttacgctgatccaaaacatagaaatattgagttacaggctagggactttgttttcctttgggtgtcaccaatgaaagtgattcagagatttggaaagaatggaaaactaaggcctagatttattggtcccttcaaaatcgtagagagggtaggttaagtagcatatcgactagctttaccccctactttatctggagttcacaacgtcttcattatctaaatgtttaggaaatatgtgtctaatttgacctatattgtaagttatgaggacattgagctctagacagacttcatacgaggaatagcctgttcagatcttagatagaaaagagaaattattgcggaacaagaccattccagtagttaaggtgctatggagaaataataacgttaaagaagcgacttgagagttagagtcccagatgcaggaatagtaccctgagttattcaggtaaattttaaggacaaaatttctataaggaggggatagttgtaatatcctgacaaatataattatgtttaattagtcatattttattacttatgtagttataagtcttaaagtaaggtgttataccaatttttgtcctcatgatgtggcatgcttatgtggacagaacttgtgccatgtggcagtacatctcactaaaaggaaggccaagtcagcattcgagcaaacaaatactacagcactcgaaaggggatcaagtgacagaccagttcactctcaagagctggccagccacccctggcttgccccatggtcggccaggccaggggtagcatcatggctggccagtctggccagcacaaa

SEQ ID NO: 70962 - DNA, 1614 bp, Cannabis sativa
atattttatggggagaaaataaaaatagatgtaatttatggtaataaattgatcaaactccgatacttaatatataataaaatattatgggataagttttataaacagattttctacccaatctttcacaccttaagattataaaaatcaacacaatgtaaaataatattaattagtaaaaaatgaaataaaaatggtattaaagtgataataataataataaaagatatatatggaaaaatatgtatactataaatgtaaaaaaaaaaaaaaacatacataaatattgacaaaaatttatgtcttatcttaaaaatttaaatcttattatttatattttggagaatttgtcaaacaaacaatgtaaaataataaaatttgtaaataacctcacttaatttactttatgattgatttgtagtcgcacagtgtaaatttatgattatacagtgtaatattttgattattttgctaataacaaaatttttgataaaattattttgttaataaaaaatttcattaagattattattacaaaacactcatatatattattcttatgttatggtattatggatttatgttaacaaattatactataaaagtaaaaaaaaaaaaacatacataaatattgacaaaaatttacgtcttatgttaagaacttaaatcttattatttatattttagagaatttgttaaactaacaatgtaaaataataaaatttgtaaataatctcacttaatttactttatgattgtagtcgcacaatgtaaatttatgggtgtacagtgtaatttttaattattttgctaataacaaattttcttataaaattattttgttaataaaaaattcataaaggctattattacaaaacaatcttatatattattcataagagtgtaaatgggtcgggtcggatctaatccggctatgatctgacctgatccaaattatgtaaagatctgtcctgccccgcccggtagatcagttactcaaatcggatctaattcgacccgactcttttttttttaagaattttgatattaacttataattttatatccattttaattttgtattagtattattaaatacaatactatgtttggtattgacatgtattaatagattgtgtaaagatctaggcccgggtccgggttcgggtccaggtctcgattcgatttcgagtttgggtcccgggtccgggttcgggttcgggtccaggtctcgagtccaagtccgagttagggtcctagtcccaggtcaaggtccgggtccaggtctcggtcccgatccccggtccaggaccggtctcgggtcccgatcctggtcaaagtcccggtccaggtctgggtccggatcccgagtcagggtcaaagtccgggtccggatccaggtccacaatactataatataagaacaaattttactatttataaaataacatataaaaaaataatatatatttttgttttagaatgttggtagctaaaccacctaaattttactgtgtgtaacacttaaccacaaaaaccgaatttttggcggctaaactacctaaaccctggtttcgtttttctctgcacacctccatccaaaaatcacagtta

SEQ ID NO: 70963 - DNA, 1997 bp, Cannabis sativa
  modified_base (1964)..(1968): a, c, t, g, unknown or other
ttatggacatagtcaaatttgacccaccgtgtgactagatcactagattccgtaattaatgagcccttaaattttagatttaaatatatgttatattttgtacataaaaacccattttccaaaaaaaataaaaattatatttaagaaaaataaaaatcatatatattaggtctcacttgttgtggtactcttcttaattcttaattaatcatatatatatgaagtgatgacgagctttattactttcttataataattattatattaaattaaaataagtaaaaccaaatacttaattgatacaccaatattaatggtatatgcatatttagcatttctgatcattcttacgtaccttggcatccatggtgtagataagggtttacttcatatccatttaagcatttacactgatatccagacccattagttgagttaacacattcactatattcagctacacatgcatacccattgccactccgattattcacgagcttggcctgttcacaagtcaagttcccaacagcccaatctaacaccatcctcggaaacttcttcttctttttcatcaaatccttcaaatcaaccgtggtaaagttgtacgaaccattttccgccacaaaagaataaccgcagggattaaagtggtgaaccaaactatgatttgtggagttaccgttgtttaagctctgaacaaacgtaacgacattagaaaccccaggtgggatatcagtctcacaacatccaattccactacaagaaccatttacgacgtcgtttatatcgtaacatgaggccacacaccccgccatgtagctcccttctctgacaccgatgattgccaccgtatcgcatccaacgcctatgaacttgttcctcgtactcaaaggaaacttattagacttggtctgcataatagacctaagcttgctttgtttattaataagttttccactcttgtcgtaacaatctagagaaacttttcccttgacaaggatttcgctgggttggattgaaatatggagaatattggaaaacgtactattggggaagaaaagttttggggagtgggaaggatttgtttgtttgcagttgaggaggaaatttttgttgtaataacaaccttgtttggttccaaaagggtaaggtatttttactgagccacaggtttcagggcagcctcgaagactaatattattattaatactataagctaatataattaagtgatcatttattaataataatgttgatgatacacttaataataataacaacacttgttgttggtgtttcacctccatggtggtatattttcttactaattttgtgttataactaaaaatctaaactccatgcatgtacctatatatagacaattaataaatcaatcacatatgaaacgtttggataattattaacatgaataaagaattcatttagtcatacatgaatcatgatatcatgtgtggagtttatatagatatataatttgaatttttaactatgccggctttttttattgctttctttactagacacgtactaataattgaccaagctttgattgtatataaaaataaattttacatgttttagatttttatttattattaattatttgcgatgaatttcatatatagtttcattagcaagtatgagatttaataattgtaagtaatttagtaaaacaaattaatataatttgttatttaaaaaaattatttacaatgaatatatataggtacacgattacgtatgcatgtatccgtgatcttttgttctttctagtctaatcaagaattggtgtactggtttcactcatatttatttgtgttttttaaaaaatgggttgtgttgtactctgctacaaaaaaatatgagtggtgtcttgttctagtaacattttggggtaagttgaaaaatacctcttttattcatcaattaatcaaatttacctnnnnntttatatttatttgaaacatacctctttt

SEQ ID NO: 70964 - DNA, 708 bp, Cannabis sativa
gtatattaaaactatgctatttttaagcatatattgtgaaatttcctttaagttttaccattagcctatagttaaaaatgtcttaacagactaaagaatgtctgtaactgacatttgatttagtatcttttctctgtggcatcaagtgtaactatcaatggcctgcttggttattattattaatttcaacatttttctaaaaaatttgaaatcttggcggggcccctggttgtgatgagcgaagtagcttaatcttaatccccaactaccgtccgccattaaagcatttccaaaagtttagctttgggttggtgattttagtttcgactattctctaatctattatatggtgggaaaccaaaaaaaaaaacataaaaaaagaaagaaatgagaaaagggtcgcactcaaaatgccctttttgctatcaattttgtctgtattcctacttacgtatagccattgacgtttactgatgatgaaattggaaaaatccaatacgcccaaatccaattcctttctgctatgccttgccaaatttattttatttgagttgatttattattttccctttcttacttagtccaattcttctgctcataaaataattgatttgaaaaattgaccatctttatttctcaattattttccaaagatgaatttaggtccctctcttgctcaactgtttgggttttatcatttgccactac

SEQ ID NO: 70965 - DNA, 1029 bp, Cannabis sativa
atgcaagccgttaatcatctccttagatacataaaaggacaaccaggacagggaatgttatacaacagcatttcctctcttcatctccgaggcttttcggactcagattgggcctcctgtccaactacaagacgctctactactggtttttgcatatttttaggagattgcctcatctcctggcgcaccaaaaagcaaccaaccatctccaaaagttctgcagaggcagagtacagggccttagctgctacctgcagtgaaatcacatggttacaataccttctcaaagacttccagatcacacaaagcacaccagccttcatttactgtgacaatcagtccgcaatacacatcgcaaacaacccgacatttcacgagcgcaccaagcacatcgagcttgattgccaattcattcgcgagaaaatcaaacaatctgctgtacgcttaattccagtcaacacaactcttcaacttgcagacatattcactaagcctttgacttccaccattctccattctcacattcacaagatggctgtctacgacatataccatccatcttgaggggggtaacagattttaaccgaattgtgtcagagttagttgctactgttgtttactgttagacagttaggtgttagttaggtcctttccttgttagctggaattactttattttacactatgtcggttatttgtgatgctatatatatagcttttccttgtatgttgtgggtaacactttaataaagagattcatctcattcttgttcatcaatggaaattgttgttcaatcactctccatctcattccgcaataggaatattgggaatttaatttccacgtttcttttcgataatgatggcggaaagctctattcatgtccttgcatttcattgctagctaatacatatattcttgtataaaaattcaaccgatagtaaaaagaagaaaaatagaaagtgataatgatgatttatcttcttttcatatctatctatatttataccttgtctgaacgcctatcg

SEQ ID NO: 70966 - DNA, 2006 bp, Cannabis sativa
accttcatggcctcatccatgcccctaaattcaaacaagatgtacccatgattgattaaagtctttgagaggcgactggcctctgcagcaatctggcaatataagaaaaatgagtaagtacgggagatcaggtgccataaagcaaagcccaagaacactaatagatagacttacagcagtcatagcaacgctaatatcctgcatctggtaaattgagttcgtggaagcgcaggctgcatatctctttgtcgggagctgggtcaggttggagacaaagtggctcatcaactctgaggcaaagggagcgagagtaggccaaatgaagcggttgaatcagtctgtcagggggtccatgttcaggtcccaggcgttcccaaaggtctcactacgcgaggaattctcctgggcctcccttaaaacctttttcaaggcctccacctcagcgttcttctttgtgtattcagccatagcgtagttgtgcttggcgatctggagctgttgtctctcttcatcagtaggaacgagagtcaggacaatgctgggggcacagtatattcctccgcttcgagagggatccccgagtcagagctggcggccggagtatcaaccctcctcggcttcttggtaaactcaacctccaccatcttgcccttgcgcttccggtctaaaggggcaaggatttctccctcttcttcctcttcggcctccctgtcttcatcgatcaagacgatttggcctaaggtaatgcttgaagaagacctccctggagtcaccgtctggtcaggtgcaggaggaagagcggagtcaggactgtaagtctgggtgagagtcgccaaaagctcctccattggcctagttgcttcaaggaacaaacaaataagtgtcagaatggccacgagaatttatgcaaacaaaaacaaagctgtaaaactagtcctacccagacaatctaattcagccgtagcaaagtcctgtactataatactggcttcgtcatccccaagaaagctgtccgaggggagaaaccaactggaagacagataggctgaatgatccaaagggataggtgccggaggcccggaccccatccaggaccggcctagaaaatgacctaagttggaaaaatataaacccttggcatgataaccccaccgggtaggggcattctaattctaaggagacgtttgtcaaactctataggtctacatagagaataatcttgagcggaaggaacatgaccgttaagggagacttaccgaatccggatgtgctggcgttaagagccccagtattgggaatcgggagcagcaacttaggccgagaagatacacgttctttaccagcttctaccaagagcgtcttcccggcagcagcttgagccttagtgtaggctaactcatgttccctcctaaagaagtacttctggtaccgatcatccgccgaggcgatgatgtccgcccagagagccttttcagaatccggggtgcgaatgttgtggcagaggaccttagagaggttgaagtcgtccatcgattggctctccgtgataagcttggccttccggcaatgcaccgttgtgaataagtctcccacattaaggtcgtttttatcatatgtggagaagaccttagcgtgctgaaggaaaagttgggtaggagcggtacggtgcatcagagggatcctgacccactccatgagcaattctggacgttccacggcttgaaagccggaagagaagaagaattggtggcgtttttccttgacattcttttgaaaattataagggaccggaccctcattggcaggatgggcccggattatgaaaaaaccgtctttaaacttatcccccttcttggggatagacacaagttcttcaaagtataaaattttggccgggctaggcaacgcccagcctcgggctacataaaaaatgaacaagcctgaaagcagacggtatgcttgaggaattagttggtaaggcgcgaggccaacaaaaactagaaaat

SEQ ID NO: 70967 - DNA, 1184 bp, Cannabis sativa
tatacatatatatatatataactctgaccctgagctgatctgtctatatcgatctatcatgtcattcatatatatatacattatatgtaagtttctagctacatgacatatatatatacgagctatatgtaatgtattaataaatatatattatagccattaattaattatagtttaaaagtatttaaaatggcacacacgcatgtatactatactataaataaacatagagatatgtacataaataaccgaatcaacaagagtttgtggcaaagtggttccatacaatttaatttaataaacaatataaaaaattgttaattaattatgaagcattatatttatgtagtagtgaatactttaagatatctaataacactactttatctatagtaattaaataattatatattaacattaataaatagcttaatttgttttttaagtttaatttatatggtgagagatgtatataaatatatatataatataataaaatgtgatgatgatggagaagaggagacatgtgtgagacaaaactacatgtcaaaggagattaatatattattaatttgaaagagatcatataaactataaagagagatatgaaatagagagagattatatatatatataagacaagtggaagtggtccttatattatattatatagggaggcaaggtgagcatgaaatcctccatatttttgaggagtttgatggttttgttgaggggaacacttacacaaccccattttttatgttatgttactaattaatattcatataatatatatgatcctaattaattaattaattaatttgaaaagacagggacacaagaatatacgcttcttttcttctcttccaatatcttaacatctcttctaacatgcctttgcttgtgttgtgtgtttccactcaataaacacatataatactattactaggtagggtacaacaacattacatttattattattcaatacctatattttatttttcctttttccattttcaaaccacatatatctatatatatagcattgttaatattcatccttttatataagtgatgtttcacaattagttaaagatattttttaaaaattattttttctaaattatatgagacctgataattactactcatcaataatatttttaacaattttggtatttatg

SEQ ID NO: 70968 - DNA, 610 bp, Cannabis sativa
  modified_base (574)..(574): a, c, t, g, unknown or other
cccagttgtctctagcaattttggctctgtttcttatggcaatgaaagttaccgaggctgttataggtagctacacacttctttaatgtctctaaaatgagtgctattcttatagttgctgattattatatattttaatctaactcactttattaattgattcattagttagttttaggcaggttggccaagattggtctgcctttgactgtaattgattaagaggtaataagtttttgggatatgaatcatcatatgaccgaattgtgataaattaattaactaactacatttagtaaaacgaaattgtctaattaggttaattaagcgtagtgtaagtgtaacgtggctgtactctattccatgtttgatgattttcgaggataatgtttgtttgaaaactttttatatatgattattaattattaattatgtatctggtaaaagtgtatagcatatatatgaataaaaaatgagaaatttgatatttaatgctaaaatgttaaataaggttttaaaatattgaaatttttacactaaaaatataaaatacatattttattactaaaatacnaccacacggttaagcctacatttttactcttcaact

SEQ ID NO: 70969 - DNA, 1005 bp, Cannabis sativa
tatatattatatatgtatgtgtatatgtaaagagaaagctgttcagataccatagctttttttggttcagaacttttgttgatatttttgttttcgtaatattgatgaggcaattaagcactattatcgatcaattataacttatatatatataagttacactttatctctattatatattaactcacagactaaaattaatcatgctacattaatttattacttaaggaattcctcttaagaaatagtggtacgtacgtgcgaaaaagtcaatggcttacatacccatgtataaatagattaatatattaatttgtattgataactgcgcgcgtacgtaaaataattagcgagtagtactttctttttcgtgtttgcgtcaccccccttattttcagcgaatccatattgtagttggcgttataccatgagaaaattattatgtattatatgaagggattctatgtagtttcctcacttcatgctcattttgagagattacatacctcggcctattttgattgttgaatttgctttctatataatctaatggtatattgataagaaacttgaaacaagagtggggactttttatttaataagaaacttgaaactacttcattgcagtagttatattgatatttataatggactagattgggcctcttataaggtgctgcttagtttgtaaatggtatgtttggaagtaatacaatctgtatcttatctgatttatataaaaaaaaaatattataatggactgtgtcattttctcaaatttttcatttactttaatcacgcattactattgctagttattcatgcatttaataattttaatacaatatgagattaaattttgaatacactctattcacacttttactattgctaatttatgtattgacactttaataatagtaagacaaaataatatttaaatttggggaattactccatatactatttttttaaaaaaaaatttcaaatttacggtttgagttt

SEQ ID NO: 70970 - DNA, 1280 bp, Cannabis sativa
ggactcggaattctataaaagtcatgaagcaggaaaaattcaatctctaagggaagaagaaacatgtgaagagatggaacttgtcagcaggcaggcggcgggtgaatctcagaaatcgaccgatgctttctcggtggtttctcaacaaaaggaaccagggactctcccttctccggcgacggcaggggctagcaatggtagggcggtttggggatggaacaaagcggcagagaagatcatttcaaaaactcagcttccgtgcgatgatgatggtacgtcccttgagacagatagccgccctagtgatgcggatttgtcgacgattaagagtcccaatgaagagctacgtgattataggaggtcgattcctattcagaagatctttcaacgtatttggagaagtttgaatgtgccacgtgtgggtgctccctcaatgccagctggacatttaaatttaaattttttgtggcagtcggttgggaaaaatgtggcttttgatgtgggccaagaccttatgggccgaccacttagggttagaacggaccaaagagatgctatacttacaagccttaataagatggactggaactgtttgggcctaaaaaacagtagcatgggcttcagtgtttatacacaccaagggccctacacgctgaaattgatgtaccacgatcttcaaggaagcaaatcgatttcagtcggcaagaaggagcctctttctattgtcagcaagaagaacacaacccagatcttttctgaatatttcgaaggcctcctcaagtctgtcatgccaaaatcacgacaaaaattccgaagtgccattattcaattctgggaagaattcgacccaagagaaagagattattcaaaggcagtgttgaaagaatcggaacaaatcccagtcgtggaagaaccagtaagcaaacgctacgtcgtaatgtcttcagaaaaaggaagtctacatccaaatgcagtagagaagaaacaatgggttcagatcgaatggaccgcattgaagaagtgatatcggatgacgatgatcccttgacaaatgagattctcgatttctcctccgagagcgataattcagaagaagatgatgatccgggattagtagaagatgaaggagaagaataggaggaaattatgaaggatatcaaggctctttggactgatagtgaaaagcctagagaatgcccagtgagttttgaattgtgtttggaagtgggcgatgtggcagcagaagtttctgcaagaggcgagataggggctgctcaagg

SEQ ID NO: 70971 - DNA, 1464 bp, Cannabis sativa
caattacttctaattacacagtgatcatagtgtaattacatggtcagacaaacatggcaaattgtgtaattgcctctaattacacacaaatccaattacattatggctttccaaacgcaagggaaaacccaactcacagccaatcatgcaaagcaaaaagagacctaaaacagagcacaaccaccaaactaaacaatattcaaggaccaaaaacaagttatatctataattttagttttggaattaaataaggaatgaattgactaacccttttgtgaactatatatccactttaaattattaacaatattgatgtctcttctaatcacttcatactcaaaaaaacaacattatttactttcccaaacctcataaaccgtggccataagagcaacaaaatacactacctttatgaacttgggcaacttgcttctagacacccatttcacgagctgaagcacgttatcaactttagcattttctaactcaaccaagctttgatgtgagtaatacaataatcactaaagcattatctgaaccaaattgtgttcaagagtctcagtcacacaataggtagctactattagaaatgaatcaatgtgatacctaaatgcttcaagtgatcgatctctaatattcagtatattgaggcaggcgccaaggaccgtctcaaacattttgaaagtcatattctaatcttaaataaatcttgcccctaaacaaaataacaagtacaattaaattcaagtttaatcttttttttttttgatagatggagtcactagtgcctggtgatcctgaaattaaaaaaatttgtaggcaaaatcaaaaatagaataacttgtgtccaacgttgccaatgatgaaaacacgactcaaactaatattccttcgagagactactccccgctattacgggggttcattaattcatgtattcgtccacatgttgtagaggcaaataactttgaaatcaagtccctcataattcaaatggtgcaatattgtgttacattcaaaatgaatcgagtaagtaacgatcgatgcaatccgttacaagctccacccatgggtgagatctgtgagagggaccgcactaaagtccctctctcttcctctcctactgtcttcttcaatgttggacaatgccgacccccgcccctgaaccagcaagcctagtcctagtatgttctcgttctctttcttactcattctctttctcgatcttatttttttcagggatgccaagccccaggacatttgcgatattcatgatgcattcaaaaccatgttaaatattttgattctatttataaccaatctcatctcctgtttaatttttgttgttgttgttgttgtagatctgtttaagctgaattattgcatttattcactacacaaaatttcacttttagtcacaacaaaatttgtgactaaaactaaaaaaattgtgactaattataa

SEQ ID NO: 70972 - DNA, 1545 bp, Cannabis sativa
aggattaaagcctattttcaagcaattaaatcaacaacattttactgatatcccagctgcaatagtcagagctgaggagaacctagatgtttgccaaagtgttgtacaccagcatcctttcaatgttacattacaagtacatgaagctgaggctcgagcagcttatgcttcattgcaggatgcctatctatcatttttacaacagaaggcaaaattactttggcttaaggatggtgacactaacttagccttttatcacaacagcattagagctagaagaagtcaaaacaaaattctttccatctctaatgctaatggggtaagagctgaagatccccatctcattacttccttatttttatattactacaaaaacctacttggcaacagtatgcagaataggaaatctgtgctgaactctattattaagcaagggcctgtattatctaaggaacaagctaaccttctggctaaagaatttttcctttgatgaagtgaaaaagtaatttttgacatacctggtaacaaagctcctggcccatatggatattgtagcttctttttccaagacaattgggagttggttggtaatgacatctatgaagccattacttccttcttgcaccttggacagctcttaagggagattaactccactattttgacacttattcccaaaactaagtgtccatacacaattggagattatagacatattacttgttgcaatgttctatacaatgctgctacaaaactaattttcttgatacttaaaacaattctacctagtttagtttctcagaatcagagtggttttgttcaagggaggtttattggtcataatataataatttgtcaagatctcatttgacactacaggaggaaaacaagcaagaacaattgtattatcaagttggatctccaaaaagcatatgatactctggaatgggatttcattgaggaaatgttgtgtgctttcaagtttccaggcagcttcatcaagttaataatgatatgtgtcagagcacctagattctccttgatgttcagtggatccatacatggattctttgaagccaagagaggattgagacaaggggaccccatgtctcctcttctctttgttttgggcatggaatacttgtccaaaattatgaagaaagtggggcaaaagaaggatttcaaattccatgaaagatgtggggagttacagcttaatcatctcagttttgtagatgatttcttgctcttctgcaatgggaactataagagcatctatttcatgttgcagggactcaaactcttctttcaaacttcaggtttaatccctaaccacaacaaaacctctgtttactgcaataaaatgagtgatacagaaattcaaagaattatggatacctttggttttaaaaaacatgatgtaccttttacttaggtgttccaatctatccaaagaaaatttcttcaaaagattgctcaattttagttgacaagatggttgccagaatcacaacttggagttctagaaatttatcatttgctggt

SEQ ID NO: 70973 - DNA, 1356 bp, Cannabis sativa
tttcccatttttaacaacagggaatttgtagggaccaagccatagtgtttagtcaactcaacttgtgggatccttttgcagcaggattgttgtcatcatttgcataccaaatagtggtgacttcttttagttttgtagtaaaaacagaggaagttgcagggtttaagcaaagataaactagacaaataaggatcttggtggggggcttgaaacttgaactattccttcaagcatcaacatgacattcttcatagtgggtcttcattaaggcaccaaatggcaacaaacatcacaaacctctccaccattttcatgtcacttatagtcatagcttaatgtcattttcaattagagcttcaacattctcatcattgtagcatccataagcccaatcacttaatctttttccacatccaagtttccttgacaacaaacaatttcaagcatgactacgccaaaattgtacacatcaaccttaattgagataggcacggacctaaaccaattgggtgctatatacccttttgttcctctattagtactctttgtattaaaatggctttgatatgtccacgctttaagcctctattgggtcttcccccacggactaatgattcttatacacgggtaggtcactctagttgcttccaagattaatgactgaccctgcaaaccaacacgagtatttctagcgtgctttgtccttactcgcaagcttctcgtaaaaatttccctggaggtcacccatcccaaggttacatttcatcccgaaatttcaatcttgccattccaaaattagaaattcgagtattttagtactcatcaagaagaacattgtgaggctttatatcacaatggatgacctgaatgttaagtaaaatagtcatttaccaatcccaacagcaatttgagtccttaggtcctaactttgcttaagacagtccaatagatagcttgctaaagcgccattactcatgaactcatgcacaaacagcatgtgattattctcatcacaatatccgatcagccaacaagattatattcttgtgatgagtttggtgtgtaacaatcacttcaactctgaattctttatctgtgatcacaatgtgaaatgattctactatactattacctcccactaccacaccactacaactatcattcaatttaaaatgtaaattaatttatataagaaaaacaaaagcacatgtgaatctaagaaaatcaaatatatttaatcttttgatgatgatctggtcctaatgtgaaatgattctactacctcccactaccacacaactacattttgttacataatataatattgtatagtatataataacatatgaacacata

SEQ ID NO: 70974 - DNA, 1202 bp, Cannabis sativa
attctaacagtcgtggtggtttcagtttcaatagcagaggtggaaagtatccaaccaactccaatcgagttcagtgtcagctttgccataagcttggacacactatgcttgattgcttctatcgattcgataaaagcttcacaggagtgtttcctaactccaattctccccaagctcaagctaatgttgctcagacaacacaacctgaagacagctgctggtatcctgattctggtgcttcgaaccattgcactccaaatgtgcaaaatctcaacacaggtgtcgaatatgaaggagatgaacaactctttgttggtgatggctcgggtctctctattcaacatattggtcagtctattgttcacaccaactcttctcattcacttgttttgaataacctgctgcatgtaccaaaactcacaaaaaatctgttaagtgtttcttgttttgctcatgataataatgtattttttgagtttcattctgacaaatgctttgtcaaagatcaggcaactcgaaccatccttctcactgggacacaccagaatggcctctatacttttaatccctctcaattccatgtgcaatctcctaacacagtcactgttcccagagttttaactgcatctgtagcttctaatcctgctgtttcaagtgttctcatagcctctgtgtcaccaactaatgtaccagaaaactcttcttgtactcattgtaataagtctcaagtttctgactatgagttgtggcacaataggcttggccacccctctgaaaaagttgtcaaagctgtattgcaaacttgtaatataacaatcagcaataaagatcctttgaatgtttgttctgcctgttgcttgggtaaaatacacaagcttcctttcccaaaatcatctcacacaatttatagtgagcctttacaattaattgttgctgatttatgggggccagctaaaacaacttctgtcaatggctatagatactacattcaatttatagatgcacactctaggttcacttggatttacatgttaaaaaataagtttgaagccttaaagacctttttgcaattcaaaacagaatctgaattacaattaggcacaaagatcaagtgtcttcaaacagattggggacgggagtttagatcatttagtgagcatctcaaacagtttggtatcactcatagacacccttgtcctaca

SEQ ID NO: 70975 - DNA, 1282 bp, Cannabis sativa
  modified_base (698)..(704): a, c, t, g, unknown or other
aattttttttgaaagggaattaatttggcacttttaagctacataaatatatattttttttaaaaataaaaataaaaacttattggcaccaatcatttttgaaaaacaatgtcttctttttccattatgagttgcaaaacgtgtaataatatgtggtgttcgtattatattttatttgacctatttttatattttgtatcaggcatattgatttatttttgacctgcatctaattatctcaattttaacacaactcgtaaaagctgtatcgtgttcgcattgacatacttttactcgtttattgaagctaaaattgtagagaaaacgattaatttaggttctattagaaaatttatatatatgtgtatatatagtttttcatatctataataaaaattaaaaattttaaaattttcaatttttttaaagaaataaatcagctctgattgcttatctgactctggtggggacggttggtggtttctctagcaagaggtccgagactttgggtttgagtgatgttaatatgtttttggatgcgggaattaatgaggagcaacgacatgtgggtactataaaaaattttactttagtcacaataaaatttgtgactaaaagtaaaaaagttgtaactaattataaattagcattcttacattgtgactaaaaggtccgtgattaaaagtattagtcacaannnnnnnaatttgttgtgactaaatataatttcagttacaatacttgttgtgaataaaaattaaattagtgacaacttgtatctaaataatgtgttttagttgtaagtaactttttgttataactgaaaatcacatttaattacaaaaaaattatattataactaaaaaattatcactaaatatgactttttttggtagtgggggcttggggtggtgctaattggctgggaaggggcgtttttgagcaacaacgttaattagcttctcccatcacacagggctccggctctaggcataagcgaactactcccgcacctaaggcacactcattttagaagctcaaataaaacaatactttttaaaaaatatatattttaataattttaaaaatactattatttttatagtaagggctcaaaaaaaaaaaattgtcaataacttatgtcaactcaagaccgatcctgctatcacatagcttaaaagtaatattaagaaaacaaaatagttgtttaatatatataaatatataaatataatctactaaaacagaacaaagatgaaaatcctcacaaacaaaatacaca

SEQ ID NO: 70976 - DNA, 1026 bp, Cannabis sativa
  modified_base (924)..(929): a, c, t, g, unknown or other
aaaaacatttaaaagtacggtgggacctacctgccgtacaacggattgtaatccgtattttgcacatatgggcacaaaatcggctgcctacaattatatattgattacattggaatttggattatataattaaagaaaaacttacgccagtgcaatttttttttttgaagacccagtattattagagacaacatttatctcccctacaacccaaatttattatagtgaatgaatatctttatcaaaaaataaataaaaaattaaacataaattttagcgcagatattaactataaaagattgaaataagaaattaacgacaacacttctctacataacatacaatatattttagtactacttccgttttagcacaagaatgatttgaaatcccccctccttgtgaatatgttgaagttgatctgaaatgtcttcaattttcttatgaaatctatcaaagagttcatcaataatctcactaccaaaatgtttggtcaatagaacctccactgctgctcttaggtgcatagtagttgtctgtgtagaaattatttgagattgatcaaacatagactttgttagctccattttctcaatgctaaaacacccatttacttctatcaattctttcatctcattttgagacacaaggtacactggtatgttgaaagaatttacttgatcttcattgacaagcacctgcagtaacaaatcaaagacaattttagtttttttttaatctcaattaacattttttccctattatttagaaataataaattacactataaaacattaacaaattaaaacataagttatggtagtatacgcaaggccggccctaggcataggcgggctaggcctagggcccacactttttgggggcctaaaataaaaaaataaaaaaaattattaggcttttatnnnnnnaaaatttaagtgtattataagcaacaaatatttatagtttacttgattgaggtagatgccataatatctaaggtcatcggttcaaatattatctttg

SEQ ID NO: 70977 - DNA, 701 bp, Cannabis sativa
tattttcctctcatcacaagaataaattttataaaatgtgtgatcaatacaaaattaaacgaagcgttcgggagaagtaatcagcgagcatctagatgtcttgtaccgttttccatttattaattacaaaatcccataatattagaaattaactctcgaggatctcgtccaaagatcatatcttaataaatatgaaaataaagtaattaacaatcaagcatttaatatgtctgtattcttcacgaatataggacatgatttttggcaactgtcaaccccttagctgctagtctagctttgtatcgcactagttcatctttgtttctaccttctttttgtatgaataaccactttcgctgcactatactcttccctttaggtttatgaacatatatctaggtcttattcttctttaaagagtccatttcctcatccataactttgttccatttcctatcatccttgcacttaatagcttcttcacaggtctctggttttattttttgtcctcctaggatgcttacccatgtataggttgtatcctcattctagatattaaagttgtacttaggattaggtctagtagccctagccaaatgatagtctaaaaggttttcagtttgtgcctcttccgtgtttcttgttgttccacctgaactgtaacaccctaactaacatcggcgtattacgtgatttttaaa

SEQ ID NO: 70978 - DNA, 929 bp, Cannabis sativa
ttaatttgaattgagtaataaatatttctggtaattacatatgtatatatggtaattaataattttttgtggttttcttacttatttttatttctttttcctgcattatttatctgtctctcctcttctttgttttttaagcaatcatattcatataaaaaaaaaattaatttttgttggcactatcaaaaatagaacccaccattatcaatatcatcatgttcttcataaatacaaaatctggacattcctctctaaatatttaatttctgaattctcaaaccccactatggtactcaaatcacatatctactcaaactattgattaagactttttttgacaaactcataacactttacatgtgattcagcctcttgcattatcatttaattattcccttcagcaaattgggtttattctattgttctctcttttgctatttaataattgtttcaagtctttttacaagcgtggatatgttattgttctaactagtgtcatatatataataatacacttaaaatatctttttgttttgtgtatatatatagcatttgcatgctgattaaacatcaaattaagtattaatcttgtgttgaattaattaatatggcgaataaaattcaccatggagaggcaagtagttccttcagtactactaatgcattgcttatatctttaattaaagttcaaataatatttttaaaaaataaaaaattaaaaattaatagtgttattcgggttaggtcgggttaggtcggtttaattgggcgggttacttaattttcaattgggcgggttttttttttcgtcgatttttttttttttttttttttgcggttttttcggtttggtttaggcgggttattcagtttaggcggcttacaaaaatatatgtacagccctagaatagatattacggtaaatt

SEQ ID NO: 70979 - DNA, 840 bp, Cannabis sativa
aatcaattatttattttatttccttaaaataaaaatattttaataaaaaccaaattcaaaaactcttatggaaaacataaatgttggcactttttgctgaaacatgtcgctatagttttgcttttgtcactagagataataatggcaacttgttggaggctcgatcggtgtgtaaaccaagtgctcctcagcatgaagttggagaaagtattagtctcaaaaaagctctaagttggttacagcggcagccgtgtaggaaggtggtgctcgaaaccaattgtttggtgttggttcaagcagttcgttatcgcttgactgctggaagtgcaccaatgctctcttacttcgtgaggattataaaagtttgatgttgactcttcctatagtttctttgtgtttgtttttagtttgatgtcgactctttctttagtttctttgcatcttattctatctctggtcatatgttttatgggagtgatgttaaggatgttttgtttaataaagttgttatcttattcgaaataaataaataaataataaaaaaaaaaaagttgttcttgtatattttttatctgttttgacatttagaaaaaaaaattagtttaattattttttatattcatgtaccttgtaattatttaagattatcaatcaatataaataaaaaatagactaaaaagttattcattatgctccaacaaataaaaaaatatacaaaaacaatctttaggaaatatactcgaggcttatatcgtgcattttacgtataacattataaaatctaattactcatccaaactaaatgaaaatactaattagtttaattggatgttggatgta

SEQ ID NO: 70980 - DNA, 1963 bp, Cannabis sativa
tattttcactttttcaattttaaaaacagaaaattgattaaaaaagtgttaccaaacggcaccaaaaatttttgatgaaaatttttcttttgaaatcacaaattaaagaataaagaattcaaagaataattttgaaaaaaaaaatagaaaaacaagagtagtacgggtttacaaaatttacttgtgtctaatagtgagtcaaattgtgatgtaaataaaaagtgatctacacatgtagtaagatataaaatttacatcacaataaatattatatattatatttattattatgtcatttttaatattttattattaaattttagttaatatgcttttttttttaaaaaaaaatgattgtctattaattagaaaattagacctcgtgatcattacaaaataagtctttcgggatatgagaaataggtaagcaaccaaaccgattgcaggtgaaggtccacttaactacattatgggcaacaaaattacacgggattacatgaaaacaaacaaccatcaaaatgatatattaaattttgaatcaagatttacaattatacactgaagtacaataataaaagttgatgtaaaaatatcacaaaaatactttttgcgccaaatatagctcaagctttacatctccaattggagatggtcttactctctacaaaatttatatgagcattgatattggacacttttggtgtttagcacattctagacgtgtttttgtgcaattagttaggccatctctaatgaaagatttgaaatttgtgtaaaatttgacacaaaaataggtttgtttgtgctatgtttggcctactatttataattgtgctccaatgcacaagatgtaaaataagaataaaataattaattatattgatgatcaattgaaaatatacaaaaattattattttttatttttttattatctaaataatagtaatatggtaaataaaaaatgtaagtttagtaaaagtcaataaatcataataattagtggtattatagtaaataaaaaaaagtaatatttattgtggtctaaatttgacacaatgttatattttgtaccaaatatgacacaatttttagcatgtgtcaacttttagtacgctttttagaatactattagagtaatagtttttgttaagtgctaaaatatggcaatacatcatatttttggcaatccattaaagatgcgcttagtgataatctctaaaaattattatattaaattatatgagattcgatacttaattctaccaataataatgtgttttagcgtttctcaatttatgtatatggttttttctttccttttttaatttatttaaaaagaaaatgtcttaaataattattttttttcctttttaccattaggaacctcaacttatattccgcattttttattattattcttaaaacgtctatatatgcattaaattttgcacaatatggccactgaaaagttagtttcaaatagtattaatttatacatttggattttctttttaagattttttcacatagtaaatgttactctaaaaataatatatttatgaaaaaataatttttttttatgattttataattgcgctttttttaattttaaccaaaaaaataatattcaaaaatactttcagctggccaaataaacaaatatacaacctaaataaaaaaattacataaatatcacttacacacacctatccatgcttcttgggcaaccatcgcgcaaccacgcagcaacctaacgcaactgaaacgaaaattcaaccagaaagaaaaccactattaatttcggcgatttcacatgagaagacaacgagaatcaatcgaaataggggctatttcgaatgggaaatttcaatttttgaccctaataatacaacctatatcaaaatttatacccctttataatttgtacaaatttattcctataattttaaaagtttcctaaaat

SEQ ID NO: 70981 - DNA, 1384 bp, Cannabis sativa
aaaaaaaatagactaaaatttttttttgatgccgaaataagtaaatggtacatcaacacattgcttttaaagaagttccatggtagaatcacccaacctaatataatttaaaaatatatatgtaaaaaaaaaatcagtggagaagcttccgcagtggcaagctgagtcaattccaataatatgtaaattgaaaagagagtggaaagaatagcatatatataatggaaagtatatatatattgaatttcaacttgcaatgaaaaattatttaattgagcgatagtatacatatgtttggttgaatatatttcaaagatcaatcttaatttttaatcaataaaatattacaatgtggtgtttagcacttattaagtgatacataacactaatctatataataataaacatggacatcatgacatagatataatgctataaatggcaaatgtacacattgtacaattattctcaagttaagtgttatatatttagtacacaatatataatataatggatttagctttagttgagtcttgatgatcaataataggtattaatttctcaacattgtgctatagattatatagtacacaatacataatgccaatatataatattcatctttgactttgtaataataagcatacttttttaggcatatatactttttcctatatgtagaaatattttttagtaggggcatgtttttggtcctattaatattataatttgattttccttatatgaccgtcgttatttaaaaaaaaaaataagatttttataaaattttgaataatttacaatataaaaaataaatattaaaatactaatcttaggtacacattaaataagcttctaaactatttgtacatataggtaaattttttaagtaacgtatgcccatgtatgtactatgtgcagttaatgattttctttttcatttttttgccagcttcatcttgtttttactttttaacttttattatcactttcttaaaaaaaaaaaaattctattactaccatttagtacttacaacttaaatttatcattgataactgattgtaatgattacaaacttaaaatataaattaataaaataattaatattaattatttatatttcttgattatatgtagttaattattattttggttctatttttaataataagtattagagttataatttctcaattttaaaaaatttattaaactatagttatgagtatgcataaatcgatccaatccaatgataactggccgatccaattacaactgaccactaaatattagatattcaattatgatcagatcagatcgaatgttatttttgaatttacaattgaatcggatcggatattggatgtggtatccaaaaattta

SEQ ID NO: 70982 - DNA, 2194 bp, Cannabis sativa
tgctgatttgaaaagtggttttttttcacatatgacaatcaattttttttataagaattaaattttttttaaaaaagtgataaataagacccttttaacatcattattattccattcttcttttttatttttattttgtatcttttattttttttccagcttcttcttcttcctttttttctctctcgcttttgttagtaaattaaaaatgggtaagaaatatttcaaagaaaactcccatagccctacatcttctatagttttgaacccaaaagaaaatcaattgttcattctctggaaaagagaaaatgaagacgtttgaaaccgatcattgaagatgcagactctgattttgaacttgatgatgaagaatttgagatacctaaaatgcttaaggtatttatgttgtttttcagttattttagcattttttttcctttttcttgtaaatgttctggttttttttttttctcttatcaatatcttctgttcattttaatttatttgttgttattatgtatttgatattttttgtttcttattgaatgcatatttatttagtgttttttaatagttgttttgttgttatatgacttgttcttttaaggcaaatttttttctttttttttttcttataaaaaaaatagttgaatacatgttaccccaaactcattacttacggatcttctcatctccatcattttcgaaatgttcttctttttcttaagctttttttcattttttttttccatttgtttgaaagattgatccacgttttttcaattgtggtttccattagtttttgctcttctcatctctatcatcttcaaaaaaaatttcagctttttaagcttctttcttcagtttttatttatttattttttttgtttgtgcatgttcagtcttagatatcaatttagaatttcgttcatcactccctgattttgttaaatatatggtttgttgttctgtatgtgctattcagtgtttagtattgtatacttgatttttatgttatttaacggttgtttttagttattctgaattgttttttttttttaatgtatttatggtaaggagattgtttttttaaggtaaaggttctctctcgtgatgttgtggtagtccccactgagaaaagagttattgaggtacaattttttattttttgtaattttatttgattattttattttgtagttttaactgttgttttagtaattttttatgttattgttttaggattgaaattttttatgtatacgctcttactggaaaaatagttgttctggtagttcagtccataggtgttgaagatggaagctttgtatgtattttggtcctttttgggtatacacaatataaaggaaataaaaaaaaagtctaggacagtatatttgtaaaaaataccatgcggtagtatttttataaaatttatccaaaatttctgtagttttataaatctccctataccagattaattaggcccaattaatctaaggccgttggtgttgccaatcccaatttcgaagtcattttacaaactaatatctatgtaatggaccttattgaagttggaggtgaggtctgtcgagatccctttgtcaagcaactctccacctcacgctgttgacttctttataagggtcaaaggacacgtagtgaagacaaagaagatgaccaagaaaataaatgctattgacattgttttttgaataataattcttaattaaagaagaaaatgtcaattgggattttgtttttgttgtaatataatgtgtagtacaaaatagaagcctcacaagtgtacgtctttcgactttgccaactcacctccatcgatccatccttattgattattttcctagctttacttattaataactagttgatagaatcacgcttagtgccgcatctataataattttgaaaattttatttatacttaaaatatatttttcatattaagataataaaaaactcctttttattaacacataaaaattaataaaattacaatttaatactaaaaatattaaaagtacatataaatagcaaaaaaaaaaaaatcattatttttcatatatatattattacttaattaaaggagcaccgcaattaagttaagttttgctctattattatttcctcaatgaggtttttttatatatgaattttcatgtgtatttttata

SEQ ID NO: 70983 - DNA, 1808 bp, Cannabis sativa
aagaatagaaattccattctattctattctattcctattccatttttattttgtaaccaatgccacaatagttggagacaatttctattgacttaaaggtggtaaacaagaaaagttttcgtttttcatgaattggaaaaacattaaaagaggtgggagacatttatatcataagggttgaggcctctcctattagagtttctaatgatttaataaggtgattttttaagatgattaaaaatttgtttttcaattattatatgtcgcacttaaattaaaaactatctcaaaatgaaaaaaatacaaaaattatttaaaattttactatcactataattttcacgatcactattaataatctataattgatcactatttgaatattattataattttaattcaagattgagataataattgaatatgctgtaatttaaattatatattggacgagaatatctgtataacttgtgtagcagatagagtttctatttaatgctttttatgttaaaatttatacgtaaaatagtttgcatatagagattaaggtcttagagaaataggaagaagaagttgtaggatggattagtaagataaataaattgcaaagttaatgaaattaatactctaagtttatccattgatatgttcataatcattattattattattattattattattattttatgaatgagtgagttttattgctcaaagaatactatttacaactccaaaaaactctaaactcaaatattaatgtaaccagacaaattaaattttaatgtatgaactatatatataattttattagaataaattgtggcattaactcataatagtgtcccattgctagcgattaactcccgaattcatttttttgattgtaaaaccctctaaacttaaattctgttagcacttatagtctcttatacatgtatttttggcatgtccatgtgaacacagggtattgtccacgaacacaatgtacacacgacaccatgtactctgacccaccttatctccgacgagaagagcgaggaggagaggaagatgttcgttcacttttgggtcgcccgcaatggagaaggaaggtcagtgtgtcaactgtcggcggtgtgtgtgatgacttagactaaaatttagtcatggttttagtcttagtagggccggagtagggagcgacgaggagggaagtgatttgccatggggaagggaaggggtaagtcatgattttagtcttatttttctttttttttagcattttttatatgtgtgtgtgaaattgtgaataatgaaaatagttaaagaaatatattaatgtatacgggttactatgtggatggacttcgcctgaactcgtgactccttcaaaaatatccctgcgcccgcgcccatttatgccatgggtttaacatgcccatcctctcctatccaagctcctcaatatttccaatccactttttctagctatggatcttgtggcaaattgttgtgcataaaggtactccagatctccgccgacattccacaattaatcatatgaccaagcatattatcatacaaagaattcattaattagccaatgcatcaagaactgatcaaattttcttcattgttggtggtctggattagggatattacctgcaagagagtttgatataccatgacataatctaaggatgtagccatcaagatcatacactcgcacaacaacaagaaccagggatcttcaaattgtgtaatttgtttgatctaatcttagatttagtaggaggagattatcattcagaactgccacttgagct

SEQ ID NO: 70984 - DNA, 1802 bp, Cannabis sativa
  modified_base (1536)..(1537): a, c, t, g, unknown or other
ttccccacaaataaaaatcctgagtccgtcactgactaagctcaccttaaaattcaatcttagtctgccattgcttgttattttataaaacattataaaaatagaaaaaaaaatatatatctattaacataaaaatacaaaaaaaaattacaaaaataaataatactttatatataattatccctaattacttcttattattaattaattttcgtatagttatgatgattaatataagggatatatcattaatataagggatatatcattaacatatatacttaattttgacttgtttttattttcataaagtttatatagttaaagcactactatcaagtgacgcacagagttgaccctagactaatatgagctagatttgcgcttagggtatacttattttagcggctcaaataaaaaaatattttaaaaaatatatatataacttttttaatagtttttaaaaaatactatttatttttattagtgatattttataaaaattattacattaaattatttgaagctgaatccttaattatgtataataacttagatgatgtcttcagtgttttttaacattgtatcacataattaatataaaaaagaaatcaaaatatattgatcaatataaatgttgcagtatatatacgagtcaaataattaaaatattaaagcttttctatataatcaaaattaaactcaacgggaaatcacattaattatttgctgtcataaaattaaagcttcgatatatattgctatgagtttcatgtgcaaattaagtgtaaaaacaaaaccaatcacgtacgataaatatatgtcgttaatttattaaatcaaatactacccaagaccaagaggccatatatatatttattgtaacaaatatataaaaagatatgtaatacttgtgtactgaaaaatatgtcaaattaaatagattcataatttcattcaagattaattaatattgacagtactgcgtatatagctaactataccaatatatcattgttcttatataactcgaatttattataaatataatttattgacaaattgaaaaggggcttacggtacgcccgcatgaaaaatattattgcacagaaacaactttaatttatcatgtatattatgagtgattctataatgcccacattctttaaaaatagatgtattgatgtatcatctatttattttgatattaaaaaaaattaattaattttttttccatattcgtgtacgttataattatttaaaatatcctataaaaatttgaaataatttacaatataaaagcaatgttcaaacagtttattttacacgcgtataaaataaaataagcactcgtgtaacccagtatttgaaccctattttcggcttaaaatttttgcaaaatgctttaaataattgtaacgtgtatgaacatgccataaacataaaaataaatttgactaaaaacttattttaaatatatccaaacagataaaaatacagtacttcttttttatgaatatgcatatatatatatanntatatatatataaatatacatatcgtatatttattcatgacagagtgtcttgtaacttcctagctaccaactgtcatcatctttactttacttatctcaaactttaatactttaggatcacatttcgaaaagtaacgttcctttaaaaaggattggactaaaataatatgtaaaagacaagatcgacgtaattggatatttaacatatatgatgcatgcatgcatgagtcgtttatttatcaatacaaatttaatcgcacatttc

SEQ ID NO: 70985 - DNA, 770 bp, Cannabis sativa
gttacaaattcaaagttttggataagaaaaggaaaagttctaaccaaaatgacactcgtcaatcattgatatgggagaaagaagcaaaattcacatttggagaaattgtagatgccactgaaaactttgatgacaagtattgcattgggaatggaggttttggtactgtttacaaagccatattgagatcacatgagttagttgttgcggttaagcggttgcacttgtcagattcaagtgagattttagaagctagtcgtattagtttcgagaatgagattcgaactctgacagaagttcgacatcgaaacatcgtaaagctttatggattttgtttaagaaagggtgaaatgtacttggtgtatcagtatgcaaacagaggcagtctaggtaaagtattatatggttcaacaaattttgattgggattcaagggtgaagatagttcaaggattggctcatgcaatctcatacttgcaccacgattgttctccaccaattgtccatcgcgatgtgtccttgaacaatgtactactcagctcagattttgttccgatactgtcagactttggtacagcacgattgttgatccctgactcgcccgtttggacaaatgtagctggatcctacggctacatggccccaggtattattattttactcattattaattaaaatattttcgacttgatactgaattacaacaataacagtttcacacctcattgacggtgttaggcaatttgatgccttttaacatttctcttatta

SEQ ID NO: 70986 - DNA, 2814 bp, Cannabis sativa
ttatttttcaaatagtttattttgtaatatttgaatttattaaattataagactaagaatacaatattaggaatatctaaatttaaaattcaagatattatataattttatcttgttagaaatttaaataatttaaatttttgaataagcttaaaatttgaaaaatttgttagatatttgaatttaagttagaatttagggaatttaggagtttgttaggtgttaggagctttgtaagattgaaaagaacttgatgtgcttcatgagaaggaagaaaaatatcagacttctcgagccaagaacgatttgcttaaattggggaccaaaattctacttattttcacaaatgtgcatcttggagacgtacaaaaaattttatatccaaacttttgaatgacgcaagagaagaggttttgggtcaaaccaatattggtcgggtgtttgtgcattatttttccactttatttacctcaaatcatccctctgaggaggcctttgcaaggttgttagattcagttcctttaaagatttcttcataaatgaatcaacgtttgacttgtgaatattttggtgatgatatcagagatgctcttttttagatggattcgtctaaaagcttgggggtggacaagtttactactagtttttattaaaagaattggcacaaagtgggttcgaacattattgtcgcagctctcgctttccttaatgaggaatcaagtttgaaagttattaataagattcttatttgcttgattgctaaagtttataaccctattagaactattgatttcaccccattagtctttgtaatgtttttttacaagattattataaaggccatgactattcgtatgcgggaggtgctaagccatgtcatttctgatcactgataatgccctcattggtttttgactgtattaatgatttaatgaagaaaaagaggggagatggcttctgcgcaattaaccttgatatgtctaaagtttatgatagggtgaattggagatttttgaagagaatcatgaagcttggttttcaagtggattgggttagaaaagtccttgattgtatctcttgagtggagtactctattattttgaatggggtgattcttgattctattacctctcagtggggtcttagacaaggagacctcatgtttacttacttgttcctactttgtgttgagggattttctggtttggtaaatcgtgattgtgacaatagtcctttgttttgttttcttgtggaagaggtgggccagtggtttctcatgtctttttagctgatgatagcctcttcttttttaaggctttggaagtgtgttgtagatgcaaacaaattttgagttggtatagtgaagtttcagggcaactggttaactttgctaaatctgcagtatgcttcatccccaacgttgggagccttgatagagaaagattggtagccttactgggagttgtcagagtagattgtcatgagacttacctgggtcttccttgttttactggacataacaaaagttggattgttaaactcaattagggacagaatctggaaaaaacttaatagttgaaaatccaaattattctccatggcgggtagagaagttctgatcaaggctgttattcagtccatcccgacctacactgtgaacttatttaaacttcctaaacgtttcgttaagaatgttcataggacgtgtgctcatttttggtggggagggaatgatgtgaaaaagaaaatacacaagtgtatttgggaaaaactgtgccttcataaaaaagatggtggcatggggttcagagacttgtatttgtttaaccaagctctttttgcaaaacaagcggctaggatttacaatgttcccacttctttggcttcacgagtgctaaaaggtttgtattttaggaaccagaaggttggtgatatagttcggtccaagcaaggctcctttatgtggaaaaacattttatggggtaaaatgtttttttgactctagagcagtttagagggttggcaatggtcataatatcgatatctattctaatttttgcattctctctacctctcccactttggtgttgtctcctcattttcttggaaaaggtaacaaagtttctctgttacatgaggcttcaggtggctgggatttgggtttggttcgtggcctcttctttcctagtgaaattgatgctatcttatctatatctttgacctcctcagataaggatggcaaactcatttagaattttgaaaagtctggttggtactctgtcaagagcggttactggctggctcttcgtaataagggattacggcgggcttctccctctaggagatactcggattggtggaaaaaaaattagtcctttaatatccctcctaaggtgagactatttgcttggcaaccatcctctaattggattcttacaaagattataatctggctactcatggtcttttatcagatggtgtttgtcatctttgcaagccatacgaagaaactacttatcatgccttgtgagggtgtctttctttaatggcttgcagaaaaatttgtgatcatgatttgggaaaccctctttctaatcatacatattttcttagctttattcacaattttaccctttgctaaaggataaaattgaattagttatgatcattttatggtgtatctggtttaagagaaataaaaacgtgcataataacaataaattgcctcctgacttggtggtgaattgggctcatgaatttctttggaattttcaacagctgggttcggactaggctctctctctctctctctct

SEQ ID NO: 70987 - DNA, 1540 bp, Cannabis sativa
aaaggttaagatcctcaaatcttttcaaattaagaccaccccaatttttagggagataaatggagttcttgttcgtaagagccaagaaatgagacttatttgaggaaccaagccaccaaaattttccaacagcttggtccaaatcatcacaaatacctttgggcaacaaaaaggttgacatagtgtaaatagaagtgctcatcgccaccgatctaatgagtgtagttcttcccgtttgggagagaagtttttatctccattcaaccatccaaccgagcaatcaacctatccttgataaaatggaagtcattggttctgttgttagtcacaaatattgggttcctaaaaaatttatcttgatggctcatcatccaaaccaagggaataacaaatgcagtcaaccatatccaatttggtattctttaagtatacgactggtgatttggccacattaagccttggacccaaccatcataaaatgtgacatactactattcatgcaaatcattatcgggtcccacacattttaatttcataaataatataaaaaactattaactactcataatgtgttacatcggtatgatgttgggtaccataaagtacctaataacattgatagagagctaaacaaaacaaacaatactgagtagacttccaatgaaaacttggctcgctcaagttcttgaacactcatgaacttgtttcacacaagtaagctcctagagagaagttttcatgttttgtttgatgtcattgctccattgagccagagttaacgaaccaaatagaatataatagaattctttataagagatgattacgaattctttattaataattgagaattattttacaaaataacattaagaaaaataattatgttaaagtagaaaagaaaaatgataaagtatctctttattttgtcattaaaaaaaaattaagaatcttaggtaggttgtgttagggtaaggagttttcgactgtttcagttggtgtcttcgttttaggttgggaactgagtagcttaattaggcctgttctcaactcatggcagcacacagaaaaatatttagggttctaaaaatgtttcaagtttcttctttttctcttctaatggcagctagggtcacactagggttcttggattattgggctttctaacttttcacagcttattctttttcttactgctgaaaacaaactacgtctctaatgggttcaaaaattctttcctttagggctgagcgtttaacctgctgagccaaccaaaccagccaacccaacccaattttgggccgaaatagtcccatttttattgggctgaaataaattgggttaaaaggcttacacctcgtggtcattgggttggtaacggcttggttgctttgtaacccatataactcaaccccagctgacccactagatattatttaaaagggaaattttcataaatatgggaattgaaggtatagcttataaaaaaaataacattatagggttatggtttttttttttttttacatttttatgggttttt

SEQ ID NO: 70988 - DNA, 614 bp, Cannabis sativa
tgtattatcttcaattctacactaaagatgacaagaaaagctcaagtgagtttcccgagaacaaagagaattacaatatttttctacagaatttttgcttacaaaagttttgaaccccttccaaggtgatggaaggctcatatctataggtgaaaagaaatcaatcagcatttatttcctaaactcgcacctcaatcaagttcctcaatcgatttgatcaatctttattctccaacaatcttcagcattaaatgaagatcttggctttgtcttcacatccgagagggggagcctaggtgtatgtcgctcaaggtatacctgtgctctcgaaacggtgttgtgttgtcttatttccttcttgcaaaacatgtcttgtctttcgagtaaaccctatgcgcaagaattgttttgcggggttacaagtgtagttgagataattcttcatctgtaccctaactgtacgctgccaaagtgagtctacactcgtggggagcccaagtgtatgtcgcccaggataaacatgttaatgtgtatatatttacacatagaaaatatttaaattatatttttttaacaatcttgagccattgttagatttttatttcatagtttct

SEQ ID NO: 70989 - DNA, 1582 bp, Cannabis sativa
gtctgccttttaaggattgggtgggtggatatataaacaccattcagatttactgttacaaatttacaatagaaaaacaaagacaaagaagaagaaaaagggaattgaagagacaaagagagaaaaatgataacgtataaaataattacatatttctcaaaacaaaaaacaaccccacgtacatgacactcttttattcattgaatggcactcctatatgtagatctttttgacaagcttatattaaaaaattccaatatatacatacacatatttatcctaaaataagtacgcggttcctcactctttcccaagtgatagatttaataaaaaactttaacaaaatcttgaactactttacaacagtctcgtaatagagttcacttaaaaatcaatataaaaattggtagagagtggataatgtagaaatttaataacatatatataagatttatgattatttcttcccattgacaattaattatatcttataccatctatacactccacttcattctattttctaaaccacacttatgtcagtcatatatagtatcaatttcagtatataatatatattggtatgtatgtatgtataactatgtatgagctagtgaccccccaaaaaaaaagaagaaattaaagtgtgtgtgtgcctgtggttgggtgggtgggtgtgtgggtggtttgtgttagggctgagttgacgggagaagggctgtgcagccgagtatagatagtttatagtgggaagtggtgcacccacgcttacaatccaaaaaaaacaatattagaagggacccactcactactactcattgctacacccataatcatatgtttcatgctatcccaccaccccaacaaaacacaaatattattaattaataataataatattctatttttattccaaaaaaaaaataataatattctattttaataatttccacactaataatataatggtcgcagttaaatccagtccccctccgtacccacatattttccacaccctcatatcctttcctctatttaatatatagtttttcttttcattattatattataatattttagtctaattaaaaactacatttccatatggaccatatctagagagactagctctaaaagactatgtatccagcatgaaattctgggaaaaccccacttgtgtatcatacatctatcattctaccaaatccaatctgatctccttttccttttatcaccttcgttttgttgttattctctaaatttttatttggtagaaaagggaccccaaaaatttcggtccatcctccaatgggagtcatttaaaagagtttcttttcaactcccaaaatttaactttgaaataaaaaaaatccaaaaaagtaaacaaaagctatatatactctaaatacatatcgttgtagagctatatgtaatttatatatatgtatatacagagagagatgggagagagattgtagctatatatagctagctataggaaaattgcttttgcttttgtttaacttaactttttttttattattatttttagtagctatatctacattatagccataatatt

SEQ ID NO: 70990 - DNA, 1335 bp, Cannabis sativa
  modified_base (1112)..(1116): a, c, t, g, unknown or other
taaaaaagaaaaggaaaaaaaattgagtgtcattctagaacaatgacatcaatacttctatagtttaagtgtgtaaaatgtatttaggtaaataaaataatgaaagtggtatacaattttttctagcaatgtgaaagtaaaattgtaataaaaattaaatttgataatcttttatgtaaaagatttctattaaatacattctttcaaaaaataaatataataataataataataataatattaaatacattatttgttaacaatatttattttgggaagagttagtccaacatccattaaattttctactaaatttcataagtcgtacaatactactaatatattccccttatttcaactctaaaccaagtttaggatatggctacaaaagtctaaacccagtaaaataaaaatgagtaattattgattagtgatgatttttcgtaagcttaaataatatttaaattgttcatgtttcatgataattggtttaattaataatatctaaaatatcttattatgattggaagactatagcttcttaaatacaaaagagagaaaaaataataataaaataaaataagtgtgagtggattcatcatccttatccggattcttctaacaccaactcccaaagtaataataataaaaaataaataataattggaatattaaaatatcaggaaatggacccacaaaacccaagttgagcttgagagtacagtaatacctttattagcatgttattttccccataattaattattaatatgattcacttgtcaattcatgtttcggtaataatatgtaaattattacttaaattttaaccaaaatttatagtattgatttaattattaaaaatctattaactctattatgaaataataattactttttttttgaacaacttattacatcaataaaaataaaaattatttatttaaattattattcatttaaatgtatgtacaattaaattatagataagtattaatgaaattattttatctattattttatagtttttttttttaattgatgatttgggttgtagtttctatgtgaattttagttgcgatttaagttagagaaatttgattttttatgcnnnnntttggttaaaaaaaattttctaaacaaataataattaatatttgcaggatatgataacttttatgatattcctaaaatactcccgtttacatcacctccatttacactatcgggccacccatcggactcagtggaccacccatcggaccatatctgctaccaatttcttttatttatgtttttatacataaaaaaatagcattaggtgaccatcggacc

SEQ ID NO: 70991 - DNA, 929 bp, Cannabis sativa
cggaaaaggggcaaggaaggccttcctgccattaaaattgatctcatgaaagcctatgacaggctgaagtgggattcaattgaccaagtgatgtcttgttacggtgttcccttgaagtttcgcaattgggtttcccagtgagtttcgactaccactctcaacattttccttaatgggagacaagtgggcacgatcaaaccttcttgtgagcttcgtcaaggggatcccctgtcaccttacctgttcatctggactgctgagattctatctaggctcctccttgatgcccttgacaagaacattattaaaggtataaggctgagtagaggaggcccggtactctatcatatcttttttgctgatgacttaattttggtaggcaaagctaatttggatgaagtcagaggttactggcagtgtcttgagagcttctgctcttggtctgggcaacaagttaacaaactcaaaacctcgatattctttagcaaaaatacgccaaggggcttgaagcaggagattagagagaccttgggtattgggtcaccggagggtaatgtcaaatatcttggcctacccctttccagatctcgccaaaaggatgtcgatttcagtttcattctggacaacctctctactaaacttcaggggtggaaagctaaaaccctgtccaaggcggggcgggctaccctcatcaaacctgtaggcctgtctatgccattgtatgccatgcaaagtactaaattctctaatagaatggcctccaaaattgatagtatggtgcgtgacttctggtgggggtttgaaaaggataaccacggtctctatctcaaagcttgggacaaattgtgtctcccaaaatccttgggaggactgggcttcaggaaatctacagaaatgaaccaagattttctagcaaagtgggagtggaa

SEQ ID NO: 70992 - DNA, 1669 bp, Cannabis sativa
gatctctccctacctttttattctatgtaacgaggtgttctcccgtttacttgtgcaaaaggaagcagaaggggcgatctctggttttaaggtcagtcgctcaaatccgtccatttctcatcttatgtttgctgatgatctttttattttctgcaaagctgaccgggctgaggtggaaactgttatggactgtgttaatttgtatggtacttggtctggacaacgtttgaatgttcagaattctgcttatatttgttctagtaatgttctggcaaacactcaagttgaattaactcagtatctggggtttcggaagttaaacaaggaggatcggtttcttggaaacccgattatttggtcaaatagcaaagtcaaggatttgaagttcattaaggagaagatcttctctaggattgaggggtggcggtgtaaacttctttcccaagcgggtcggtcgaccttgattcaggcggtggcccaaagctccccagtttattctatggcaactttccttattcctaaaactctttgtgccgaaatggatcaagcggttcgtaagttttggtggacaggttccgcggataaggatagatttttggcgctcattgattggaattctctatgcttgcctcttgataggggtgggctaaacttcaaaaagtttgaggatattaaccttgccctcctttccaaacttgggtcgaaacttgcatcggatgaggactccttatggtgtaaagttttcaaagctaagtattggggtaatggggacaagtccttttagtcggcaaaaatttctaaataggcctccttcggagctaaagggattatggctacgaggggggtgattaggattgaaacctgttggttatcgaatggaagaagggcggatgtgtggaattctccatggatcccatggcttgattggaatatgtttagagctgcctttaatccattaatatagcaaaattcggtcaaggtatcgacgctaattggtgcggatggtgagtggagaacgagctctaccaatcgttggtttgtccctagtgttgctagttctttgaatcttattaagcggctgcctagctctagggaagatctgttggtttggaaagatgccactaatggattgtttactccgagtgttgcttataagtcgattatcaagcatcgttggggtgatccggacttgttttggaaccgaatttggaagctcaagatcacggagaggctgaaattgtttctctggaaactttgcaaagatatcctcccctttgggagccgtctacggaggatctttggtaataatagtagctacgttatctgtggtgcatcgaaagattcggctctacacctcttctggaactgccctcttgctaaggcggtgtggtttgctagccgctggtccattagaagtgagaacctccactttgactccccgagaaagatggttgaatggattttatctcctgatttcatgagtggtgcagatgtaggagatataggagagttcattagatttggtattttcttgtttgatgagctgtggactgctaggaatcgagcttttcatgatcgtataaatccgtcttggatgggcgtgttggctagagttcaaagggctgctgcttgtcttgtgtctgtttgggactctcggcctaattcggag

SEQ ID NO: 70993 - DNA, 1229 bp, Cannabis sativa
tttaagttattattattaataatattaatgtgtaataagtaatgcacaaatcacaactttacttaatttgaggtttttgtccattttgtatttaatattaacacttgaccaattccattaatcccgtgctaatcacgtgattaattttactgaaaagtcaaagcagcgtcctaactagtactctctcactagtgtgtgtgcctttacttataagcaatatataataactttttaaaagataattaaatgaaaaatgaaaaaaaaaaaaattgttggatcacaaaataaaatattataatacttacaaaatgtaaattaatttataagaaaataggtaaaatgtcaagtagcatattattatttgttaggaaaaattatgacaaatttccctcttttatttatttatttaattattacgtactaagatatttgaccagcaattaaagtgtgatggtgtacctatatccatatcacaccaaactttttttcatttttattttatttttacaatttgtcaccaaaaaataattagatataaacaaaaagttaatgatggagccaagtttaatcaatcaagcaacaacaaaggtcctacattttatttatttttttggttttattgaagggagacatatttcacaatatgttattttagtataatataaagtctttctgtttttacattaactatattaattattaaatttgtaataatcaaaacttacttaatttgacctaaaatttaccaggaaatatttgttcacgtttagcaccttttatctaaatttgctaagattatcaatgtactagtactaggtgatagacagttaattactatggttttaaattagtgaccaaacattattgtacaataatacttttgatttagaaaaatacttgtagtaccgagctctattctatcataaaatgttatatattaattcatataattaatatgaaatttcacatattttaatttaataattattatataataaagaaactagtaactctttttaaattgtcacattgttatagtgtttggtatttttaaaatgatagtacacattgccaacatttatttattatttggaaacatggttgggtttattatatcaagtatatatttttcaatattaagtttttttttaacaaataatattaattttttaaaaaatacccaaatcatgaataattttcaattataaaaattataaaaatattttcaa

SEQ ID NO: 70994 - DNA, 3279 bp, Cannabis sativa
tttctttattgataattgaatggaaaagattacattgaaataaagttttatttagggcacaaagtccaacagaaagcactacgagctaagggcgcagctgagtgcattcgggagtcccgagggacacaggttgttggtggagccactgctgctcccacctctagttatgataggggtggtagtgacttaaccaccgatcaaaagagaaaggcaccatctacatccagtggcttgagtcagaatgggaggttctgagggaaccaaggtcgaggcaaccgtcagggtagttttctaatccgatacacttatctagaatgtcccaactgtaagaaacatcatttgggaaagtgtaaaggttggggatgcttccagtgtggagtagctggacattacaaaagagactacccgcaactaaagaaagaagaatatatgttagaagcataacccgatccaacaagggtgtttgctcttactcaggctgaagcagaagctagcccctcagttgttacagttcagctctcggtcaacaacttatatttttttattttatttgactctggggccactcactcgtatgtggcggctataattattgataaattaggtagaccgtttgatagttttgataaagggtttagaaccctactgcctggcagagaattagttatctccaaaagttaggtttggtctatgccaatcaggattaagggtagagagttgagtgctgatgtgacgccttgtcccacaaggacgccacatgtgttgttttataaattaatctataatttttaaaagattagtttaagaaaaagtgtggttaatttaaaacttttggattaaattaaaaacataacttttatacaaaatgctactgagtacgggatcccctgtttacaaactttttacaactagttttcataatcggtattacaaaatagggttacactccaaaatgtaatcaaaaggatggatcctatccactagaagtcgagacactgctattgatatgtacatcactgggagacctttgactcatggctgatccacttttccctttcctttacctgcaccatgaagcacccgtgagtcacaaagactcagcaagaaaagcaattaaaatacaaacaatacttatttcaagaattcacaacatagcataatcaacaagtttatcatccaatacaaacatttatccaatatgtaatcaaacaatacgtaacaattatgcgtcttataagatgaaccgacattgatgccttataaagcatccttaccactcatcatccacgagctacatatgacactatcgttgctcgataaagcaaacgataagtaagaaacctatctacagtttcaagcgagtaattactctttcataataaatggtaatgaccgtatctttacctcgatcataatggagtcacaaacaatgataatcgttctcacttaacatgcttagtagtgcaaataatttttcttaccttaattcaatatcaagtgtgggggctgacctgaatggaaccatgctccacgatctcgggtcctatttcacgacaatgaaacttgatcaacaacttatccaaactctgaaactaaccctaattacataaccagacaactctaacttcccactggcttcaaaatagcttaaatattactaaaataccttaatctaagctctaaaaaacaccccaaacaaaactagtttcaaaccaaaaactagggtttcccctgctggcaaaccggttgaccggttttacaacacatgtaaaattggttaatcagtttctctacagtagaaatgggaaccctggtttttcgaaccaaaacccaaccacaacctcaaccaacctactccaaccttccaaaacagttccataacataaaaacaacatattttaacatcccatacccagatatacattcaaatcacaaaatcaccatgcttgaatcaaaattgtgctcttaaactcattttttttcctaattctagctcaaatagccaaaaagataaacaaattgtacacaattaaaccataaatcaaccctagaaacataatctaactttaatttcacaacacaacccaaaatctaacaaaccctagtccaaacctaacttaaaatcttgaaatcaaagagaagaagagaaagcattacctcaagacttgagcaacaccttgggctagccaaatctgcaaggaaatattgaattggtgaagaatttgacttagattttatctgggttctagggctgtcgaactggagaagaggaagagagtgagggttatccaatttttgatttatttactcttagtttttggttttattctttatcttaattaagtaaataaatattagaatatattaaatccctaacttcagcctagaaaattcacttaggacaaaaatctaacattccaccaaaatgactattttcccctcctcaatcacttaagcctaaaataaaaacctaagggtaatttggtcatttctaactattcctacccaaccggaaacttagaattctaaactagtctggtataattccaataaaacataacttcaattgtcgtgacattcctgaccaccctgtcgagtttccacggccgccagacccaaaaatattttattacaaaaatggtatctccaatacccacataatctgataaaaactccgtaattaataaattacgctttatttaatcacttactagatttacactaattaactcgcaattagcttaagtaagattataatcttactccaatattcgtataatcacctatttaataaaatatgcccaattaaatattatatattttttgagatattacagttgatttagtggaattgggcttagtagattttgatatcatacttggaatggatttcttgtccaagtattctgctagtattgactgcaagcgaaagatggtgatcttccaacctgagggcgaggaaccatttgtgtttgtgggatcagttcaaggatcttgaattccattgatcttagtattgaaagctagagatttgttacaagatgggtgtctagggtttttggcagtggtattggatactacatgacttgaatcagtttggccagaagacattaaagtggttcaagaatttttatatgtgtttcccgatgaacttttaagtttaccaccgcaacaggaaatagactttgtaattgatttaactgttgggttttatgccctaaataaaactttatttcaatgtaatccgtattattcgatatcaataaagaaacaaaagta

SEQ ID NO: 70995 - DNA, 2794 bp, Cannabis sativa
gtagaacatggtccgataatagtctgatagtggcatgatactactattttcttatgtacaaaaatataaagaaaaaataggtattatcagactcccatcggaccatcatcgggatggataaaaatagggatcgagtatgaacggtgaagttagaagagaagaaaagagagaagggtaatatagatattaatataaagtgtgcctatttttttaatttttgtaaatttgtgttcaaaaaaattaatgtacacaaaatgtatgcatataaatttaaattttcctattattaactagagcatattttttattaagtaagttttctataacacactattaatggagatgctctaatgtcctgggtaatgcacatatcatctaccatcaataaaattattttaagtttacacccactaaaataaaatttgaggaccaccacaacagttaaagaataaatattattatccatttgcgtacgtattatgtaagtattatgcatgtgttagaggaggtgtccttacaaaaaaaaataataataaattataggatgtgtttcagaagaataacaagattttgagatctccatccttgataatatattatctttttcattggaaagctaaaccacataccaattacaaacttagctaatattatatgatctttttcaacgataaattatagaaatggtaatcgatcaagtttcgagattgattggtttgttatttatttgattgattttggtttgctattattttaaattttcagcaaataatttaattgttttttcttttccttttagggaaatgattttattaaaacttcaagagtaaaccgaggactttaagaaggaaaaaaatgtcacatgaactcattaattaatctgtaaaggagcatattataattatatcactcataaaatatgcaataatatatattatatacatctcataatatatgttatatatacatcttataaataaatattatatatcatatatataatatgctcatcataaatattatatatatcatatataaataaataaatactcatcataaatatatatcatatatcatatgcttaacatatatattatatatacatactatatattatatatatcacatatatatattatttgcaaactaatagaattatttcaccccttaactatactcaaataataaaattatttgtaaatttattgtacacaaaattctcattctcaaaataatggaccaaacacatagaattaagtgaaatgaactttatttatttatagcttcacaagcattatttaaatatgtcaatacatatacaatcatctcacaaaacaacataagcactatgccataatcacttcctcatcatctatagtattaatttcatttttcattggatccttacaatgcctacaatttcttgcgtagtgtttaaatttttcatgcacgaaacaatggcctctcacttttttaaattggctattatcttttcttggatcaaaatattttccaccactattattattgttgttccctttgtgatgcttgtttgagactgcatttgccttagaaacctcatctttaggttccttcacatttctcttatctctcaatctcgattcatcttcaatttggatatatttttggatctcttccaatgaataatccttattttgatggagaattcttttcctatatcacttcctagttggtggaaactttgtcacaatcgcaccaacttgaaatgtctcgagaaactcaatcttaagaatctttaacttattcacaataatttgtatctcagagatttgaggaagaaaatctttagcatcactataagaaaattaaaaatatggtgaaattaaaattttcttataccttcttccttcggcttgtatttttcttccaaagcaccccaaatctcctttgtagatttaatattaaggtagagatcatatagcctatcggacaaggcatttagaatatgacctctacataggagattttcctcctctctcctccttctcttctctaccatctcgagagtatctttctcagattgagtgggtagaggctccaaagtagactcgagaatgtatgctatcttgagtgtggtcaagagaaacctcactttgtcttgccacctagtaaagttggatccatcaaacctatcaaaactcactaggtcttgattcatcattttaataatgtcaccttccactgaagctaggtaagaatgataagcttttgattgttaaaaaattattagtgctttaatagaaaggccaatgccaaaatataactcaaagacaagaagtacaagaacaataaaattgataaaataatattacaactcttcacaaaatatacacacaaatatagaaaagaagatgaagagaatattacaaaaacacaatataactagtagtatatatatatagatgtgagaacaatctcaacactattaacatttaacacaaagtgtcaagtaagagaatcacaaaacttgaacaagattatacacatttgtccaaaagcttatttccccctaccacaagcacttagggaagaaataaatttatcaagcttataatttctagcaaggtgctctctttgatagaaactcacaaaaaattgttttcataagtgaaccaaaacctctatttgtagtgtttaagatcacacactttgaaattcaaacacataacttcccatagatgtcttggattcaaatataactcatgcacataccatcataaaatactaacttgcaatcttcctcccgaagagt

SEQ ID NO: 70996 - DNA, 1272 bp, Cannabis sativa
tttttttagaaaactaatccactctgagattcatcttgtagtgcaacatagtttctttttttgttgtgctcataataacaagaaatggaaatgttcaaagaaagaggatttacatctcatcctccaatattagaaggatccaattacccatactggatgactaaaataagagattctggaaagctatggatgaaagtgtgtggatggttgttaccaaaggttggtctccaccttcagtcattgatgaagatggggaaaagattaagaaatcctgttaatggtctacggaggagatggaatgaacaaactttaattttagagctctacatgctctctgttgggattaaactcacttaatctttcaaagacagtatgtcattctattcactcatcataataatctgaagaaagctaatgttagttatgacagtgggctttaataccaacttaaaggggtcccaccaacaactataaataggagtgtctctactcttttaagggaattatgatctctaatctctaaagctcatactttagatttctgattcaagtttagagagagagtccaggatcatggtgagtgtgtgtggaaggatgtaatgggagtatcactcttgaagtgatttctctcattataagatatttctttgtaatagttcattgtgttgagttgtatgcttaaacttatctcattttgtactacaggctattcaatcaataaagatctgtgattcactcattctcaagctaattttatccttgtctaaattaaattaagttctacttttgattttgtgattagtttttagctttgtttgtacattgttgaatattgttctgctataaaaataagttttaagggtgatcattcaccataaatggtatcagagctcagagtttagagttcaggaatcacattcaactaatcgagattcatcttcaacatttatggcatgtttactaataagcaatgagaatcaatagtaaggtagtcattccattatatttgtttatgttatttattaaatttaagaaagggagaacttgattaaataaggaagaaaagaaagagagaacttcccccactaattttctaaggaatgtcattaaggcaatgcattttatttttatattattttttaatattaaatttataatgtcaattttatcctttctttaagtcttacaaaatatctaccatatactatagtttaattcaaaagggtaatttagtcaatttaagcattccgattacgtttcctaataaagtaa

SEQ ID NO: 70997 - DNA, 598 bp, Cannabis sativa
  modified_base (548)..(557): a, c, t, g, unknown or other
ccgctcttccgatcttacatattagtttaagggatatttgtagctaaatctccttaattaaaaagttactataaataattgttaagtgtagtaaataagaggtggtttgctttgtttttgtgacaatttacatacactttatcagtagttttgttgtgaagatatatgtctccgtttagttgggcttctactttatgttttaatagaatggaatcaaattaaaaatgcttgataaaaaaatcattaaattttttattaattttgtattgaaatgatatcttttttattttaaaataaaatagtcattctattaaaatggtgaaaaggttattaatgatgttctaatactttaatggcatgtttatttaaagggaatgggaatgaatggtatgatattgattcccatacaattgtttactaaattttggaaagggggaaactagtgggacccacacaaattagagagaaaacaaagggaaatgttctccccctatttttatagagaatgccttttcttttccttacttaatttattttaattttaattnnnnnnnnnnaaaataaaaaagacaaatataccccttaaaaatctataaac

SEQ ID NO: 70998 - DNA, 1759 bp, Cannabis sativa
  modified_base (1708)..(1734): a, c, t, g, unknown or other
ttgattactttccactatgctgacgacacaataaacaagaacattaatgtgataagggttttgatgaatttataaatcaaataaacatataaatgataaaaagaaccaaatgaaacattaaataagtgatgaaaatatgtctctttattgataattaaaagatagtgattacattgaaatagagttttatttagggtacaaagcccaacaaaatgctcaaggttctgaaaaaacccctattgcaaactcgactgaagctcaaaagaattgtgaggctaatggaaatggcaagaacattgagcaagacgtcatggccagctttgctcaatgtcagaaattgatgaatatgctgtctcagaaaagcttagaacatcacaatagtgagcagacaaatcagccctcagtttcttaattttctggtaaaatctttcctaaaaactcttgttggattatcgacactggtgctactcaccatgtgtgtcataatctttccatttttcaaagtacctacgctaattctaagttttcttgtgtcaattttcctaatggtaacactatcaaagttttttgcttatgaactattgttatataacctaatcttgttcttaaagatttcttgtatgtccctgatttccatcttaatttgttatctgtctcttccatgcttgaaaccaaaacttctgtcttcaccttttaccctgattattatgttacacatcagattgggatggctaggagacttgggaagttgttttaccttgaggagcctgctgtgaaaattagcccccatgtcttttctttaattaatgattccaacatagataatgattctgtttggcattttagattggggcatccctcttgtataaaaactcattctttaaataaagatttacaatttcaaggtcaatcttgttccaattttcattgtcctatttgtcattatgctaaacaaagaaagctaccttttgtttctaatcacaacattgctaaagattattttgatcttatacatatagacatttggggaccttttaatatattgaatgttggggggcataagtactttatcaccattgttgatgaccattctaggtatacttaggttcatttcattaaaaacaaggctgaggcacaaactactatccctaattttattcaactcattagaacttatatggaaaaaccattaaggttgtgaggtctgataatgctgaggaattgcaatttgttgaattgtttaataatcttggcattattcaccaccattcttgcatacataggccccaacaaaattctgtggttgagagaaagtaccaacattttgataagatctaagacagcaaacggttaacaacaccaacaatataccatagcagaagagaaattcaataatatttaagcaacagtagcaggattggaagaaaatactaagaagctttattgagatatcaatggagactaagtctcttacaaggagaaggagctctctccaaacagagagatcactcactaattcttgcataaacccccacaatagcttcaccaattactataaggtcaaacagtaccgaaattaacctctaaccaactctacccgctcaatcacaaatgacccaattacccttgagccatgtgtctaattggcctctttctagtatatgtatatcgtatagtgttgggtttgatgccctaaataaaactcatnnnnnnnnnnnnnnnnnnnnnnnnnnnaaagatcagaaataatattttatgt

SEQ ID NO: 70999 - DNA, 833 bp, Cannabis sativa
ataattgtgattttattaaactaagcttaattaggtttaattagtgtatattttagtataatagctagtcattaactttgtctttagtttgagattaattttttttcctacgcaacacacacagttttctacttattattattttcctaaaccaaaatgattgttgaagctagcattaatgtggtccaccaattccttgggttgaatcaaaaaatataattataattggattctaatattaatgtgtgtggttctcttgttaactcatcaagtctcatataaaaataatggggtccattttcttgcttagctacacccttgtttaaagtttggtgggtcagattaagatcaaattctcttctcttctcaccttaaaacacccattaacttaatttaatctttgtttaaagagaaaataatatattttttttttttttgtagtataattaaaattagttgatggcttacgtaggtacgtaagagattgtggatcttgaaactgttgatgaggctgatgtaataaccatatataaataaagacgtagtgttaatttaacagcaggttatatatagtttttcatctcaaattatactattaataatctccaaagattaatggtgttgttatatattattataactttggtaagattactatttgtactttaattgatttgactatattacacaattaatggtcaggagatatttttcaatgaacttctgaaattggaatgctgtgaatttataattgttttatttaattattatgcgatagcacaaattaataattttaggactcgtttggaatgtaagtcgtattatattatatt

SEQ ID NO: 71000 - DNA, 1909 bp, Cannabis sativa
  modified_base (1717)..(1719): a, c, t, g, unknown or other
accgaatatttagagtctaattgtgtgtcactaaaaatcactcataactctttagtgacccacacttttatgcgtgtcactatatggcatcactaaaagtccaaattgtagtaatgactccttcataatgaataaaatattacaagaaaataaatacctataaaaatcccccttgtttctaggccaatattccacacatatggggaaagttgttatcttcggttgaggatgcatcaatttgaaatagagtgatgggatgtcacctcttgcctagaaatgcattatattggtaatgagtactgaaaacatgtattttagagtgtcaatgctcgcataaaataccacatgggctgtggcagtgtcctccaacaaccctcacttaaccacattacttaattcacgagtaaaatgtaccagcctgccttgtgagcaaattttggacccgataactccaaaattgagccatggctgtgagacacaatttgatcagtcttgaaattatctttcctatgcaagttgaaccagttcatatgagtacaaattgagatagttatgctcattttgctgaaggtagtttatgctgacttgtaccagttgcgagcacagacatggccaaatggtaatgccggtgcatgttctcggaccactcggggtgtgttttgacttttttttttatggtgagtcatattttgggggtctcgaggcccaaaaactttattttgacatttgaaaccctaacaggagaccactgccaccagttggagccagacagtggcagtggtcggccatggcttgtgggaagccatgggttgtttttctcacttgtatttgatacatagatgttgaaaatataattttcccagtaaatctcatttccttttgtagtagccgacgactgccactccattatggaagtgcccatcaaatttgatgggcactgccatttccttatgacagtggtttaatatggaccttataaaaccttaggtgacttttctcattttaatttgagttataatttctaaattccaaagattttattaaactctaggtgtattatatgaattatatgtgaattatgaaatttttacaatttttgctcgacgacaacggaaaatgcgatggatgactagtttgatcacatgggtaggtctggaaccttatttcttagtggaatgtatattggaggaaatagcataccgagtgtaagcggggttatggtttttgacaatttgacccctaagcttaagttagccgaagtttaggctttaagggtattttagtcattcatggaggaggattaggtggcttgtgggttttttgacagctgccttttaattgattaatgatgcattatgttagttaattaagaaagaaatcaaaaattaaggaaaaagccaaaaaaaaaaaattagagaactctctctttctctctttcagctgaagcaaaccagaaggaatcacccttaaaacttgatatttttctagaattaagctaaggattcaagtagcttgtaggcaaggtaaaccctagaacctttgatcttgtgttttttaagctttaaaattggtttgattatgtaattttgaaatttagtggctgttagggttaggatgtttgatagtttgttttctaagtttgttttgagcttaaaggatgatttagtttctggttttgagctgtggcgttgtggatgaacaagtttgagtttgaaannncaagcttggttcatccatggcatggttttgtttggtgtgtttttttaggatctgttggttggattatattatgtataccctgtttaggtactctggaaagtttggtggaaattggacaagttttgagcaaattggaggatttttgggaaagactggtataaaccgattaacctatttaccagtactttaa

SEQ ID NO: 71001 - DNA, 1580 bp, Cannabis sativa
gcaaaaagggaaattgttagactaaagattacagatttcatcgggataaaggaagctctaaattggattcagcgacataattgaccaaatgttttattggaaacagatagtttggtctatgttcaggctatccatagtaagttgcatatgccatctgagttagtttgttggtgaatgattatcatattattttatcttctttgagtcatgttgttattcagtttgttgaacgatctatgaacaaaactgtctattgtttggcgcgtatctcttgtttttccccaggtcgtacttttcaagattatcagttaactcttgaattacgtaatattgtaatggtggattattttggttaatgaatgtttatttttattaaaaaaataatcatttataatttttttttttgaatgaaaataaattttattagacagaaatatccgctaaaataatggattggagagcaaggggaacatcgctcacagtaaaacgacgacctgactaataacaagcaccacgtgccatacagtgcgcgactttgttagcagaccgtttaacatgaccaatagagaaacactacttaaataagataaaatagattgacaatcttgaacaaatagaccaaaaataaaaagcataaatactgaactaagaatagtttgaataactaaaatgcaatccgtctctaaaataatcatttataattcttctcattaataataacaattttttcttaaaaagaaaaaaaaatcatcactagtataaagaaagtgccgacacctcatgtggtatttgttgtagtcttgtagatgcctttttttttttcccttttcaactattaattctttttaagaagaagatttcttttctcagaataataagaaatttagaaacgtggaagtttcgattttaatacacagatagcacatcttatctcaaaatatataaatatatatataaaaataaaaaataaatatacagatagtacaagtttctttccttaataaatgtacagtaaataaagttatagttagaggaaagcaatagatagcttattattactagtaataaataaagataacaataaataaatatgattaattttaagatgcatttataacaaaatttaggggatagattttaattttatttttaaaataatttattgtatcaaaacttaagtttaataatttcttaaaactctattttattttatacttaggtaaaataaattattttgaactcaattttttttgtaaattatattatttataattttttacaaatttgcagtatataatataactataaatataccctattatattaaaattaaactatgaaaatatctaaatttaaatgactatttttttgtaaaattttactcctgaacattttttgatgcgaaaattcctctcaaactatatgaatcgtagcaaatatctctttttaattatattttagtcattttttaaaattatttgctgattttgttagaatactgtaaactctgaatatagtcctaattaattcacgagaatcaaacaatagaatatagattagcggaagcgtaccggagtcca

SEQ ID NO: 71002 - DNA, 1720 bp, Cannabis sativa
ttaacatgtggcagggaaattgctgccagatgcttcttctgatccatccagtctggtggtggttgcgattgccaatgcctttggcttaggggctgctgtgttcatggccgccaatatatctggcggccatgtgaatccagcagtcacttttggaaaggcggttggaggtcacattagtgttccaaccgctcttttttattggatttctcaaatgttggcctctgtttttgcttgtgttgttttgaaagtcactattattggacaggtatatttttcttggtaatgtgactgttgttgaatttaagtatttaattgtcataagataaaatgttactggcttatgcagcatattccaacatactcaattgctgaagaaatgactgggtttggagcctcaattatggaaggtgtaggtacatttacactggtctacactatctatgctgcgggggatcctagacgaggcccattaggtgcagttgggcctatggtgattgggctatgtgcaggagccaatgtgttggcactaggcccattttcaggaggttcaatgaacccagcctctgcatttgggtcaagcgttgttgctgggactttcaagaaccaagcagcctactggattgggcccatattgggagccacgattgctgggcttttgtacgacaatgttgtgaataccaatcaacctacagcaacagcaggaggatcaattggagttgaggtctaaggcaagacttcaattaatgtaatagttatatgttgttatgataatcaattatttgtatggtagttaagatctatggggacattatctatggcagttattgtaattttatgtattaatatctgatgaaaaaaattaactcttactaattaatataatatgaaattattttacttttttaaattgtttatcatgctctcttatatttgacagttaactttaaagtcaatataatagtacaaaacagttacttatttgtatctcaaatgtataaccaacttgactaagcaaaaactgttcaaccaactttaacttgagtccgcaaaatatgaataaccaacttatagataatatatacttaccaaaaatttgatattctatcttatgttgagcttgtaaattgtgttttcaaccttttttgagaaagatgtttgatgaataacataagatattctagtttcaaaataataataataattttttattttacaaaacatttatgattaaagttttagggcaaataaacaaagatccaccaaaaattcttgtagtgaaataaagtaaaagatatgagaacgatgatatgttttttgcattatttttttgttgttgtgtgttactaaatacatgttcatgattgaagcaaaatgccaagcaatttaaactaaaaatataattttgtcaattattttaactcagaacaacatgaaaacgaagaagaatgtgtgacattttatttgtatatagaaatatacttttttgtggagaaagaaactttcatttaaaagggaaatttcactttttgcccctaataaaatccccaatattaaaatttagaccctccactaatttgtacaaactaatttccttgattacataaactccccatttttccatttttttaaaaaaaaaaaattgttaaaactaaaaaacttctctctctctcttttccctctctcttcctctctctctcttccctctcgtgcacctctctct

SEQ ID NO: 71003 - DNA, 1570 bp, Cannabis sativa
  modified_base (544)..(544): a, c, t, g, unknown or other
aaaagtgaaaaatttacaaattatcttttacatttttcttcagtaaaaaaagatatcaatttctttggcttcgattgtaaacaaaggttgaaaaatttgcgactgatatccaccgaagcaaaacaatttaatttgtgtaataaccccatcatccaccgcccaaccctccctctaagtgtaaaaataggcggtacttttttcacaaattcctgcttagtgtaaatactttactctaactctctatttcccccctttcttttctctaactctccattttgttcagaagattgtactgaaaatggaaaaagtagaaacctaaaaccagtgagaccaaaagccaacaaccatgcatgaatcaacttccacctcgacctcatccccggtgagatgattttgacttcctctctctctgtgttatactttgatcttatccccgatgagattctaacttcctccctctctctcagttcgacttcaaccttgtcatcgtcggtgccaaccaatgaccaaccacggtttatttttcctctctctctctctctcnatatatatatatatctctctcttaattcgtttcccctctcttttctgttctcattttggttattcccttgctcatagacgagtcaacgacgacagctcctccctcaatcacaggcggcaaggctataactcctcccttatgcagacaataaaagcaacgagtatggattttcatctatttggtgttttgtttctttttattattatttcaatgttgtgtttttgactatgttgagagtaaggatgaattttttgagtgattttggaaaatttatcctgggtttttgtttagagatttttgtattgattcttaaagtagaattgataggttgaattgtatcgattttgaatatgggtgtggttaggtcattgaatgatttatatgtttgggttattttgagtagttgtatttttcttgtctaagagtaaattggtaaattgtattagaggaaatggtgaagaacaacagagaatagagaaagtttgtatatttctcatacttcaactcatactagtgtgttgaatagggtgatgagggtcgttgatgtatgagaaaatataatcgaagtacaagtgcacagtgctctaatggttcttatttatggttagatttatgatgacattcatcataaaatgtcatagagaggagacagttgttcattggcttctcatttcaattttgagattgattatagactaaccatttcaattttgttagtttgagataggagttgtgttgtttgagctcctagataattttaaaggttttacattttggtttatgtatattaggttagcatttgagatttctaagcttgaaatgattggattttcttgtttacttgttctacaagggttcagatagggggccatgcgagatttttcggacaatccctgtcctaatgcacgtgcagaccgagagatcactcgtgtccgcgcgcgcacgtgggcatccctttcctgatttttttcgattttcaaaaaattataactaattcaaataaaatcgaaattaaattctgtaaaa

SEQ ID NO: 71004 - DNA, 784 bp, Cannabis sativa
gagatattcttctgtttggcaatacggaggaactcaaagttggctcagatgttaaagatgtatttttggaatatcgagttcaaaggcttgcggagtgtttaggtccggatggttggaaccattgctttccttccatgataagcttacttgaacgttgggtttctcagtaccgtgttttcctggaatctgaattgataagagaacaacaagaacagagctgtggaactaatattaaagaagaaatcatagaaaagttcaaaccatttcttgattacatgagagaaaggtttgcttccactgtcaagcagttgagaaaatgcatttggatcttttgtacgcatttacctcaaagtttcattttggatcaaaattttctaaacatgacaacccttactgtgttacttgatagttttgaagcacttctgtttgaagagatctgttcttgtcacgaagtaattgatggctctacagatttgtttgtcaataactcttccttgctgtcggccggaagtgattgcctttctatattgagaacccttcttggttctctggaaaaacttacatttccaaattttagatctaaggaagcaataacacagttctgttttcaaagagcttcattgatattttctactgcatcgagttcttttcagctgcacctaatgaaaatcgagccattagctgttttggtcattgatgaagctgcacaactgaaagagtgtgagtcaatcatacctcttcaacttccagggataaagcatgcagttctttttggtgacgaatg

SEQ ID NO: 71005 - DNA, 821 bp, Cannabis sativa
actaattgaattggatcaaataaaaaaataatattaaattagatcgaatgaccaacattactcaaaaatattaatggtgccaattaataaatatatacaattctccatatccgtaatcctaattaatattatgcattactaaataaataaataacaatttttataataatgctttatgtatatataatatatttttaaagacatttgtgagtagctagctagtgtatacaacatcatagagctacccattttattaatattatcattatagcatgtttataatgcaaattcatattactttttcttcatcaccttcaattatttttttttcttaccaataatacttcaaagttacacgattaaaacctttttaagtcaattgtgctatattagctaatataaatataggtaggattctttgcaatggtcccctatttttttttttattaattatttatttatttgttttatatatgataaataaataattaattatgataacaattgtgctgtttaaagtttcctttaattacttactatatatgatttgatatatccaaactttatattaaaatatacatcgacaaagagattaaaaatgagttaaaaacttacatgtcatgagtttttatgttaataatataatataatatagcattaaagaaacttcaagtagctatatatacgtgagtatatataatttccccaataacatggcaattattttattgtggcaaatatatatatatatactaggtgattgttacgtgtcaagccatgtagtgttagttttatttaatattttagttttttattttaat

SEQ ID NO: 71006 - DNA, 549 bp, Cannabis sativa
tatctatatatgagaagctccttgcctcatgaatgatcccatcaaacatgctaatattccaccttgatctatttcatttcctatacatttttgtgtatgtgattttttattattcataactgttttaaggcaaaatataatgagctttttgtgtattctctctattttcggaaataaatactccagctcttccgaggtgacacaatcttgattaaggttggtttattcctctcttattttctgtcgatgtttttgaattttgttttagctagaattactgttatgccccctgaatttttaagctcgttaaaaatgctctataaattattgagattgttatatttaaggatttttgtttaattttagtaaaaaaaaaaatctaacatggatgaaagtttaggaggcatgatttagtacatatcaaaattcaaggggcatgatttggcagataccaaagtctggagagcatggttttatacataaacttaataatccaacatacataataatttttagtttaattaaacctaattctcatgatctcataat

SEQ ID NO: 71007 - DNA, 1705 bp, Cannabis sativa
tcttcttggcgagtgataacgaagcaggaagttccttagctgccaaggaaacaaccgaaaccagttgttgttgagaacttgacagacaaatagtacactgatgagatggcccaaaggtcgtagaggggtggccttccaagcattacattgtatggagactttacatccaccactatgaacgtggccatgagggtagcagttttatcttatcacatggagtaatgccatctccattgaaactatacataatttgttagtatggttctaggtcttctaaggtcaaacctattctaattagggtttgcttgaacatgatttttgaggatggtctgtcgtcgatcactaccctggccaccatcatattacctatatgtacctcaataattaaagaatcgttttgagggtagctgacatgataagagtccgattctccgaaggtgataggttcacatccgtagcgttaagactttgaaggttgttctgcaacttccaagactttggttcttggttcatgtcgaagtgatcttgcatatctttttaaggctttccttgagtttctagctaggtcagggtctccaatcacaatctctagcctgtctggaactggcacaggctagacaggtgcatcgcccccagctggagctttaggtcgtacatactcctgtagagcattatatttttgtttgatgagacattatatctcgtcctgcaactaattacactcattagtgtcatgaccataattattgtggtagcgatagaatttgtccatgtctctcttccctgactctttgaagggaagaggtttgtgatacgacaatgatgactgtgtagccgtatagatctcctctcttgggccaagaggatggagtaagtggtaaagtgagctcacactctcgtaagggcttacccccagtcttgggcttctttccactgggggagttgcttggcttaccactattggtggttctcttccctccatttgatactcctttcttcccattgccctatgcctaagtatcaaggacctaggagtctagtgacttcttcttgccaccctttgagcccttagctcgagtgacggtttcttctagtttgataaagtcattttctctatctaagaagtcattcatggtgtatactgccttgagacaaaggtcagaccatagaagactcatctccttgagtttgactacaagtgccattacccttgcgtcctcactaagacttttggtcttagcaaatgcctctaagaattgttggatgtagtccttgaggggatcttcttcttgctgcttgacatccaccaaatcattgggttcaatatggcattatagggaaggagcgaattgtttgccaaaggcatccactagatctttccattagttgattgatccaatggagagcttaaggtacaaatgttgagccaagcctgttagtgtggcagggaagattctgcacttgacatcatctctcacaccttgtagatcggtctgcactttgaagtagtggatgtgagataacaggtctttttgcccattgtattgattctagaaaggtttcttaaactttggagggataggaagagctttgattcgttcagagagcggtgagcatcgctctctatcaagtttgaattcagacaacttaggagtcgtgatgcctttcactaaagctaccaaggtgtcgaactctgcctggttga

SEQ ID NO: 71008 - DNA, 1609 bp, Cannabis sativa
actcacatttgtagaccaaacaaccgtttttaactcatcgaagagaactaaattaccatctgagattcttagctccgacgcaaatgtaactggtttttctctgtttgccacccaaactgcctttcgagaacgatccttggagtaccatattccgaggtaataatttggagatgaacctggtcgaaagaatcccaactcgaatacccttttcgcagagacaatggtagattcaccagagagtgagtggtctgaagagattgtatcagctccaaatgagaactgggtgtttagaaataagcacaagaagaagagaaaacgcttcaatcttcggttggtttctgcaaccatggtagattgatcaaaggaaaaaaaaaacagaactctgggctcaaagatgcttgaactctgcgctttgtattatttatttatgtattttatttaaggtacaaaagaggtgacgataaggaatgacaagtccacattgtccaccggttagatgaaagactatggtcgcgaaagaaatagtaaataagtatgacggcctgacacacaaatcacactcagaattaacaattagagatcccttcgttggcccactcaacaaaaaacgaaagaaaatgtaaagaaagtaatccttgtgttgggagttagtaaagtcactacttgttaggtggagtcatcatcacgtgggtttccattaaccttaaataaaactaaccgggaaggaataataaggcgtgtcaaaattgcttgcctggctcatccatgacaaataacattgccacgtggtggcttagggcatagttaaaaagaaaaaaattatatagatggtcaaaattaaattaaaatttaaataatttgtaaaaataaaaccaaacaattttttatagtttctgaaaaattacaatgagcagggtataaaagaaaaatcgtagttcgtttttgaagggttgcacacgagagaagtctccaataatattagcctcatctaaaaaagcactggatgttggtaacttgttccctcattgttgggtccaaatatattatgagctcactgctcacatcatctttaaagtctacagtgctgcattgcaacaccattatgaggatggatttttggatgaattaaatgcacttttacttttacgcgctaaaatacaaaataatctattctattttttgtattgaacccaatggtaaaaacacaatttggtagtttctgaaaaaaaaaaacaaaaactgaaaatagaaagagtgtctggtatccggcacgcagcttattaatttcaatgtgaagtccctatagttgcattaattatggggtggacaacaaaaatatatttgataataatattcaaatgaatgtagcaaattatttacgtgtattagatgattttttattttttaaaatggtacgtgtattagatttggacactaatttcatttcaaattatttggtatgaatatgatcagtttctggcattaaaagcaccaatggcccagtatttagtcctaaaattactgggttacattaaaaactttgtaagaatagaattacatgcatgttccttaccagattcccacttaaattaaaattataattaaattt

SEQ ID NO: 71009 - DNA, 779 bp, Cannabis sativa
tgccgtcgacgaggatggagaaaagaattgacggaatagaggcggatgtgggaagtctgaagctcgatatgaccagtttgaagacagacatgagcagcatcaaatccatcctgggagagatcaagaacagtcaattgggaaagtataggactatgactggtttggctgagcaggttcggatgtgtttgaatggtcaagctaaaatctcggatgaaatgctagctctccgtgagacccagggtccaacacagagttcagggcggagatccatcaatgagcggccctcttctccgacatcggtagcctcaaatagtcgagagggagattgggttcgccgatcggagttcacggcgaggaaaattgagctgcccgtatactctggtgatgatccagatgaatggacattcagagccgatcgttacttcggactacaatgattaacaccagcggagcaactcgaagtggctgtgctgtgtttggaaggggcagcccttcgatggtttcgttgggaaaactctcgacagccagttaactcgtgggaagaactaaaagaaatggtgattcgtaggttccggccggcgcatgaaggaacggtgtatgatcgttttttccaactacagcagcaggtgacttcggtgcaagagtatagacgccgatttgaagctttagcagcatccatggggcagatgtccgaaccggcggtgcaagctacctttgttaatggattgaagatggaggtgtacaaatgggaagcaggcaggcggttaaaggggctgggg

SEQ ID NO: 71010 - DNA, 997 bp, Cannabis sativa
tgcatgcatgcaatatgccaatataggtttaacaactagtgaagagggagtaaattaataattaatttgatcgatttcttacttaatacgatttttatttcttattaaattatttatccctaaccagcaagaaagttgaacatggtgtcaactcaattcccttcatattacaatcggttcaatagacaataggtatatttgtgtattttaatcctaatgaacaataaacaaattctgaacctcgagcaaataataacaactactttacatgaaaaggtgtattcaattttttttttaattagttttataattatgcattagaatgctaaaattaaattgatgaaaatataagtcaaagcaaatatcacaaaattattttttatgtcaaatatagcataatttttacatctctcaaaccatctctaatacaagatttaaaatttgtactaaatttgaccaaaaaaaaagtttgtgctatagttagccaattatttacgattatattccaatacacgagatatacaataagtaaaaacaaaatattaattattattaataatcatttaatattttattgaaaataaacaaaattatttttttttattttttattgtttaaataacggtaacttagtaaataaagtacgtaaatttttgtaaacgtcaagaaatcataaaattagtggcacaatttttcgtatgttgcaaatttggcatgcttctagaacgccattagagtaatattatttttaagtatgttaaaatataacactctattagagatatgctctcatatctccaatatgaatgatgtaaaaatttatactaaatttaactcgtcaacgttgtatttagcctaaatttaactattaaattttaacgtgtaaattaattaacttaaaattaaagtcaacagagcttttttattgaaagtatacatatcatattaaatatattaattaaataaaacctagaaaattattaattatatatattaa

SEQ ID NO: 71011 - DNA, 1242 bp, Cannabis sativa
actgtgaagggtctctgtgtaacaaagattcctttgtagtttcgagcaatctcaaggctgaggaagaaatggagactacctaagtctttgagcttgaattgagcatcaagtgtggaaataaaagtttttaaggcattcatattgtttgttgcaacgattatgtcatctacatagatgagaagtgcaaggaaaattcctgaatgattttaaaggaatggtcattttgagattgtttgaagccttggttgatgagggtagtgctaagtttagcatacattagcatgatgcttgtttaagaccatacaaactcttttgtaatttacaaacgatatttttgggaatcactcctttgggagtgtatccttgagggagtttcatatacacttcctcatgtaaatcaccatgaaggaaggcattattaatgtccatgtggtgaagatgccagtttttgatagctgcaagagcaaagagaaattttaatgtgttaaattttgctacaggagcatatgtatcaaagaaatcgattccttgttgctggttgtagcctttggctactaaccgagccttgaatctctctattgtaccatctgggttatatttgatacgatatacccatttatttcctattacatgttgaccaggtggtagggaaaccacaatccaagtgtggtttttctctaatgcatcgatttccacatctattgcattgttccatattttatattttgaagcttctgcataggaagttggttctgtgcattgagatgtggcaagtaatgcagcagtaaaaaatttcgagaattttgtatatgagagatagttagcaagagggtaagaagtggaatggcaagaataatcttgtaggtgttttggttgcttgacttttctccctgtttttatttttactgtaggtttggattgtggttgaggggaagtggtgggattatttatttctgcagtgttgtggggttctgtatggggagtaattggttctacagtatgagtattgtccgtagtaggaatggtagtggtgtcaacagggtgatgtgagtgattgttgaaaaaatgactaatgttgtgatggttttgattgttttgtagagggaatatattctcatagaaattaacatctcgtgagtgaaatatttgtttgctttgaagatcaagcaaagtgtatgctttcatttgttcggggtaacctatgaaaatgcttgctcttgcacgaggggcaagtttgtggga

SEQ ID NO: 71012 - DNA, 988 bp, Cannabis sativa
ttcgcgtggttcttttgataaagtaaaacaaatattaactgagttcttaaagatatatgctgataaaggtatgacaaggttttggggaatgaaagcttgttgtcgtttcttttggtagcaaatgtctggttttccaaaagttaaaatcatgggctgtaaactaagaaaattatgagattatttcataaatattcaaaaactaccaaaagtttatttatttatttattttttatttttattgatttttttttttaacagatccttgtttacacatagagaaaatatagtataatattgtggtaacataaaaataacattatttttcttctaaaataattataaattcgtaaaatgaaacaaaaaaaaaaaatataataaaaagtgtaattttaagtaatttgtgtaaattttcttaaaaaaatttaaaaatttcttcttaagaaattgatgtggcagaggtgtggtaactttgtagcaatggctgattttttgtcctgttttgggatatactaatctcatggtatgtgtttgtttggtacaagctactttgagttttaatgaatttggtggtgctattactaaggatattagaaatgtttggtcttctcttcctctagtattttcctttctcattgtaagcagtcattctcttgctcatattgctctttctttagacactactaaagtttggtgctctgaatgtcccctgcttattagttttgaattttgtatttgatcatttgttcttttagttttgtattgaaaataatttttagtttttaaaaaataataattaacattatattttgtttacagcttggcattttcagagattaaatttgttagacagttgacacttccaaaaaaattaaaatatttttcttttcttttggtcggtacaaaaataaaattagtttcgtttaagaataaaagaattccaaaaacaattggcaaatatcggttctgcggatggatcggaaaaataaac

SEQ ID NO: 71013 - DNA, 722 bp, Cannabis sativa
actattagtactcaataaccatactattaagcatattactatattgtctattaaataaaagttcaatatagttcaaatgaaattaattaggcaagtaatgacacttactcaatatttgatatttgtcacatttaattattgttattgttgatggctttaaacttaagtaaattatatccaacaatatattatatatatataatacttctaatatattattgatattgcccccatttaatttttctaacaattgacgtgattcattaattttctttattttgtaacttactacacccaatatttcttttataattttatttttattttagttgaaactagaacgtgtgtaattaattatttaaattttatttttaacacttttaattttttgagagcttgtgagatacatcttatattaataatatacattattatataaaaaaaattaatttataatttctcaatataccgaaaacaaaaacatcctaaccaataaaaataaaagtgacatccataaaattttcttctcataatatatataatgggagagacaataatggttggacaataagaattgggttagccactaattttcattaatggaccctttttttctctcaacccattttccatggacaaatgtgaaatactagtccatgcatgaagtaataaaatgatatatttttttaataatatttataatataattaattctaggtttt

SEQ ID NO: 71014 - DNA, 978 bp, Cannabis sativa
ttaaagattgcttaaaggtgaagtaagagtattatggtaattttgtcacttacgccttatttggttaataattaatttagtggattttattgtaaaaaaaattatgctcattttattaatgaattaagagataaataataagataaacacaaaatcatagtcacactatctctcctcaacctctaatctcacggccttaagaaacctcaagaaccaagatttattcagaccaaaatcctctatcttttagccaagcaattcagttaagaacctaggtgaattgatagctaactcaaagtaagctcttgccctctttattctctttgaattttgcagtaaagcatggttttttatatggaaattgtcggttaggttctgtagtattttgttgggttcataattgttttgctggttgttttaagttgagaattatgttgagtttggataattgtgacaattgtagtcattgaaactaagtttgagctttaaaaactcaaagcctagtctccaatggtgattcttgattttgagctttatggttttgagctgcaagatttatttagaatgtataaatttattgttttagaaagtttgagcaattttagggtagaattaaggaagaaaaattgagttttgtgattttgcatagaaacactgtttctggataaacagttacccgtttggaaatccggttactcgtttggggtatttttgtttgggtttatgctctaaaagcaagtatttattggaaaatatatttgagaatatatgaaaaaaaatataagataaataaatatgttaattatagaaatataatttatcaatatctaaaaaatttatattcatataggtattgatcttataaggtagtacaagagaactaagatcatataatatgaataaaataagtcagtagtgtattaaaataaggaatctttaatatgaaattaccaagtacggtttactaagcactatact

SEQ ID NO: 71015 - DNA, 1316 bp, Cannabis sativa
cagtatatcctcgccctcaaccggaggaggtttcattctctggttattcgggttattagggttgttatgctggttaggctagttaggcttgtttccttgatgtcttagatattgtctgaaatattctagcaagatcagactttctatctcgtctttcagttgtcgacattcttcagttgtatgccctatgtctttgtggaaccgacagtattttattgaatctcacttatgtctcgcatgcctcatgggttcacgtttgcgaaatgcaaccctgttttcattagcgaggaatatgttcttgcgagtttaatttaactcggtgtatagtgaatgaatcgaaacatatttgtcgtgctttttctgtttctttttatccttggacgaatcttccgactcatcttttctttttgtttttgagccactaggattgtccactttagtcgagattatacttgttggttccttactcatgctgtgtttacctcccaagccagttttcaacagcttcatttcatttcttgcttcctctttatgcacaaatacttgtgctctttcattgaattcatcaatgttcctcactgggtaaccctgtagatcatcccataattcacctccagccgtggataggtcagttgtgatccccgcttgaagtgcactgagttgaatactatcatttaggtttctaaactttgaagcggcagtgctaaaagcgacttaaataagccttgagtgactcgcctggtttctactttatgctggttaaggacaatgcttcaggtcgtcggtctctagcagcttgaaattgctttttgaagtccctggatagttgttcccaggaggttatagaataatgggtaaatttatcgaaccaactgcccgcagctccagttaaggaggttaggaataaaatacaatgcaaattatttgagacattgctggctcacatgatagtgttaaagttgtttaagtgagcgattgggtccgtggtctcatcgtactacggaatatgtgggtttttgaatccttgaggaaactcataatttaatatatctggatgaaatggctcagcctcttcatctaagtcgtagccaagtaatttttcatgttctccatcctgatactttttgaacttatcctctagtttaattattcgcagttggatagggtctacgtgttcttgacttgcattttgattgagttgatggtgatcaggtgcattttggtttagttgctcgcaaagatcaggttgtcttcgattcaggtgtttgcaaagatcaggctaccttcgctcataattactcacagatcttgtctct

SEQ ID NO: 71016 - DNA, 1839 bp, Cannabis sativa
aaagttgtcactaaaagtagtagtgagagcataactaaaaatttatgcccaaactatttaaaccaatataaattatacaagcttttctttcttctaaaatgagaaagccaagaataaatcttcctcgtaattctattcattatacacttggctattgtataaagaattatttctaacctcccaaatattatagaccattgcatttaaaacatcaatataaacttctcttgtatttggtccttctaaatttttgcatctatttcaggcactactccaagtcattttgttgagcatatcccaaataaaagaaaacaatttctttctctctttgtcccttggccaaagcttggaacacataagcgaaacgctaaagttcatagatgtgaacttaatcaaagtcattttgcttcgaatcaagtctttggtcataacacaattttctttcaataccagctagagtttcgtggaattttatacttccaccaatcatgatctttgagatagattgagtgaatctaccgcaccaaaagattgtcttttttggtagcaatatctcacacatacttacagcccctacattccagtgctctatatctttaaatctaaggccaccatcacttttggattgacaaataaacttccaagcaatctaacctggactagaggaattgaagtcacctttccataagaaggcattgcaaatactattaattatcccaagaatatacttaggtagaatcatgagttgaccccaatatatgtatgaatggccaacagaacaaagttaatcaaaatgtatctattaatataagagacatgccttaagctccacattttttatcctagctactattttctcaataataagtcacaattagccttagatattttggaagcacggactgaaatacacaagtatctaaaaggaagagtactttgagaaaaccaaaactatcaataataaattgaacatcattatgagacatacccgaacaaaaaaaaaaattgattatttgcttgcattagattgctagccctgaggtatcaaaaaattatttaaaggcctgttaacgtagattttcgttaactaaaaataataagctttttcgtaataaatatcatacataaataattacaaacaatgcataaataactcgggatatttttacgtagttttacagttaaatttgcatactccacgttagctattttattaaagatttttctgaattccagatacaatatatgatggatcgtatctctttttctctcccaaatttttcgtccctttttctgtgggatctgcccctatttataggaagatagattggcagttaactgcttgttattcttatcctttcgatggttaatgctgatttagacaatagcatctcgcttgacttatcgatggtcaatgttgattttgacatttgtatcttatgtattttcaagttgttatccttgtctgttataatgtcaatcaaatgctaagtgttagcagatgattcgttttaccaagttcctttaaaatagcaaggtggatgtcacgctatatgtaacccgcggttgctttgggtaatcaccttttttccttcgaataaacaaattatttctttgggcctgtgtgccccaagacaagtatatgtctcgtcgatataggttttaatagttttctatccttgtctcgcttaagactacatagtcagcgagttatatatattttctattaatcctttatttaacgagttattctttttcttcgcattaaataatataacttcattataccaagtggttcatattccactatatgtgtaacgtccccgcttcaagcctcca

SEQ ID NO: 71017 - DNA, 1427 bp, Cannabis sativa
accctgggttaatcgtggtgtctagggttttcaatggcgccaattaccagggaagcgaggcattacaatggccctcactgcaaaaaataaatctgcgttcatcgacggctccctgcctcgaccaactacaggtaaccctctccttcattcttgcattcgttgcaataatatggtcatgtcttgacttatgaatttcgtttcttctgagattggacaaagcatcatgtattttgatcctgccaccgacatgtggcatgatctttaagaaagattcaatgggggtaatgaaccccgaatctttcagctacaaactcaattaactcgattacaacaaggtgatcagtctgtcacctcatactttaccaaactcaagtccatttgggacgaattgaaagagtttcaacccaatactacttgcacttgtcgtaccatgaaaatctttcttgaatactataatcaaaaccaagtgttacaatttctcactggtttgaatgagtcatttgcctcggttcgtacccaaattctcctcaatgaacccatccctaatctctcaagagtgtttgccatgattgttcaaaaagagaggcaacgaacccttggcttatccgactcttcatctctggctgctactattcaaccttcctcttccaacaaccctccaggatcgaagaagccaagaccctcatgcactaattgtggcaagcctggccactatgtggataagtgctattttatccacggatttcctcctcggtatggcgacaaaaagaagtctgaaaaaaaaaaaaaagatactgccaatcaagtcagcaccagcttaacatagctcttaactcagcttaaacaaaaaacactgtacctgaaccttcctggtcctgttatttatgttaagagctaagttagttataactaactcaactcatatgtcctctatatatatatactttatcttctttgtaattgttacagaaaatcaataataaaaagtctctaaaagctgttaaagcttcttctctctatactttattttttcctcataacatacttgtatgtagaaagaatgactacatttattcatctcgctccttatacgttgaagtaaccacctcgttaataccttccaatgtgataaaagagaaccgtgagaaacattacatctttgtacttagcatttttttctacaaaggtgataaagaaagataatgcacacatggcgagaatcattcagtatagtcagcataaccgtctaaagataatgacaaaagagcaattaaatggttatttaacatcatcccatatgtataataataaatcgtggaaaatgtccacgtttcatgaacgattatgaattaatagatctcaaggaaataactgtcaccctatatatttataaataaagataggatctagagtaaaattaaagggac

SEQ ID NO: 71018 - DNA, 1792 bp, Cannabis sativa
agttgctatttcattcaaaaaaaataaataaataaataaataaatttattagtaataattaatataatacattattttatttaaatatagtgttatttattaatttatttcattatataacctaccaaacaaatcctaaactgataagaaagcataaatgtcgaatagacgaactaataccattttaaaaatagataagtatagaggtataagaaaaataatgaaatttaattttgtttatgaagcatttaattttaaattattagcattttccgaaacaaaaagatttcctttttcttttaaagtcctacaccaaattaatctttttgttttagtttttggaaaaagaaaaaaaagctaaaacaaataataattttatttatctaaaaaaaaaattatcattaaaaataagttttttttttatttttacactttaaaataattttttattgttttttatttttacggaattctacgtagaaatccttggttaattgtatataagtaatttctcaaaaaaataggggctttttatcaattatctttttccaaaaaaaaatctaattatcttctttttcaaatggccggaaattttgtttaaaagactcttcatattttaaaaaatatattctaaaataaataataatcaaaatcctacacccttaaatttcgatgataaaatttgaaaaaaacaaaagagtgagaaggaaaaaataaaaaatatcctataaataattatagagtcctacatcaaatcaatctttttgttttagtttttgaaaaaaagaatatacaaataaataatatactaattacataactatctttttattttacaaaaaaaaaatcttattattaaaatatttttttttaaaactaattatcttatattttaaataacagaaaaaactgtttcaaaagacttttttatctattgaaataaattatttaaatttttactcccttaaatttcgataataaaatttgataaaagaaaaagaaaggaaaaaaaaatactatatatatcacttaaaattttatttaaacgtacaacacagagaagagaagagagtgttgagaggtgtaaaggacaaaactacccattccttctatattctctgaagacataagcaaacgaacgaaatagtaatttcacttcgccctttaaatctgttaaacagagtcagttggcgctttttttttttatttcagctctgttttcatagcgtcctcccatggcggtctcttcgaatactccttcgaccatcaacctcacattcagccatgaccagagcttcatcgcggcgtgtacggaaacaggagtgcaattattcagctgcgatcctttcagggccatagatttacgcgaagaagggggaatcagcaccgttgaatttctcttcggttccaacatttgggccctcgtcggcggggggacctccccggagttcgatcggaaaaaggtcaggttctgggaaaacgctaaaaactgctttataggcgagatatcctgccgctctgtaatcctgtccgtacgaatgcgaagggatttcatcttcgtcgtgttggagaatagaactctggtttacaattactccaatttgaaaatttattgccagattgagactgcggcgaatcctaaggggctttgcgccgcttcggtaggggatagtcctgctgtgatggtttgtcttggggtgctgattggggagattagagttgagcattattctataaggaagattaagttcatcgctgctcactcttctgaaattgcttgcttagggatcac

SEQ ID NO: 71019 - DNA, 1188 bp, Cannabis sativa
  modified_base (1134)..(1149): a, c, t, g, unknown or other
atgagaggggtatttttgggttttcgataaaagtgtcatatttttcttagtttgaaatgtattggtttaaaaataaaatattaaagttttttaagtatagaaaattaaatttcccttaccaaactactaacaatgaatttattggtctaatttcaaaaaatttaatctaaattaattagaatttaaaattacagattatgaattatatgaacaagtgccgaactagctcttggagcctttaataaattatgttcgtcaagtgaaataaaaataaagtaaatcatgtttttcactttttcttatacaatatagttgtctcaaacttgcccttagaggcttgaataaattatgttaccttttttccttcttataatttaaataatcaagtttggcaaactttaagctccttctacaataaaattaataataccaattattatgttattgagttctttaattgatcgagtcaaataaagttgacttttataaatatatacatatatgtatatagtattattatatcttgattccacaatttaaaatttagaaaagaaccaagggcggtccaataatagttttggttacgtggtaataatgtagacatcgtaaaaaagaagtttatcaaaataactagtgataatgatcaaataagtatttcttgcaaatatagcaaagaattttgccttaaaactctaacaactactcctataattttgtctgatcttagtaagttgccataatattattaatttatgcacataaatacttatctaactaatttctaattaaacttgttacaatgacatcgacacaaacaaatacactacaataaaatacacaattcactttagtcaacatgtcagttaactccgtttattgtccaacactattaaccgtcgtgaatatgcatgtgaaatgagtttcaatatttaagcattcatctataatgaaataaattctataaattaaatatataaaatgtggtggaaaggataataaacttttgtattcgtaaatgttataggaaaattttataatgcaccctcttaaaagggatagaccgatacatctctatctgttttagtatctgaaataattcaaattttttgaaatggtcatgtaaattatagttannnnnnnnnnnnnnnnaaattttaagaaattcagaaaagtttaacacgccgaaaa

SEQ ID NO: 71020 - DNA, 1022 bp, Cannabis sativa
ctgcacctgattgtgtacacctcaagtttgacgggtgtccttgtggtccaagattgtgggagataatgattaggcattctgccagattattccctctgggaaatctttattgggatttgtattctccacctgtattggagtcgttacactatattgtatctttgtgacaattactctgcattataaatatcagactctcaagctcaagttcagtgagctgaatattcattttgtcaaattcttctctaattttactctcgattaatcaaccaagaaaattccaaaaaatactaacaaaccacaccacagattcaacatcaaaacaacaaataacagtaataataggaaaaaacattacttatccatttattttctttgaaaaatcaaatagtgttctttcgggtccttcaaattttatacgatgccaccgattttgatggctttaaccgaagcaatgtctttattacaagattttagtgttaaaattgtgtacatttgatgtctaaaaaacatgttttgggtgtgggaatgaggaagaaaaaaaagaaagaaaatagaaaatggtttttcttatatgggaggggcattttagacaatgtaaaaaaggttacattgcttgtttatactttcaatttggcctttgtatacaaaatcaaatttcctacgtgcaacatttgatcacattatccatgagttgatattatgtgagtttgtgaaattttttattttatattggaagagagaagacttgaattgggatctcctctgtgagttgttagtgaatttttatttgaaagcatctttttctttccttgtgaatgttgaattctgagtatttttatgagtgttgtaagaaaagcaaaccagagtaaataaccagtgattgttttattgaatgaattgaattgattacactaggaatacttagctttatatacacatctaagatgaagaaagaattagttacaacaagagggagctagttataaccgtagtcaaactaacataatagaaaagtacat

SEQ ID NO: 71021 - DNA, 1696 bp, Cannabis sativa
gtttaagattcatttcactaatatggtatcagacgtttcctctaattctctctgattctctttgttttcttctcccccttccatggcgagaactcgagctactggttcccgaagctccggccaaactccattgccacacacctcttcgacaataccagatgctccacaaaatccttcgatcattcctccagcttcgaatctcactggagaacatactgctcaacaacctcttgttcatgttcgtcttgttcatgaagacagctcaagcccttacttcttgaactctggagatcaccctggcctgatccttgtgtctcctcctctttcagacaagaactttcaaccatggcgccgcaatttcgagttatctgttggtgcccgaaacaagacaggtttcctcaaaggaactttggccgaaccaccagctgatgatccactccacgatcattggaaccgctgcaatcaaatggtcatgtcctggatattacactccgtttcaccagacatcaagagcagcatcatgttcttggacactgctgcagaaatgtggaaagaactcagctcccgatatgatcaagggaatggacctcgaatattcgaactccgagagactctaatcactttacaccaaggtgatgacactgtaagttcctatttcactaaactcaaatgcatgtgggatgaaattcaagaacttcgtccaagaattccttgtacttgtgctgcctccattgataatcttgctttcttgaaccaagaacaagtcctacaatttctaacaggtctaaatgagtctttttttcctgttagagcacaaattttactcattgaaccattccattctctgtccaaagtcttttccatggttatccatgaagaaagacagagaaaactcaaaaacccccaaattacatctctcattgccactgcacatgatccctctacttcagctgttgcacagaatccatctgcatcagctgctgcaaatcaagggcgcaataaacgcatgagaccctactgtactaactgccacaagcctggacacctcaaagaaaaatgttttttcttgattggttttccaccaggctatggagacaaaaagaaaactgagaacaaaccttctgccaaccaagcctctgcctcaacagattccatatgtctcttggcaaatctgactaaacaagaggatatacaagccttaatctcattgttaagccagaaacttcaacctactattcccaatactgaggcatctcaagcctttgcatccaacatttctggtaagaattccttatctaaatctttatgggttgtggacagtggtgccacacatcatatttgttgcaatttagattttttttaccatattcataacaatcctattgctacatctattaaattacccactggaatgcaaatcgaaatttcccaatcgggtagcatcaggttttctgcatctctggttctgcacagtgtcttatttgtgcctgattttcaattcaatttgttcagtgtccctacatttctaaatgatgaatccaacagtgctttctttacaaaaacttgctgtcttctccagggttcctagaacaagaagattgggattgctaaacgggttggacatctctattttctgctgcaacaacctgttcttccccttcatactttttccaaatctgaatgtaataaatcatgt

SEQ ID NO: 71022 - DNA, 1570 bp, Cannabis sativa
agggcataaaacccaacataagggtgtaccttatcatttggccgacccatgcctaggcttggggtccctggccggtccttggctgggtcatggaaccctggccggccctctctcagtttgggagctctggatggccaaggcctaggttccaaacaggtggccaagtttttgttctcttttgacctcgacaagagttttgtcaaggccttgtaagcatgtacaaccttaatcccaaacatgatttcctcaaaaactctgtgatatataattggaatgttgaataaatgaattgttattctttacaaaaaaagtttcttaattcatgttattaatacatatttttattgttattgcgatgtattttatcttcaatactagtgtaaattaaatacttggttttattgttgtatttcttttaatttagttgtatataaattcattgtttaaaccgttaaatgtaaatgaaagaattaattaaaaaaaaaaaaaaagttaaagtgattttggtgagaagataagatgcaaaatcgtgttcatgaaagaagacgcgtctgctttgttttaatgatgaatctttgtttgtgattgctctattccctataaatatttaaaagcttaaatatcttgtaaactaaattaagcaatgatcataaatacaatgataagcatgtagactaaattttgcaaaggcaatacaaagttaaacatcttcttaacaatcaaagtaattaattaacttttgacaaaataaaaaataaaacaataatattaattaactcatgtgagatgtcgagacacaatctcaagtaatgtgcaaaaatggttaatttttctatagctagtaattgtgggttaattattggattccgctaatctcaatttggattggttaaattcatgtcgaaataaaattataaatatcatgttatgtaatggggtcagttgagcattataatgacttgttaaaaaatatatattatacacttttttttagtctttcatattatatgtcttaacattcgttttaatttgtcaaaataataaaccccacaattgaaactcttatcaatgccctttttactttgatttgggttcctaattggcactaacaaatgtcaaatgattggggacactaagaaaatctttccactttctctttttgggaaataacatattgagttatttgagatttgggacctacccaaagagaggtggattatatatagcaattaaagtctttgtcattattaccaatgtttgccatgataagttacttatgtttaaatttaaaaaaaaaaaacataaatggttaaattttgatggcttatttgtatcactagaaaacaggtcgcgaaaaattagcatcaaataattttaaatttatttttatgtatattttttaaaaaatatatataaatgcttatttaaaaaaataataatatctatatagaaaattctaaaaattaaaatattatcatataccttcttatataaataaaaaatcagcaattttttttttaaaatacacattatactaaaaaaaattaaaaattaaatatttcttacaaaa

SEQ ID NO: 71023 - DNA, 753 bp, Cannabis sativa
tgttcttccactaaataccaaaatagtttgtttgagtccatgtgaggagtaatgaacacaattaaaaatagaaataaaaataggaataataattaattggcaaaaccttacccacttcactcaacatctatcttattcttatctcaaaaccttaaccaaaaaagatgaaacaaaaaaactaaaaaggagcttttcattacgttttgttttcaaattctaaagattcttattgatttgattatcttaattttttaatcatcaccttgattgaatgaaacgtattacatcatctaaagcctattttatagctaagtaaatatgggttactagacaaaaatcaaatgctgaaaatagataaagttgttgggagattcttagatgataaaatttgtaaaaatatacctaaaaggaataatttgaggagtattatactcaaaattttatagtagggcagcatcgttgtgcctcatgttgattgagatgtctctatttttattgtttgcaaaaattataacaatctttttaggataaatacaattttgaattttgtgtgttgtaaaagttactaattagagtctctgttttgttaaataataaaatagacattatattttttaaaatggtaaaaataagaccatgaacttaatttttgacaactttttttttttaatatgaccaacttgaaaacaattcctaacatcaatagacattaaattttattttgacaaaaaatcagttcaaggtcctatttgt

SEQ ID NO: 71024 - DNA, 1210 bp, Cannabis sativa
tgaacaaataatcgtttaaaaagattgtttccgtaattttatttcccttaagattaatgtatagtggcgtaagtgttaaagttaacggagaagtgttaaagttaacggagaaaaatattaaaacgttaaaccaagaattgccgttaaatagacacttttaatatataaagatataagtacggaaagaaaaaggtaaaacctttgaaatttgaccctgatcccacaccactattatatattaatgtatcatgcatcaagtttgtgtgagtgagcacttaaattggtataattgtggtggaattaccaaaaaaggagttattatatatataatggcttatcatcatcatcatcatcatcaatctctactacgtactagctagtttagaattggaacacctcatctccatctccaatgggttcatcactttcatactcatcatcttattataataattctccttaattcaccttcatctgataacagtggccggaaagtaagggccggtggtagatgcatggccgggttggtgaacctctacagcttgatctcccagctgtttgatcatagtagaattataggggccattaaattaattaataaattgtgattatttgatgcaaataatatataggaaggtggtttttgttttgaaataattaattaagtgaaaatgaaattaatgataatgcatgagatatttaattatagcttctcactcacgtaagtacttctactattctagtagctatagtagtatataggataatttaaagttggtaattgagtcggtcctataaatatatatatatatatatatcctaatattctattactaattctttttttttttatctcaaataaagatatattattttgaaattcaagaagatgtaataatatcaagaaagtaaatttactatttgtacgtacgtattgttagagataattaaacgacgtagtttagttcatatataataagtaattctaaatttctaatagtaataggacataaacataaatatttcctatatcagctggaaaattaagaatttcgaatggtcccacccgccctaatccctatatatatataaaccccaaaacctattcactattcctattaattattatcaacttaaactttaattagctctgatcattgttgtaaaccccaaaacccattcactcacactcaactcactcactcactca

SEQ ID NO: 71025 - DNA, 978 bp, Cannabis sativa
ttttttttttttgttattaatagctttaggttttttttttttagaaatattcaattatagtcgttatgttgctaaaatttaggtaaaattatgataaaattatttgatttatgtttctcttaaatttggttgttatagttttattgttatggtgagactaagcgccatattgaagagattagctctcaaaagttctctattagtaaaaataaatcaaaatcattaacccaagatctccatcatgttgttacaagtttatcagctgagttttacagtttacactaaagatgttcagttttcatggagcttattacgaaggtaatcaaaggataatattcaacttttgggtttttgtttttctactaaaagcttaactttttttcatcattttgttctatataattttttcttttatttcagtacaatgtttttttatgacgtctcgtacacacatcatcattactggggtatattattatttaattagttaaaatgaaaaaaattaatgttgtagtagcagttgtatattatttaactatgagtatccactagttgtattatcttcattattacacaccgaagtagtagttgtatcattatttctttatttctatagtagctagtagctaatttctcctataaatacacttgcatatcttcaagaaaagaaaacatagaaacacatatatatatagctagaaaatcacaatgatgatgatgatgaagaggtcaatagtagtatttgctgtgatattaacaatggttaataatatggggttgtgctatgggagtagagtagcacatagtgttactatcgttccaagtaatcgttgctatatagaaggtgagtactgcagtgccttactttggcaacataaaatatgttgtgaagggttatactgtaaaggatttctgagtgttgataacagatgtgtgaaaataactgattgtggtggacttggtcaaccttgtgctctt

SEQ ID NO: 71026 - DNA, 813 bp, Cannabis sativa
agagagagaatagggattgaaaaatcaattctatttttctctactttcagttggttactttctgttgtttcggcttttgattatctgtttccaggttgttaatttttttactatgtatcctatatatagtgttataaaataaagtcttttagtaatttatttaaaataaaagtagaaatctaatttgatttgaattagaattcaaactcaaatataaatatctaataattgaatatcaaatattggtagatcttttattttaataattatctttttaattaaacaattatcaaataaattcatttaattaacaattaaaacataattagattaatttaatttcaattattttaatttaatgaaataattgaactaaattaatcataggcatttatatgtcaccttacaagtgtagaatgggcctagacgtgtgggccatattttgaggtagaaaattaatttctcaattttgcgataaataagatttattatttattttgtcaataaataataattgattaattctcattaatctcttaattacaagaaataaaataaatattattttctctaaaataatatatttctctttaatattatttaagaataatataatatttaactaattgatgtagttttatcgaacaaaactaaatagttaaataccattaattatgcaattcctaattgcaataattaattaaaaaaaataatttcacatattactattttagccttaagaatttatttcccatagaaattgattcttagtcaaaattcattcatcaaataaaaccttccactgtacagtgt

SEQ ID NO: 71027 - DNA, 1212 bp, Cannabis sativa
tctgatcaaggaagaagaagaggttcccacaattgaccagaaatggaagggcatggttcccctaccggagccttcaaagaagcccaaacgatcagccacccccggtcctagctctgactctaggatcttggtcgaggccgaagacttccttgctcccccagccattcttctgaccctcgcccatcttgacaaagagagggtccaactccacattgctaaacacaactatgcggtggacaaactgtccaaaggcaatgctgaggccaaggctctaaagaaatagttaagggagttccatgatgggcccttctgaggtgagtacactggtgaggtctaggacctaaatcttgaccctatgatcgactggtttaagcacttcttgggcccaaccctctcaccattcgcctctaagctggtaagccattttgatgccgacttgacccaactcccaataaaaaggtatgcaacatgtgcctcctccaaccccgtttaccagattaaggagatgagcgtggcccttacctccgtgagtatttactttataagcttttctttccttcattattaatttttgaaggcctgaccccattttagtggtagttgtcagattgatgcgaaggccggtcgtctttttaagacattgattgaccaagggttgctgtctcggagctaggtggcatggatggagtcatgaggaagctcaggaagttggaggaccagatggagactcttcacaatgatgctctagcggagaaggctctcaaggagtaggatcaagaggggctgaagaccaaggatgacatcattgcctcgaactggaaggacctcctaaatgctcgagaggagattcagggactctccgtgaaactcaagactcttgaggagctacaccagactgacttggaaactattgcaagtatgtttgttgagctcaaggagttgcgtgagttctaggagcagacccagaaagaggctgcaaaggctgcgagggacgctttatttactccggtgacctgtaaccattgtgtgcagcacttcgaggatgtatattttatgtgctagaaatcgaacaagtttgaacctcgcctccacttcatgcctaatcctgaagctactatggtacgcttctgggataagaataagaagttggaacaagccttggtcgagctggtgggtccttgtcttcctccgagagctgattaatcaaactcc

SEQ ID NO: 71028 - DNA, 2294 bp, Cannabis sativa
ttgggtccgggttccgtgtccggggtcggggttcggggttcagggtatggttccgatactaggtctcagtctagaccaaggtctaggtctaggtctgggtcttatctggatcagggtccgggttcgcgatccaggttgggggtcgagttctgggttggggtctggggtcgggatggcaattcgtgctcgcgagtcgtataagtgtcgtgtcgagacccataggtctattcttaacgtgagcacgacctatttaataatcgggtcagaaaataaaattcgaatacaactctcttataaacaggttgacacgacacaactcatgtaacctgtttataagtatatatattttttaaacatgatggcttcagcttggaaaagatcgtgatcaaattagatattggccatcaagcatatttagtggtggattgaaagacttggctacatatattgataggaaagaagaaacttacagtcaacttagttaaattggtcctccaatagggttttggtttacttataaaataagatactcgttatgatgcatattgtaaagaattaacaactataaacaaggcgcacatacaagaagatgctaaaaacacaaaaaatgtgatattaactttcatttagttaaatgttggggatttcatcgtaactttggacatgttatgatatatggtggcctggtcttagataatttctttacattgtactaccaccaaactatctttttcaggatatacagaaaaaaaaaaaaaatgtgtctttatttgtggttttggtagacttgaatataaatatagttgaactcaaaatagagacattttaaatattatactcttaagtgcatgataatgatactcaaaaattatgtgttcatataagtaacaggactcaaaagagagttgagtaacataaaaaagaaattatgttaatcaaagtaataaaattttacctttgtgatgtatgtctaaactatcttggggagaagcatcattacccaattgctctcgcatttgtctattactctcctccacctcacagaatcgtctctctatctctaacaaagcgatcgttggcctcatcattctttttccttttaggataatgagtgtggacaaatgtttgtgtcactccataatccatggctcgaactcgaccaccatgctcatttatctcgagggccatttgaatttgaatataatagcatgcacttgtttacacatctgatccaaccaagaaatacaatggaggaggtacaattgcaagtttttacgcactatataatgtcactggctcacaattcactttcggtcgaataaaattacaaaatggacttgatatcattcaagttggttggggagtaaatttgtttttcttgagtaatctttctactagattctttgttgttaaagataattacactaaatatttttagataaactatagttttttagaatattctgttcacttgttattttggtatcatttcttaggtaaatccaagtgtatacggggataataaaactcgaatcttcatacatttctaggttaccctaattttatgttattatttaagatttcttcatattcgttgtgtagttttgtgtaactcttgtaccaatatttttgtaggctggtgaattatcttgttttaatatagtgtgtccagggttcattttggttgaccctgaacctatatgatcgatagaattttaagagaaactcaacctggtacttttcctacatgggaaattggaatctatatttatcgggtaaataaaattaaatatttcgtttaaatttttatcttttttactttaccaagtttttattaaatattttattttaaatgaaacaaaaaatgtgtcatatatatttaaaattttaggttgtatttatattgtacttgtttgatatgatatactaggatcaaattactgaaaattggtgcttcaacttggaaaagatcatgatcaaatcggatattggccatcaagtatatttagtggtggactgaacgacttggctacatatattgagtggggaggagaaacttatagttcactaggtcaaattggtcctccaatggggtctagtttacttctaaaacaagatacttgttatgatgcatattgtagagaattaacaattataaacaaggcgcacataaaagaagatgctaaaaacacatattggggatttcatcgtaactttggacacactactacaaaaatgggttttcccgacgcttttaaacagtcgtttaaagtattgtcgtcggtttctataac

SEQ ID NO: 71029 - DNA, 2275 bp, Cannabis sativa
gaccttgatgatagaagatccacaacaggctattgcatcttcttgggaggaaatctagtagcatggaaatcacagaaacaagcaaccatatcaaggtcatcaaccgaagttgaatttaggagtctagccagtactgtaagcgagatatcctggattcaatctcttctcacagacctaaaaattcagcaaacttcaattccatcaatttggtgtgacaatcagagtacagttcttcttgctgcaaaccctgtcctacacgcacgaaccaaacacattgaaatcgatctttacttcgttcgtgacaaagttctgcaacaccaacttcaagtcaaacatgttcctgcaatggcttaactcgtagactgtcttactaagcccattccaagctccaaatttcctgaattcagaaccaaactcaatgttgtttctcaacatacattgagtttgaggggggctgttaagggggatagagttagttaatgttgttattactgtttgttactgctgtcagtgattagttacgctaattacccttactttcctcatctgtatataaactgcttgtacctgtactctgttatcaagaataatacaatacaattatgtttcaacttctctctctctctctctctctctctctcattctttactcttgacatgttgcaagtgtttcatgagttgaagaattattcagagagaaaataattgactcaacacatatataatgaatctatttattattctttgaaattgaatttatattttctttataattttttatgtatgtttgaagattatctgaatgcaaaatatcaccaattatatatgaaattgattattgtaatattttaaaattaaaatacatgacataaaataaaactaaacatacacgtaaaagtaatctagtatatataaataggacaagactatggtatgaactattattttgtcctcatggcagagaagtttttacaaccatagatgataaatctaatgtaataaataggtggatgtataataataatacatatttgcactgcattatattatttcttaaaatattttaataatatataacaagtaaaagtaaatattatttttaaaataataattaaataatatattctctttccactcaattcttcttcttcaccctatttctttactgtgactaaaagttttaggttgcgtgtaaaactcattgccagctctttctctttcttcttctttttcttctttttcttcctatttctcaatttttgttttatttcttcactgtttcttcaatttgtaattttcctttttatcctgtgctattccttctctttctcatggagtgattgtacataacacttcgtttttgtaccagagaaatcgactatgtaccaaacaaattgacccaaaaattttgggatacatatttatcctatatattcttaatcaatttaaaatcttagtttcatgtttggtaattgctttttaaatattttatgattcttttttgttaaaaggtacatcgatctgagattttttttgttttttgttttttttttttttttttttgtgatttgttttttcatatcaagagtttcattcttattaaaatcttcacatatgatttcagtaaccaagttacattaaaatttaagccaaatgtttgagcattaaacagttgttagaaacctaaaaacatgacaatataagatgataggtgatgtggaagataaatgcatataaaccaactatatatatttagtggtaggatattttcaccaatgtagaaggccataacaaggagtgagtttcagataaaatctgattttttggtatattaaacaccagattttgaagaagttggggttggatctaaaaggaattttgatgaaagagaaaaaagaaaccatgcctcaccataggtttttcccttagcacctacccaaaaaaaaaaaaaatccccaaattttttaatctaatacacacaagtatatgttagataagttatacactcaaaagtcaaatatatcaagggttagaaaaatatccctatactataatgacaaaataagtgtacctatagactatagtagaaatttcctatataaatatacatatattattaattatgaggaaattacactctatatattttttatattgttatcttttatttttatcctcttctttaaagtctatcatttttatctttttttttaaacattgtaccaattttactcctgtcacttcaagatattctttatgtgactctcttatatta

SEQ ID NO: 71030 - DNA, 3161 bp, Cannabis sativa
acatgaaatggacaaaacagaaaaccattgcaacagtggactaagcagatcgtgatctgactgaacaactatattcctttgtgttctttatatttcaagtacgtcaatgtgttcatagcttgagtactcaccattctaggtcgagtactcacacattctctgttcatatctttattatattatttattttggtgttgtctaaattcctccaacaacagtctgaaactccaacttcaaacagtaagtggcttttcttcttaatatctcacatgcttattatgttgtatttctgggtttaattgctgccttattcgtccgtatcgttatcatctcatttggttttagtaattttttagggctaaatcgtgtctgggtaaaggttagggtttagacagtacgtaggttttctagaatctccaattcaccaacttctggtttgataaatctctttctaggaattgggattgctttttccttgcaacaatgtcccaatttggttcagaggtttattgtccaggagatttagaaattgagtatcctactgaaattgccctccgttacaaacccaaaatttcaaaacctacatccaaattagaggtaaatgataaaagaattagggagcacttagtgagaattcatcaggaagacaatgctagtcgccacagacgcttcttgtaagaagtcactaaaggcaaatgtcgtttcttgcgagatgtcgcttgtcctgaacgtcctagtgtgtcttctactcctttggataaacctctgttcttacctaaagtcacaatttcttttgaaccaagtcacttggatttataaataatgtctcccaagccacgtaaatcaaagactccccaggatcctaatgtcaccttcgaggtagagttaatagagtcgagggtgcaaactatctcaggctacgtaggcgattcactaaggacttgcgaaattaaatataggctagactgccatgtgagatcagtgcgagtcggtgaatttagttgttaccccctgtgcatcttagaagtgagacttttgagggtgccaatgtcgagaacagtacaattggctcgactgctataggcgcttggagcctcgtgcacatcagggcaggggaaataaccccccttcatgattatttcaaggactttacaaaccacctcgagcttgccctgtttcaattgaatcctgtctcctatagaatcctcacaagtctaagggttttgtacaacattctaaattgggatcagtgccccactcctctggaaatagagtatctctactctgttaaagctgtcccagcgaggaagaatgtcgcaggaggcttttactatcttgacactcactctggcgagcataaaatcattgtggatttgtcaaacaaaacttccttcaaggacgatttcttttggatgaccgacctctccccaatcggcacaaccactttccgtataattcgtaagtgattgtttacattagacttggttaaattaatccatgtcttttaatttaggttacctgattgaaattttgttttgttttcgatagctatctcaaaaagacctacccccactcctgagatggccgagcggtataggctcctgttgactcttccttacggccttaggtcatacgatttccttctaaacgaggtcaatctgaggtctgtggatctcctaactgacaaggagtttacttgtgattacaaatattcaaagtattcttcttggcagtaggttcctatcccaaacaaggaaaaagcccgatatcgcgtggctcgggcacagtatcttcaaaatactgcccccaggaagcaagtgaggagcatccagaggtaatcaatgtggttggtcaaccacactgcttagggctgagcgtaccactctagttacatttcgagatagccgctttaatttttatatttggaaccctctcctcgtagatcgcataacagataggtttgacatctggtaccataaattccatgtccaaatcagctataataagtcgtactatggtacaaccgagtaatatggtaccatgatgaatagggcaagtcacctagacacgagttggaatttagaaccagttgatcgctttgatgtattcaagattacggtttgtagggattttaatggatattatggtccttctaccccatcttctagtcatacattgtaatgcccttttccatagggacgccatgtatgcgatttcataaactaattaaatactaatagattaattagttataaaaaactgtgataatattaaaaacttgactaaaagaaagggctaaaaacggacattataacagcagtagaaaggtgtttcggggatccctgttataaaaagtttaacaaaaacactatatacaatgcctcaaaaatataaaaccaaaatacacaatacatacaaccagtctaaaacaactcatggcaatacagcacactggccggtgggggttaatatgtacattgctaaagaaggcagtcacctcatggcagctctaacttttccttgccctgacctgcaccacatagcacctgtgagtcacaagtactcagctagaaaagcaataataatgatcatatagtttattatttgaatattatcatttatacacaattagtatcaaaccattacacatcgttcataagatgaaatccaaatcactactggcatctgccatgaataagcatcagtatacaaatatttggtaatacaaaaccgttacaccaataataggaatcatattcatttaaaaatatactttatatatgttacctcataaagtaaccatcttcattacattacattgcctaatcaggcaagtcaatgctttaatttaaaaatcctgtattgcattgccttatcaggcaagcccgtgccatagcttggcacccatatatcgcataactgcaccacctaatcaggtgagcttgtgccaaaaacctgcacccatatatcatataatcgcatcacctaattaggtgagcccgtgccacaatctggcactaatatatcgcatcgtctaatcagacgagcccatacctatgcccggtgcatatcatatgtcactgacgcccgtacctacacttgatacgtcgctaggaaaattgcatcacctaattaggcgagctcgtacctatgctcagtac

SEQ ID NO: 71031 - DNA, 1260 bp, Cannabis sativa
tccacgagcgaactaagcacattgagattgattgtcatttgttcgtgagaaaattcaacaagacatgatctccacagggtgaagattggagaacaattaggaaatattttcacaaaggctttgaatgtggtgcaagttgattatttttgtaacaagctggtatgataagcatttatgcttcagcttaagggggagtgttaaaatatataatatattttacttagtttttaatttcttcctactttcctatttagtctccctaatcttgtatataaatactagttattctattgaataaaatacaattctatttaccattttctacaatacggatcggatattgattaacattaatccatcaaattcaatctacacctattttatatatatttaataaatatataattaatattttagagaaaaaaaatagtaattttaaaaattaataattatggttcatatgtttcaaaatttaatatatcatatgcatatatttttatagaagaaagttatgtgcaagacacgtatacttaattttatattaagtgttttataattaaattaaaatcatataaattcaaaaaataattccctcaaaaataaagttcgaataaatcacttcaataattattactagaatggtaaatataacagtatttgtaaaactaataaaatgtttattgtatggtaatttctaaattatatacataacacaaagaaaaaaaatagtaaaacaaattctttcagaggaaagaggtttgctgaaagaatttccaactactgagatggtggcagaaagagagagttaggagaattgtgagtggtgcataattgatttagtatatcgagtaatttttatctgtgtaaccaaatctaattctaaattttagaataaaccaattgaaagaaggaatataaaaaagcaagaaatatgatagcttcgaaataatattatgttctacaatgcagcttttgttgtcacggaatatttagcaagaagatccaaatacctacaattatacatgttccaaatattgtctactatatatttgggtttgatatagtgatacatataaaaaaaatagggatttttacaaaaatactagtttttttgtaaaagtttacaattttactgtcacaattttttttttacaaaaatactatctttttataaatcaacaaaaccgaacaattaaaacaacaatggaatatctaaaaaaaatatgtgaaacaattatgaaaacttaacacagtacacaa

SEQ ID NO: 71032 - DNA, 1670 bp, Cannabis sativa
cctgggcgcctagggtttcacccacgcctaggttgacaacctaactagggtttcagttttcaggaccgtcttagtgcaaatggatcaaactttatactaggacatgaattagatatgtcacaaacatatttgaggtatcacaatgagcttcggagcactttcattttttagcactcagagcaccaggtgccccaggcacccaacgcctaggttgacattttttttcaacctggggcacttccaagctcaaactaaagaattttcctgaggattttatttttcttcataaaaaatgaggaaacaagtgctttgggggaagaaacagacgaacctggaggctagaagcgggcccagcgcgcaggttgacacctggtgctagccctgcgctcaagttgacattttgtcaaccagggccatttccaaggagctaatttgagaattattcctggcatattctctatttttgtaaaaaatttaaatacaaatgtttctgagaatcaaacggaaccaattggtggcctaaaactggatccagcacccaagttgacacttggtgctgttgacagtttatcaacctgggttgtttccaatcatattcccgaaaaagtgttaagggaatttttttcatcatcagaaataatgaagatacaagaaagctcaggaagaaaatgagaatttcgggggcatgaaagctgagcccaacgcccaagttgacttagtgctgggcatagcccccaagttgacaatcaacctggtgcactggtttcaatcatccaaatgcaaattcagctccgagaattctctccaacatggtcaaaaatggtgaaggagacctcatcctcaatttcaagaaccttggaagtatcaaacgacatcctggaagctctagttagagcatcagtgcctaggttgatatgtgacctggtgcgctgggttctgcttatcgattctgattatgtgtcaagcgttcgtctagtttttcatagtatatgagagctatgaactcaaacaagtcaaattcacaacttcatattttcactttttcgaaaaagtgacttagtctcgaatcgggtagtttcgagtcttctgatactgcggaacagcaacatctccgagaactagtgaataacttcaccaaaacatagaaactagctaagtgatgtcaaaatatcacttagcgtcaaaaagtgcaccctcaacacgttttttccttaaaacatatgtcaacatgggccctggatgtcaacttgggcgctagtatcagagcatccttcagtaaaacagtcataattctcaaaattgattcatttgactcaacttgcattttgaagctctttcaatgctccatcaagttatgtctcacgctccaattgcaattttgaagttatcaagtccaaattttgtcctcatgagagttacgaatttaagctacaacttacccgaagtgggccctataaacacaacacaagatctagaaattggcgatcggccctaaagaatttgactgttagatcataatcaatggtcaaaaatagcctaaatgtatttttttcatatttttttttcatattttgttattattttaataagaccttctttcctataaaaggagagctccactagttaatttttcacattaagaaaaatactcataaggtcagagcatctct

SEQ ID NO: 71033 - DNA, 890 bp, Cannabis sativa
tttcaaaaatttacaaggatgatattgtaactataagaaatactgctataaaaaaaaattgaaaaaaatatttcgggatgtgacttcgaacgtggaagttgcttagaagattcttaacactcctcaacttttaaattgtcacatattagtcttagatcaattagcaaagtttaaaaaataaaaacgaaatgcaactgaaggaaaattaataattatttatataattcagtaaaagaaaaaaaattatagggcaaaaatctagtgtaaacatcttattttttcttttgtttttgcttaatcttttaaacatgatttttttagaagcatgtatgtaaaatatttgacatactaaaaatggagatagagagtgagttgagaaatgaaaatataatgattttactttgataataatatatatggggaagaacaatttaacttataggactctcttattctgttagtcacaacaagagtactatataaatgaattggtttggcaatgattaatgagagaaaagatgaaaaatgaaaagaaaatggcgagtcactaaggacatgttatacaaatttctataacttatgtcgttattgtttttatgtgaaactagttttcatactatatatggcaatttgtaggaaaatacaaactttctttctttctattttgttttatatattattatgtaggacttaaataagaaagctttgactaaaggtaggggtggtaatttgtgtttgtaggttgtatttttgtcgtgtcgagatctatgtattatatgtatatgctctatccgaacacgacctatttaataatacacaaacacaatctgtttataaacgagttaatatgacacggtcgtgtaaccccattaatatagtaattacatatt

SEQ ID NO: 71034 - DNA, 1071 bp, Cannabis sativa
acaatacttgttgtgactaaaactaaattggtgataatttgtattagttacaaataactctttgttatgactaaaagtaacatttagtcacaaaaaatttatgttatatataactaaaaatttgtaaaaatagctgtttatagtgatatacattgaattattttatttgttggattcgtaaagccaaagagataagtcattttaaaaaacaagtttttaatgctgttttggcagctatagtttatcatttgtggagggtgaagaatgatattttttggtctcaagtgtggcaacttgctcatacttttcagaaaattatttctgatgttaaatgcagatttttgtgttaagcttaaaaaacataaaggtagaagatagagattggtttgattttctttgtaatagagtttagaaattgggtttacggtttagattggtatatgattctcacaaaaaaaaaataaaaaaagccattgaggtgtagctttcatgaattttttaaaagtaaatagaatttcatcattaatttgagtttcaatacaaaagtagtgttaccaaaaaactcctagtatatgcaataatgagaagtataaaaacactcacacctttgttaattccttcaacaaatatttgtaaaacatcatgaataataaaacgaccccttctttttagttttcactttgaaattgattgtgtataaataaatggctaaaagtggggatattaagtgatgagctcacattgtaaacttctgacaggcaaaggcaatacaagatcgcaacaactggataacaaatcaggtattatatcatttttgttgtaagaatatgtgcttaatttttagtatttggggccttattgtgtaaatcatttgttatattttaacatctcactaaaaatatctgcatttaacagattaaggaggacgggaagatattagttgagagcagaaacttggatcagcaagccaataactctccaaactcctccactttattgcttctggctccacctccaagaccaagctcacttccttctttgactattgggtactatttctcaataccataa

SEQ ID NO: 71035 - DNA, 1784 bp, Cannabis sativa
aaatgttactacaaaaagaagaatttataaaacaactaaaaaataataaattatttttactgaaaatatatttttataaataaaaaattcaaaaaaaaaaaaaaaatttgtccgtatctagatatttttgtaattttttttaaaatttttggtctattaaataaaattttcttctacaaaaggaggatatatagaactggagtacatatatatataacacaagagaaaagaaaatcttatgctacataatacatcatcattattattattattattagtgtaattattattaatggaagtactgaagaagaataattacttgtggtgctgtctctttttgatggggttatggccattaatatcatcagtagcagcaggtgttactatggtaaagtcacccaattgtgagacaaaatgtggagatgttgaggtcccataccccttcggaatcgatgacgaaaactgcgccattagtaaagacattgataagaacttcttgctcaaatgcaacacttctactgcttatcctaaactaataagtggaaaaaacttagaagttagcagcatcgatgtgaaaaatgccaccatgagtgttaagaatttctacttctcctacggctgttaccgtaaaaatggtagcttaattaatcgaaccagaacatctataagattgagtaaatcgttcacgctctcatattctgagaacaagctctttgctttcggttgcgacacacaagccttcatgaacgcttcacaaaataattttgggagcgggtgcatctccatctgcaacgaaaatgtaaagatgtcggctcaaacctcgtgttcgggtttagggtgttgccagacctctgttcccaagcatatcaagtatttatcagttacaaccagtagcttcaataaccacaaagatgtttaccctttcaacccgtgcgggtatgctttcttggcggatcagaagagttttgacatatccaaaatgcgtctcgattttcagcccgaacaagtgaagaaacctatggttgtgctggattgggttgtgggaaagcagacatgtgaggaagctcaatcgaattcatcatcctatgtgtgtggtgaaaatagtaattgttactattctgagaatggtggtggatatcaatgccgttgcaaacaaggatacgagggaaatccttatctcaaacaaggatgccaaggtatatatattccaaaattacttgtgtatttttaaaataattttaatgaactcgggattgagtgaactctaggtgcaggcctaatttactttagtttaagcccgacccgactctgaagttatatcttgtttcacattttttgttacaaactctgttttttgtggtgttaatatatatctttggtggtggtagacatcgatgagtgttcaaatcttaacatcacacaacattgcaaaggatgcaaaaacatacctggaagttacaaatgcaagtgtccacttgggatgcatggagatgggaaagatggaaattgtaaaggatttcgttttaacacatttgccacaggtaactataattgcaacaatcattcattaattatgtaaatatatcatttacaattatattatatcaaaatgagtatatatgacaaaaaaaaaaaaattaaaaaaattagtatattgtctttttttatttttaggatcttttttaaaatctattatttttactttttttaaaacatttgactaattttgctcctgtcactttaagatcctctcatgtgactccttatgtcagagtattttgggt

SEQ ID NO: 71036 - DNA, 753 bp, Cannabis sativa
tatatatgtatatataatatatatttatgtaagaaggaggaagaaaggtggaagttacatctcattttcatagcccctacactatacgtaatgtcataataattaataaaagctatttgtcaaactatactagattggttgggacaaatatatatataattcaccacccccacttcaaatatatatgttggcaaatttaataatttatatatacaatatgtatatattgtaagaatattatcattaatttatatatgacaattaagaaatgaagtagtaaaggtctagaatcactgtaaattaatcactcattaatcaattttctcacttttttttgctcttttttattaattactacttatttacttaaaattaattttatattacattctaagatatataaaacttaattgaatggtgacatggtgacttagaatcgctgcatggcactactattttctttactcttttttttttttttaaatctttttaaattattgcattcttaaatttacttaaaattaattttttatgcataatattctctaagaaattagttaaaaaaaagtgttaaaagtgatagtttcataaacgaacttaataaatatatatagttttgaaaataaacaagatcatttctccttaattatgacatttatagagtttttttatctaaatttttatttgttgcaaatttttctctaaactataaagatgcacatttctgagttaattttttgtcaaaatatatga

SEQ ID NO: 71037 - DNA, 1167 bp, Cannabis sativa
ttgtccaaaccaacatcaccgtctgatcactttgttcctcacccagtcgcgagaacaaatgaagaaactagtccctaaacgactctgcaatatgcccgcatcaactggaatcatagccaaactcactacccgccaattctgcgcaaaaatgataggtaactaaacaatgcaaaattgaatcacctgccccatgtttagtcttcagacacaataaagagacatccacatgtttagtcttcaactaaactttcttagaaagacaccctttcatgcacaatattttgcatttagaggaagttttgccaaaacttcttccaaacacaacctcctcattcatactaccctctcggtttgcctgtaataaattaaacatagtactcttaactttataccccccaaaagagtcaaaaccccaatactaataatccttaaaaattgaattagaaaagaaaatactaagaataatgatcgccacttcctcattaaatacatccaaactttctcacctagtacaaaaagactaccaacctttcattagctaattaaattaggatccaaactacattgactccaaattgacctatatattcggaagccacgaagcatcaaataaaagagtcttttctctattaccaattttcttccgcaccctcttacgagtcaaattcttttaccccaacaaaaattgtattaggggtgttcatataatctgcaatccgtagtttagaatcccaaccaatccggatcaaaccatttgagactagaccaaataaattcagtgtgaatgatttgattaattagaccgttttaaattctttggttcagtcatagttttagaaatttcggcagtaatttaaactaaactaatttgtataattattatatatatacttaatgtatattttttggatgaaatattagtatttgagaataattttaggtataatattcatattaaggttatattgttacgataataattttttattattatttatgtattataaacttattaaaagtaaaaaataataccaaaaaattaaataattattgtaaaaaaaatattagaattacgaaatataaactaggcatgtcaaaaaaattcatttagttggagcgggttggagctccgacccgaaacattcagatacttattggatcttggat

SEQ ID NO: 71038 - DNA, 838 bp, Cannabis sativa
tgaaaaaattttgtattcctatccccactttttagccagatttctctaaatttttgtttccaaatactctctctcctcttccaccattcctcgagttgtaattgtaatttagattcaagggattttaactcatcagagatctgttgattctgaatccaacaaatctttttctcaatctccttaatctacatctcacagtccccaaaattttttttcctccaaatttacagacttcttctagtagcattaaggttcttgaggataacactacctggattctcttccctgtctaaccacgattttagaatcacctctttataagaatcatcccttgtccaagcttcgaaaaacctgaaagggtaggcccccttgctcttgggttaaacggtagccccgtgatcagaaactgtgatgggaaaattaaacacacccgccccaagatagtcaattaccaattcgtgggaccataacaccttgtcgagtctttcacaaattaaagtaccaaagaatcttttattttgccaagtgaatcttcgtcccgaaaaacccagattgatgcttcccatgttgaacatgaaatcctcaagacttctggtatccttgctaccgatagagcctccccctctcttctcttcagggcacacaattgtatttaaatctccaataaagatccaagggagatcacaagcattaactctccgggttaatgactcccaaaaaaccttccttatcaccagcataacgggggccataagttgcaaaaatcacccaagacttactagtctccacatcccaaacaagaacttcaaaaaccttattcttgttgggttttgtgccc

SEQ ID NO: 71039 - DNA, 1379 bp, Cannabis sativa
ctttgtttttaaaaaattgttttcaaaaaataaggccaaacaaggcaaattgttttcaaaaaataattttctgtttttaaaaacaaaaaatagttttttaattatgaagccaaacatgaactaatgttttgtgtaaatttattataattttaatatttaactatcttttcttgtttataatttagtcccattttttattttcttttacatttgtactttaattgattgccgtaggtgtgggtaacctttgttaggttgattttcgaatttaaagcaagtcatcaagctgtacgtatattttatgtatattagacgagaaatactaaatgacactagaggtgcttatcactctcttatatgtcaatatcgatattgattcaactaagtattagatctcatataatttaatataataacttttaggaagtatcgctaaccaatcgcaacacgacatgtaagtgctaagtaccactggtagctagtagcaatcctcatattatatatacaaaggtatttgtcatccaaagctgagttgcccttgcccatgtcctcaacttagtggtggtgtgttacttctctcttctcttttattgtgaagatattcttcttcttcatgtgaatcttgtaagttgcaatacatagaagattataaatcgatttacgatcattcaatgctaaaatttacacaacaacgtgtactttacttcttagttaaccattttctatattagttatttaattaaaatattaaagatcatatgttaatctagagttataaaagcataaaaaccattgtatgactgtaacacactctttattagtattaatcacctactgtttaaatgttctagatagcataaaaatataattcacaaattattattattagtacaaataattgtgattagctgtatattgtgatttgacatatttaactttcatgttacacacccttatccttttcaaaataaataaataaataaattacacatccttgcaaaaaagttaaaacttttataatacacaggaaaaacgtggagtttagaatggacttttttgtttgtttagattgaacagtttagaatcgatcgaattcctttatttgttaatttgtgggcatcctttatttatttattttttcatttatgcaatggaaatctcatatgttactgtcattagttcgatcactttattgtaatgaaagtattctctaaaatgaaataagaaaaaaaaaatcttccacatgttcacaaagtgaccaaaaatccaattcatttgacacttggttgatatatatatagctggctttgagttgataggtgagtatactgtcaccaaaagcctccaatttattagctccaaattttctaagaaaaaaa

SEQ ID NO: 71040 - DNA, 1429 bp, Cannabis sativa
ggtccattgtgtcatttaacaaaatacagggtccaatctgtaacttttgcaaaatacagggtccaaaatggtatttacccttgttttattgcacttgatgagaagtttagagcttggactgtgcttttagtttttaaaattatgttttaaaaagtgagaatgaaaaacaattttttgtcaatttaaaaatttaatggtatttggtataaagttttaaaaattatttttaaattgttttcttactaaaaaaatcaatattttaacaccatattatgacatgaatccatccaagtccgggttaaggtttaattccgagtttaggatccgagtatgtgaacaaaaaatgtaaaatataatatattaaacaaaaaaaattatttttgaaaattaaaaagtagcattttgatgttttttgttttttttttaaaaaactgttttaaaaaaaaattaacaagcgattcctaatagtttttaaaaactgttttctgctttagttttggcacttagttcttttagttaaattttagtttgattttcatttccaagatataagctttgttccatctccttattgttaaaacggtcttaaatgattattatcttgtaaactttttatatgtgtataataatattatattaatacatatatgaaaaaaaaaaactaattttcattaatcaaccaacgaaaactaacagcacttacaaccagccacacaaaaagaaccacttaacaattaattacattttgtaataagaaaaatttctcataatcattcttcctataatataagtaccactatacaatctatactttaacatgctttttatattcctaaaaataaaggaagctgagcaggagcaactctcataaatacacctattcttgttgttccacaaactgtgaacaactgaagcaagaatatatagcatttacaattgtagttctaggacctgaacgatctgtattaatccacctttgccattgtaaaaaaacctgtggccaagctgagaaatgagaatccaacctagctaaacaccaactctaccactttcacagacaatcaatcaaaaaacaaatgagcatgactttgattcagcaagccacacacaggacaagaaggtccctggttagtaactgagtattgaccatcagccacaagatgaaaatgtgcttcggtaagcttaatcgacaccaaaccatttttgataagcaacctgattatactgttgtagagaatggaagctttaaacttgccattcttgctggcatattgaatgttcctcttatcaaaatttgtcgtaaatgacacaattttctctaataagttttgataatacattattataataggctaattagtatttttaccctctaaactttaacatgtaccaaatcatgtcccctaaatttttttgaccgttaaaaatt

SEQ ID NO: 71041 - DNA, 981 bp, Cannabis sativa
gggtgggggaaacctgtttgctcccgtggcctctttccatcactacacgagtaaaaaaatcctctactccaagaacataaaatctattctcaatacgagcacttaagcaacgccaagaaacatgtagcgggacaaaaaaatcatcatcaagacttagcattctctttttcacagaacatagagattcttcatgaccaatccaaccacacttgaagaaaaataggaaagtcgttcatagttaaaatacaaccaaactctcttttggctctcatccaaaagaaaagcgccatccatacaaggagcctccaaactaatctataccctaaatttgagatattcattaacaaggatcccacctttcatagtaggacaagcatagaggcagtttcccacacgattagccatgacaatagcccccacatcagtcaaaaattgagtaagacccataaggcctgaacccagatagtcgtggcattcaagtcaacagtatgccatctgccatcgttcggtatcgggaaaacaagcatggatccatcacaaggggaccaaggagccaacctgacaatagcatgagcttcattagctttctgaagttgaaacaagaagaatttttgacttcatatcacttcttgtaagagccaagccttgaacgaattctgcatcccagaaagcattctcctcagagtaccattagagaccctctgtttggtgaagaaacaacccaagatggacttgactatcgtgttattcgcaattggttcatccagttcaatctggagattaagtcatctagaaaaacatctcaatctcctccatagcttctttaaccaaggaagcatcattaaaagttcctgaaagattctccattgaagcaaatagaaaaaatagagagaaaactcagaggagtacttaacaccacttagcaaaaaactttcacaaaaaaaaaaatcagggcacaacctaaaaattaaaatgttaaat

SEQ ID NO: 71042 - DNA, 1107 bp, Cannabis sativa
cccgaaatgcaattggaattgatttagtggcattttaaatattggtgaataatctgaaaatatatttggatttatgtgtatgtgaaatgatatttctacctttgtgtgtgggtatgttattaagccctaggggcaaaatggtcattttgacctttatttgataattaataaaagagttgaatttttaaggaaatgaaatgtgattttctggtttctttaccctaaacccgaacccctctctctctctcaaaccctcttctttttcaattttgattttggagagaatcacttggattggagctagattttggagcttgattttgggggtttttcttggtaaaaccttgaggtagtttttacagattttaattgagttttcttgctgaaattcttgctgagtttatgatggaaaaagcatgttttggattgtttgctcttgatttgcatgttagaggagtaagtgttgattgtgataaagtttgagtgtgatttcttgatttagatgtggattatgttgttgtgttcttggattaggttgtagagtattttctaggtcaaaatttgtgtattatttggtgataaggtgttataaaattaattgagttgggttgagttgaagctcaagttcttgagctttagtttttgttggattaaagcatgattttgggtaatttgtgcaatctgaaatatggggtttattgttggattttaatgcttgaaaatgtattttaaactccctgtatgattgttagaaaatctattgcttggcgttaggttttggttggtttttagcatgatttggttgagtttggaagctgaaattcgcgaaaatggttgctggtttctgggttttgaacctaggtgccacggcatggtatttagcatgccgcggcgcgcctcctttctggacctgggagttgatcccaggtgccgcggcatggcttttacatgccgcggcctgccctcgagtttttgggcagattcaagtgcaaactttgaaaatccataactttgtgatccgaactgggatttgggagttctatataccgttggaaagctccttctgagctctatgtgattatatgaattttaaatgccatgtgaata

SEQ ID NO: 71043 - DNA, 1333 bp, Cannabis sativa
aaaaaaaaaaaaaaaacgaaaagaatatcacgttttcagaatttccttccaaaaacactcgttatttttctttctgctctcccgctcttctcttcacctttcgacaaaaccagagcagtccatctctttagtcgacagccgacgatcgactcccactctcagcacctcttaaactgcctgcccctgttctacttatactctgccattggcacaaggtaagatgtgaaatagttggtttgtggtttgctttcatatgctttcatgtgaaatcagaaaaaaagaaattcatttagatggtgagtttctgtgttaataattttcttcgaagaattttgaatttgcattttaatatgttaattgatttcgtttttttttttacttatgctgattctactgctgccatttttttttttgttctagcttagtttctttcttcgttttttttttttggaaaaaatttctagctgtatattaatatttaatttggtttggcttttttacatatgctgattctagtataccaaacataaaaacagctttgtggtgtataggttttgttgaaaaatttgtatgtattaatctgcctttctaatatctgttacctgtttgagtaaatgcctcaatggttatgaagtacattttgatgaaatgcctcattgatcgttttcattcaacagttcgatgtaattgactaacgggttatctatgatactgttttagaataccttcttacttttttcattttggttctgagatggagcaaacactatagccactttgtgagagtgtaaggatttgtttgtggggttcaagagcaggccaagaggaaaaagtgtcataatttagtttaattgtgaaattgtgttctcttttcaacatggcaacatcatcaacatcaagatctgttgtggccttttttatgcttctagcattactatgaaaatttcccaagttttgaatgttgtaattgtacgaaagtttggtccattgaataactgtttaaagctccatcactttagcttttgtgaagatggtcactggccgctgtttagcatcttgaaacagagggcattatttgttgttctgaattttgagctctttgaatcataagatttccatctctatatatcactagttctgcaaatcacaatgctcctctcagtaataccttctttgacttatgatatatacatatttatatgccttttatttgagttgtttcgtactcatcagtaaaaaattattacaattgttttgtctttatgttagtctcagagattactttttaagggacaggaaataaatttatgcaatttttactgccatttttgtt

SEQ ID NO: 71044 - DNA, 1667 bp, Cannabis sativa
gacttactacaagcttggccaaactactcctcatatgcatagatacatttcattagttcctttgcttccccttcattagctcgataaaaaaaaatcgtatcatcagtaaacataaggtcagaaattggcggggccaagggcctaatttattccatgtaaggctttccttctctcagatctacaaatgattttcgagaggacttcctggcatagaataaaaataaagggagagagcgggtccccttacctaattcctctttgaggagtaattttcttaagagggcttccatttaaaaggatcgagtacgacacacttgtaatacatcccataataagcttgcaactcctatcatcaaaaccattcgcttgaagaacccaatgaatgaaaggccaccccatcttgtcataggctttaagcatatccaacttgattgccatcaaaccaccttggcttttttttctgtctaatcttgtggatgatttcttgagttaaaattgaagattcagcaatccaccgaccaagaataaaggcagcctgcatcgggaataccaactcatccataaacggtctcatcctattcgaaataatctttgcaacaaccttgtagaggaaattacaaagactaattggacgaaattgatcaattttctcaagatttaacaacttagaaatgagacaaatataggtatagttcaagcaagagtcgatctcaccctttctgaaaaccacctaaacagctgaatagaagcagtcgcccactatctcccaatactcgtggaagaaaacaccagaaagaccatctggcccacgagccttaagaggatggaatccaaagacagtatttttaatttcagtaatattcgacatctgaacaatacaatcatttttctccatatcaagcttatacgaaaaaaaaaactcatcacaatccagaggcataaaagttttagcagacaagaataatttagagaagtaggagtcaataatacccgaaatatgattcctatcatgccaagtcctcccactgttatctttaagagcccaaatctattttattcttctacaaacagcagtcacaacatgaaaaaatctggaattttggtctcgaagtttgagccatatttctctcgaattctatctagccatgtcctctttatgccgccacgcatcttgcaattgcaattgaatctctttctcttctaaacacaagttgtgatgcaatcattgctgctaaatccactccaatctttctccaagaaccttgatcttgtggtcccagtcaccccaaaactgcttcttccaactttacaacgcttttctcgtattatccatgtttctaattatgttcatagaaggctcaaaattattcacacaccacgccaattccaccaccactttacatgattctaggttggtccatgcgtcaaaaaactggaagggaataaaccctttacttctgaacatctgggagtctaaaagaatgggcgcatgatccgaaacagttattggaaaattatgaaccccaactttaggacacatattaaatccaatcaggggaggcaatggccctgctaagtagtgggcatcatccaatccaatccaattgaaccgaaccaatccaatctaatccaattacaaaaagttggatatctaattacaattggat

SEQ ID NO: 71045 - DNA, 602 bp, Cannabis sativa
aatattgttcttatataaatgtttttggtaaattgtcttgtgtacgtagggacaattcaaaattgctcgcttttatggcacaattgatcgaggtgttgtgatcggggttttacgtcgtcgttttgatgaccatattgatgaatataatggggaggttattggaacgctcattgctgcagcgacaacctacgtccatgtaaaatggtgatatagacaacattgtagattactcctaattaaagctaagagtttccacaagtagtttctcatgtatattttacttgtggtttgagcctgtcttgtttctttatcgttcatttttcttttaatgtctgtactggattgatgtatttgcagctaattccttcaaacataaaagtttagccttcattcttcactttatcatgctttctattttatgttactagacagagtagtggaacatatatataaattgctttttctattaatatatttgaattttaacacatatttgagattatgaatttgccaccatatatcaagctttactcattcatgtgaataagattctgaaatatgtttattatatatacggtagagaaattatcataaaaatacag

SEQ ID NO: 71046 - DNA, 750 bp, Cannabis sativa
aattaacaacactacatacataattatatcataatgagttttatattttaattatatattattaatatatataatatttcttaataataatcttctattttggaccaccgaatacttaaaatataaaataaggttaattaagaggagcaccaatcaaatgaagatcttagcaacgtgaacacaaatttcaataacaaaacagattggactacttatataaatataatatacatatttaattaaatagtattatttagcattaattttagataatgctgatgtagattaattaaaatataataccatttaatatagtaacatacttgattacggaactcatgatgtttgtcttgtcttattctaatattataattaagtaatattattatataaattagggactttttcacttttatattttaatatatatatttttttatattttatgaaatttcacataaattttttataattttttttataattaacggagcaacttaaatcacaattaaaattcatataacaacttacatgaaaattaccgaaataactcaactcgtaaatttaaaaaaaaaattaagaaataatatataaaatactttcccaataaactaaactatgtatctaatagaatttaagggtttatgcattatagtttttaatttcttaaaaatatatagtctattccatgttgccttacatatccactaacaatccttattttacttataatattattatattccctta

SEQ ID NO: 71047 - DNA, 1099 bp, Cannabis sativa
tactaaagcggtcattacattttagttttataattaacatttttttgggcctaaattgaattaatttgtaaattttttaattaaaacaaataataattcaactataaatgaacagttttagaaccaaaattaaataaaagtataaaaaattcaacttaaaaccaaaactaaattataaataacttaaatatgtacctacggagatttaaagaatcaagtgcagataaccaactccaataacacaaataaaatagtaccctatttcacttttctcaaaacatataaatgaaaaaaaaaaaaaaaaaaaaaactagtacaaaactcaatcataaacccacaaaagaaaaaaaaaaaaaagtctaatccatatccattctataatatacaatatggaccatattaaaaaaaagtctcaaaatccaaaatatagctattaatcaacaaatattaataactcaaatcttaatctactccatatccaatctatacaacatggaattatggatcatatcaaaaaaagtcgcaaagtccaaaatatagttattgatcaaaaaagtattagtcatccaaatctaatccatattcaattcatacaatatggaccatatcacaaaaagtctcaaaataaaaaatataactattgatcaaaaaagtattaatcatccaaatctaacctatatccatgtggatcatatcaaaaagttctaaagtccaaaatataaatattcaaacttcaaaccaaaagttcaaagtccaaaatataaatattccaacttcagaaccaaaagtatcacaataatccatcttcatatctaaagtgtaaactaaagtttaaaaatataactattcaaaagtatttacttcccttcccttgtgtatattgtgttcttctctttgtgtatcctttgctttgcttggtgtaatctatcattcttttattttaaatgttcattgtctaattcagcaaactccaaagtcctccaagtgcaaatctttcaatattttaaattaaaaaagacaaagtagtaaatgaaatcaataaattaaatataataaagtataataataaaccttctcaatccaaggttgtgtcttgttg

SEQ ID NO: 71048 - DNA, 775 bp, Cannabis sativa
tgaactgttacgtgcttatgctgagaattaattttgggaagggcaacattcttcttttgagtagtgactcaattttgtattttgaatagaatagtactcaaatattatgaaaccaactagctcatgataggatgcattgtttaatttggatcaagctggctcatagattacttctaccaattaggcaattagtccattttgaccactgagtactacacaacatatatatggtccggaaaaaaaaattgatatgaaattcatgtcgtcttcaacaccacacacacatgcacacatatatataatgtacacgtatacgaatgcaaggggatctcacaagtcacactactaaaaaaaagggaaaattacactgaaaaaattatatgagtttatttatttaatgaggtgaataaataatactataaagttatgattttttttatttatttttctttttacatttataagagaattttaatgtcatatatttataaaaaaaatatagaaattttatatttgtaaaacaataataagttttgtcagaaaagtcgctggcgatgaaaagtcaccagtatcgaaaaagttatcggaaaagttagcgtctcttaaaaagtcaccaaaaaattcattgtcattagaaaagtcaatgttgctagaaaagtcactggaaaagtcaccaaaagtaaatgtctcagatctaaacaaaaatagaactcatctataacaaaatgaataaaaataaataacacaaaataactcaaacaggttataattaaaa

SEQ ID NO: 71049 - DNA, 906 bp, Cannabis sativa
tcaaaccctgttttgtgtatattttttttgaatcttgtaggtttccaaaacactacaccaaagtgaagttacttagtgaccaaattagtaacaaaaattaaattaatggaaaaatgattaaacttacgttgtgataattttctaatttcattctgaattggcatattctttgcgtcaaggaatgccactgactgagtagcagcctaaatagtcataacattagttccgactcatcccaacttgcacacatccaagacatcttccttgcctatccaacactcatggttaggtccaaacaagacaggtttaagctcatgttgtacagttttcttcttataccatttttgcacaatccctgaaagcgctgtcgttaacaatgtctttttagatggagtgtagcgtgattcatgaaatgtcactggcctctttgggtgtatcaacggctgactacggatgaatattttaaatattcaaactcttctaaataaatttttattaaagatttagcaaattaccttatccaataaagcttcttgaatatgatttatcttcaaagggaatgactacccaaattaaaatagtcaatacctataacattttaatttagaataagcaaaaaaaatctcccattaaaactatctgtcaatattattttgtggaataaaaaaaggaaagatttatcaaagtgacaaattaatttaaaaagtaattgatatgtattctatataagggcaaattaaattagagatgaactgagagaaattaaaaccaagtgtaatataatcatgtaaaatcatgcatagcatatcaatgacaaaaatatatatcatcaatatatatatatatataaaggaaagcattagggagttgaggtggcaatctatatgtgttttctatcctattctt

SEQ ID NO: 71050 - DNA, 905 bp, Cannabis sativa
  modified_base (872)..(880): a, c, t, g, unknown or other
ggtgatgtcttcccatttccactcttgaatctttagtggctaaagaaaacccccgaatctctgatgctctgccttgatttgttgacaagttaagcatttcgacacgtactcagcaatgtcactcttcatacctggccacaaatacagggtcttcacatcatgatacatgttagttgttcccgggtgtaaagagtattgtgtggtatgagagtcatcaagaatctaatgtttgatatatttgtcgatcggtacactaatcctactcttgtatcgtaataacccattagatgacagtgaaaagtcttttaccaatctgatttctaatttctctttgtacccttgtagcttggaatcactttgctgggccattctaattctttcttgcaaatcaaactgcatggtgatgttagcaagttttctaaccacaaactcaatgcccgctctagtcatatcctcagccaactctgctaaaatcttctttaattcataaacttgctctctctttttgacatagagcatccgctaccacatttgcttttctaaggtggtagacaatctcacagtcataatctttgaccagttctaaccatcgtcgttgcctcatatttaaatccttcttagtgaaaaattatttgaggctcttgtgatcggtatagatcttgcactttttgccatataaataatgacaccaaacttttagtgcaaaaatgactgttgcaagttcaatatcatgagtaggataccgctgctcatactctttaagatgccaggatgcataagtaataacttttccaaactgtatgatgacacagcctatcccctatttggatgcatcacaataaatcacgaagtttgttgggttttatgccctnnnnnnnnntccatttcaatgtaatccattttat

SEQ ID NO: 71051 - DNA, 1184 bp, Cannabis sativa
taattgggtttctttcaaaacaggtacccttttgatccatatgatagaatatgggattctgatatgaactatacaccatttcatgtgtcagctgggtttaagattcaacatagtttcaatgtgtctgaaagtcttaaggagagtcctccacctgccattcttcaaactgccagagtcttggctagaagagatgttttgacttacaacttgtctcttgatactcttggtgactgttacatcatcctatattttgctgggattcttcctgtgtttccttcttttgatgttttaatcaatggggaggttgtacagtcaaactatactgttaaaacttcagaagttagtgctttacatgttacaagaaaaggactaaaaagcttgaatatcacacttaagactgcaagcttctatcctcaagtcaatgcaattgaagcatatgagatccttgatattccattagaagcttcatcaaccacaggtaattgtaaacaatttaatctgctgcatacttgtagactattaggacttaggatccacattgaccaagtatgagattggttagtagtagtacataactactctaatgctagcttttgggagttagttctacccaagctgttgtaccaagtggtatcagagtcatccactctcaagtgggactgacgtcgcggatggggtgatatgtgaattaggcccaggccacccccctccaaaaggggatgtatccaagtatgagattggtttgtagtatataactatttgagtacccttttcttttaggcgagttctacccaagtggttgtatcatatccttgatgagatgattaacatatttaatacttggttaacttgttttctacaatctttttcagtttctgctcttggggttattcaacagtctactggtttagaacttggatgggaggatgatccatgttctcctatatcatgggatcatgttgaatgtgaaggaagccttgtcacatcattgtataaaacctttttgagttctttttttttttaatctctttcatcttgggttttgaacttaatgttctttctcttgttagggagcttccaaatatcaatctgaggtcaattagtccaacgtttggtgacttactggatcttaagaaattgtaagtcagagatttgaccattcttctgtgataataacaaacatt

SEQ ID NO: 71052 - DNA, 1246 bp, Cannabis sativa
cagtgttctgcaaaacatatctgaaagtattgttgctcttgttactaaagaaggtatgctcctttctatgtgaccttcaaatttatcttagcagtttaattaagctctttgaatatctacctacctctcgtatatcttctttgactgaatataaggtttgttctctgtatctaacttctctgatttgaaggtgtagtggtcatctcccaagataaataagcataattgattgctctagtcgacgtgatgcgtatcttattagcacctgtagtcatttgtattttgaatatcatcttctattagactccctatttatattgttaactccttatatgtgaaagtttatttggagtcagtaggcagtaaatcatagattcatcttatgtgccaaccaagctgttttctttttttatcatcaggagctcatcacattgatttacgcgcttcaaccgatgaagatccagaatggttagtagagcagagaacaactgaaatcaagctcataaaaagctggataaatgactactatcgacaaaaaagagctgtttttgagatttaagttaatacttatagcacaaacttttgctcaaggccactatgtatattttgcccttttcctcggttttattgtatttgctcaacatcacaaagttggggcctgtataccctgtgatattactggatagttattaaatgccgacacttttatcagtaatttagactattagtaagtgtttttattttgccactgtttgtagtgtctagaatcaatatcttttttcttttcttgtctctatctagagtttcaattctgttttatcttttcattgttagacatctaactattattcacaagtaactttgaaattcaacttaccttcaacgatcgaattcgggatgcaatactcggtgtatctccatttggtcgtcctcttcagcaaggatttgtgacttactgttgcaggtaaattttaagaaagtgtagctgtcatcatatttctttattacttgcaccagtatcacaaccaatttaaaagagaaagatcagattcttaagttgccagcttctttaagtggtggtgttttggtaattttcatactagagtttgcagcaatctatctaatcatgtttactttgagctatgtatcataattattactggtagatgaccaaagttttggataacgaagttttattttacaaattggtgttgtttgaaatgttattaatataactatggtagat

SEQ ID NO: 71053 - DNA, 3319 bp, Cannabis sativa
tagttacttaattaaagaaaatatcaaaaaatacctcttttcacactatatcaaaaatatatttatatgaaaaatatttaagttaaagttaactttctttatcacttttttaccgaaagactttttttttattattttttgtttcagctgatgaattaattctagcccatgtaatgtaaaaatgagaaacttttctaattaaatacaaaaattaatcataaaaaactcaaaattttctaatattacttattcatgggtaatacccattaaaagtgcacccgtatatatatatatatattcttaaattaaaaatttcatcatattcttaaagcgtaaatactagtgaaaaaagtgaacatcatgtcttgatcattacacacaaattcactatatgttaaaagaatgagctaactcatttgtaaaaaagctaacacattagtctttctaataaattgtaacattaggggaagaaagaaagtgaaatactcctaattctccatttggaaaaaacatatttctcttaattctattaattttaactttagaataaaacttaatagtaagaaaataatagtaagtgaaactaccctagcttccactattcctatagttaaaaacttgtagaagatcacgccaaaaaaaaaaacaaaaaaaacttgtagaagatatcaagagacgaccaacgatctccttgcgtgatttcgaacgaatacaccaattctcaatttccccaaaacaattgtttagtattttttattttgacttacattaatttttattggttttactaaaatttgagtttattagataattttttattgtgttagtcatattgtttgtgatctatagttaatgagtaacttttatgtgtgtaaagtctagttgacatagaattgtgagttttactagttaattaaagcctttgatgtgcaggtttagtccaaattatgtagctaattgccacaggttattgcttctcagatagatgaggatcaaatggatgaggaagggtctgaggttttggtggttgcagattctaaatggaagcatgctaagggggtttctagtgtggactctaatgtggataagaatatagtttttagtgagaccattgatgtggatatgtgaggaagcagtacggatttgatggctctaaaaaacgagttattagttggttctactggtcagaccctccctacaacatgagtgtcctcaattggaactatcgtgggcttgacaaccgacataatgttcatttccttaaagatgatgttcgtcatatgaagcttgtttttatttttctttttaaaactttatgcaagaaagataaaatggaatggattcatagacaattagagcttgaaggaatgtttgtggtggagctgagaggtaggagtgggggtgtagcaatgttgtagagtgaggaagatcagacaaacttaattggtttttctcaaaaccatattgatgttattacaaaggttgatggtatggaggcttggaggttaactgggctttatggttagcctgatagagcacaacgtgggaagacttgggattatcttcagactttggtgcataatactagcttgccttggcgtgtgtgattgtagacttgaataatatggtggatcaggtagataagtggggaagagcaccgtatcttgggtggatggtggacgggtttaataaaggtcttgaagatgtggggttgagagatatggaattgtttaatcatctggttacttaggagtgtagtagaaatacttttgagtttatggaaattcatattgatcaggctttagctacgttagcttgactttctttgtttgatatggcaagacttataatttgtaagactcatcttcagatatagtcccattttgtaagaaccaaaaagattttgcatcgtcagtaaatgggaggcagtttaaatttgagaatgcttggttggtagagttaatgtgttttcaactagtcaaggagagttgggaaggaagttctttgatgaatattcagcagaaggtgcgggtgtgtggtgataagctatgagtttgggggagagatattacaatgaagtttggggaaatgataaaatcttgtaaagtcgaacttaaaaagcttcgcaataagaacgatttgattttgagccaacgattctagttaattcagaagaaactatttactattcttgatcagaagaagatttatcagcgttagtggtcaaagcaattgtggctacaatccgaagatcaaaataaaaaaaatccatgcgaaagcaagttctcagcatcgtaccaatcacattcataagctgaaaactgatcaaggtgattgggtggagtgggacaacaaccttcatgagttggttgtaaaatatttttctaatttattttaggcttctaatgctaactagagcgaggtggttcagtgtgttctgagtactgtttcggctactcagaattcggagttgctcaagcctgtgttgaaagaagaagtgaagcatgctttgttctaaatgcaccaagacaagagcccaatatcggatggtatgactcctatttttccaaaaacattggtagatagttgtccatgatatggtaagtatggttcaggatttttttaattgtgatgttctcctagagggtattaatgaaactaatgtggttctcattctcaagaagaagaacccttctgtgatgggggacttgcaacctatttcattatgcgatgtgttggtcaaagtgattgctaaggtgattgctaatagaatgaaagggttattggatgttgtcgtgtttgatactcaaaatgcatttatttcgggtcatctaatcttcgacaatatcatggtctcttttgaagtcattgttgtgctaaatttatatacgcaagtgcacgtagtcacaaacaagtaatacaatgataagtaacgagtatcgtgtccacaagaactgtaaaaataaaatttctattacaaaagttaattaccaagcaaaatgcctaaaaaccaaattggaatgatgaatgctttaactaaataaactagaaagaaagtaaattaaatcaaaagtggttgcacaatgaaaataaaatgaactgtaaactgttaaaatgtgaaaggcctgaactattgaatccccctatgtttaggagaaactgtgcgttttgctgcagcaaaacgttagcaaaaccttagaaaaaatctcaggttaacaagaactccattaaagtgcacaaaactcttccaaattttatgcaatcaatccttggacctgttcaaacatattcctatgccaagcaagctcaagaataccat

SEQ ID NO: 71054 - DNA, 1317 bp, Cannabis sativa
gtaatagcgtcattttcatcaaaaccatacatactgggtccacaatccaaatcagttgtattaaaatcacctaagatgcactattcaaccaaaagggaaaatagatattgggtggtcctaactcctaatcttgggattttaacacttcaaaagctcttaactgcgatttagtattgaaataaagatgtggaccttatatatggaacatcataacaatcgtgttatagcagttaagtatacacctatctatattgctttaattattgacaagaaaaatacataataaattagaagcaacgtttatgaacagtgtattgaagataaaatattgcaaatagattgtgccagttgtcttcacatttctatccactaaaaaaagaaattgtttaattactcaagttgtattataaaacaaatacacctatccaccttactcttttctttttcttcttcttattcagggtatttttttttttaaaaaaaaaaaaagaaaaacaattgctaatcatttcctcattgagcttgagaccgacatggaaactcaatttattgggtaattatgattttatttaagtcatctcttattttggtgaaatggaaggagaatatagatgatgtagtcttaataaaggacggagaatataagacaaagaaagaaaaaaaaaataacacttctaatttgtttggtaggagagatagaataatgaaagcatagataattatttatttatgaaattattatatgttattcttataattatattttaataatatttgttgaaggtgtgtatttttcataatttataataattgaagatggaagaattcttaatgggaggtgtgaataattttattattttttcacttttcctttctctcttttaatcccttgagatttgtcatcatctccattcattatatttttttaggggacctatgaaggggcaaggggtcaattgacccctcaattttatgtggtacattatattttttagttgatataatttgggtattttaatccaaactattatttataacagggtcattacactaaattttatgaaacttttcaaaaaaaaaaatatgaatagtttacattgtcaattttagattttgaacaacatttttcacgtgggtaaaaagaaataaggacaaaagtaataaattatttactttattttttgcacataaaatattaaaaaaaataaaaagtacataaattttactaaaatactataatgaataccatcataaaaaattaaaatgaaaatacttaaataatgcaaatatttatagaaatttgtactagacatagat

SEQ ID NO: 71055 - DNA, 755 bp, Cannabis sativa
gcccttcttttgcccacacaccttaactttacaatgaaccaattgagaagattcatagagaacttccacattcacatacttgtcctgccaaactaataatatccttccagaaatcacattactagagtaagcattccaattaggaaaattattagacatcatatcttgaactttatcatgtttcactttagtctcaaagaatgcacctagacagattttattcaacctacaaacatcaagaatagcattttgcttttcttttttattcatgcccctcacattccaccctaaaatgttatttgcctccatcaagaggtttcttagtagtgggaaccataatctcatcactttccgtagcttgtagaacagcataaccattgcttgaattaacctcttttgccacttttacctcagtatttctcatagcttttttcttaggagttagccatttactacttgcttcagcattatccatattaccctctttgttccccttctgatcttctttttccatctgggcagctactgaatttttttctgaagtgttccctgtgtccccatgatcatttccttgctctttaggagcagttttatcagccactgatttcttcttccacactaccttcttttccttgttacaatggacaaccatatgccccaagccagcacaagctgcacaagtggttgggagccattcatactctatagtttgttccaccagttgccttttctcattgataaatgaaatagttttt

SEQ ID NO: 71056 - DNA, 1889 bp, Cannabis sativa
ttaataatattttcatccaaatacaacttttacagtagtcatcaaattgtattcaattttattattaaatgaataaaatagtaaatgataattgataaataaatacaaattaaacatcattcattctttttataatagaataaaagattttttattttatttttagttttctaatcattaaaataaagatagtgaaagatatttaatttacatttatttattgattgttattaatcattttacttgttttataataaaattaaataaaatataataaaaataattatattattgtgaaaattatattttaaggaatattattaacgaaatttatactgtaagcggcataataaataaaaagtttaggggatacactcccttgacttaaattgttggtctaccacatgtgtataacactacttaataataaacccaatagcgataactgtaatctataattgatgataataactataggcaataataattactttatttcaaaagcaaaatctttttaaaaaatgttataatagttgaaaatgcccattccttatacactatccttgcatgtctttctaaaattacgccgcctattattttaaaaatatctcaagttaataatatacacattataataaagtgccctattttattaaaagttattattatgatacaatataaaaaagtgacagcctataccttcagaaataaaattttcatcatttctaatgaaagatataaagattatataaaattaattggtccaaaaaatcaataaataatatggttgactcaaacttttgcatgttctaataatacagtaaaacttgatgcaaaagttaatgaattatgctcattaaatatgtattagcaatataattaatcttttcttaatttgacataatatgtctatacttgagtaattaaataaaagtttgtaatacggctcaaaatatatatatatatatatatatatacacatcatgatatattttatgataaagtatgtgctaaatttgacagtttttaacactatattgcagtaaacttttgtgaaagaagctacatatattttggtactgcaatggagatactcttagaaacttataattttattaaataagaaaagcaatacttacacaaaaaataaataaactaagacatacctgcatagctttctccagcaatatagaactcatgggactgaaattgaggaaatcttttaaaccagttgactaggaaattgtaagagtccttggctacgtacaaacatatatatagtaaaaatgtgtattaataagacttcagaattaattgggatgttttccttataagtacaaattattttaattacgatatacatttggaaaattattaatttggatgttctgaacataattaataaaaattaccggtgactgtatccccaagtttatcaatgtcactgctggtattggtgtaagaaaacccaactccaacaggagattccaggaacagcaaattggcagcttcgcataataaataatgtaataattaattacttataaaatggttctttttagagaaataaagatatagaatcattaattaataataaaattaagaacattaaaatgaaactactctataattgataccattattccatgtgtaagggttgaactttagcttaggtttgctgcctttttgaggaaagaaaggccctacttcttctgctgctccaaatccaatagatgaacatccaggtcctgtaaatacgtgataaatattattattataattatagtataaatgtataacaagcaatatatattgcctgttaattatataaatgtacgacaaattcatgaagtatctatatataactagtattttattatagcttgtta

SEQ ID NO: 71057 - DNA, 782 bp, Cannabis sativa
agaaactatttaccaatcgaaggatttggggggtcttggcttctgtgacttctgcttatttaatcaagctttatactgcaagctccagagtcacttccgacaagaattttgaagcataagtacctcccacgatgttcccttcttaaagcttcagacaaagatgaatcatctcatctctggactagtctagtttgggggttagagctactaagaagggtccaagaaggtccaatggtgattgcttgcatgtcaaggcattccatgattcatgattgccgcgaccaatatcctttaaacatgttacttagagaatcaacgatgaaagttaggtgagtgagttcattcttcaaaatggtgtatgggatgttggtaagcttcaaaacatgtttatccctatggatgttgagattattctttctatttcgttagctagggggttgtaggtgatggttggtgtcggcattttgattgtgatggagttgtaaaaagtcgctattcactggcatggtcactgcggtttgaggagggagtggttgattcaattaaaattgttcgatggtggaatggggttcggaagcttaaagtgtcgccaaatgttaaggtcttcatttgtcgtatgtttcataattaggcgctaacagtggctactgaacttgtgtctcagagtgttcaggtgccgacagtgtgtttgagatgtggtgaggattcgaaaactccaaaacatgtgctggtgttctgttttgtcttagttccaatgtgggttaattgagaggtttggccat

SEQ ID NO: 71058 - DNA, 1872 bp, Cannabis sativa
attaaaattattaattttctagtagttcttactatgttcatttgaattggagattaacatttttcatatttttttatgcttcaatgctcacagcttataagtattttagttgaaacttgaaagtattattaagattttcattcccatttttttgtctattttaataatttttctctgagtgatatattaaaattttacttttatgattacaaataaaattaataaataatttaattaatgtagaacttttataaaattgttttaacagaattaaaatttattctattaaaaactaaattaataatagctatagatcgaaattatactgtagaaagtaataaattgtagaaaataaaatgatacatgatattttgtacgtagtatcaacaatccttataaattactactagtacacgacgctacgctcagagataagattcatcagtcaaattttaacaagtacaaagtaattaacttaaacaaaacatagacatactctaatgattttgccgcaagcttaatgtgctcctattttgctaaatgattctccttaagacaccaaagttcgaactcccttcaaattacttattgaatatttgcttcttcccgatgtaagacttgtagatatcttctcacgaaggtagcgatacttgcttcctcccgatacaagacttgtaaaaatcttctctcgaagatagcggtgcttgcttcttccggaagtaagacttgtagaaatattctcccgaaaatagcggcgcttgcttcctcccaaagcaagactttgatgaaccttctcctgaaggttgttctttatgttcttcacttcggaagttacttcacataaaagtaattacaaagacacacaaactcactaaggaatagcaaaacaactatctattacaaaaaagaaatactctcttctaaaaatatatgaaattaagaagtagaagagttttaacttttgttgttgatttatgtggtatttatagggatagatgacacacttgaaatcgaacctcaaatatttgaatacaaagagaaaatattaattagtttttttacaaaaattcatttacaaaaaatcattaaatgacgaaattctatttgatcatatatgaaaagtttgtagacaaaatcatgatctgtctagtcagcattataaatctagattccatcaaagctaaatttattactactaatttttcttcgacatcacacaacttagctggagagattaatataaatcatatcagaaaaagaataaaataaatcaattacaaagaaatactatatatagatatagtacagtatttattatataataaaatgttttattcttttcatataaaatcagaacaatatattctcaattaatacattacatatgcgatttacaaataagaaaacaatcaaacaataaataaaaaatattcttaaaaaaaaaaattcaaacagaatattaattcgttcaaagagatttattgtacctggacaaatttttaaccaaatatccttttataaataagaaaacaaaatatactttaaacataaaaacccatcatgataattaaaataaggaaattcaatatttattaaaccaataaacacaatttgattttgaaaaaaaaaaaaaactttcacaccaaaaatctcaaccgtattttaaaaataccacatatagttaattttattatctttactaaatatactaactaattatttatctgattaataaaatttttattttttctgtcaaataaatttataaattatatcattattatttgtttgtgatgtggactacgtgtattaatatatcaaaccaatgatataaagggataagttgaaaaatacctattttttatatttatt

SEQ ID NO: 71059 - DNA, 1343 bp, Cannabis sativa
  modified_base (58)..(60): a, c, t, g, unknown or other
agtgcttagtttaatggtaaagcttttaaaaactcttaagagctccaaggttcaatcnnncataactacacattaactattttttaaaaaaattaaaatgtaaaagttgtgaattgatcccatgacctcttagagagaagttaaactttttaccactataccaaacaatttttaatttattttttttttatttaatattttatgtatatattagtatttttttttttcacaatcacaatttcatttcggggcctgagcgttcgggggcggggcccaaggcgccaaggcgcacaggcgcacgcctagcctgcctaccctcagggccggccctggttctaccgtgtatttttccaattagttaaatattaaaatatatattttaatataaaaacaaccttatttacatgtgtttacatatgcaaaggacacatcacatcgggatataattcaagccactagactccagctgaatagcacttctctaaaaaaatttaggtgatgatttggagagattagtgactgttttcattctactaccatctcttaatccaaatagctacactacataaatgagtatagtctaaaataatgcaattaattggttgataattaacgtactaattaatatattatattgattatataaattacacatacaaactactatgtgaaaaaaaaaaaaaaattcaaccaattatgttttatctaattattaaaagtggacttataccatatcaaatttttatatatagtatttattcacataaattactcacaaatataacataaaaaaaaaatttcctatttgtaagaattgaaaatgagtgattattgacctgtctgtgatatgtgctggaaaacatttaaagaacatatcgtaattgtcctcatcatggcatataatgatacgtcatcataatataactatctataattatcataaccacgtggaaatattaaggcttatatatacagccaaaggtcactagatgtattaacgttggtagagttatgacttatttaaatatcaatcatgtagttgtgtcttaaaaaatttagtagatatatatttacatattttttggaaattattttacggcaatgataataatataaaatgttaacgaaagtgttacatgaataaacatacaaaattaatgttataacattctctcccttgttgttaataagcataagcttagttttctttttgttatggagtctaagttgttagttggacattgtgatatttttagaactagactaatgcttttgaagtacttaagaatggtcttagtggtggtcttttgttgttttggaaaaaagatgttaatgttactatt

SEQ ID NO: 71060 - DNA, 1082 bp, Cannabis sativa
  modified_base (1016)..(1057): a, c, t, g, unknown or other
gtcccaccaacacttggggtccctcggggctcttgaagaaattccattgtgccctcggctcggagatccttttgaaccatctcagtgtaggttgttgtgtcatttgttgtaataactagatcgtgtctaatcttggcattcaaacccgccaagtatttttcctccttgttgaagtctgtgggcacaataccttaagtaagcttagtaagtcagtcaaacttaattgtatattctatcactgacatggtgtctccttgaatcagttcagtaaactcttttctcttagcacagcaaacagcctcattataatatttggcacttaatgaatcccaaaattcttcccaggtcatagtagtgacgtcttgggtgagggataccatctttcaccacacgagtgtgtcttcctagaattggaatataacacaggtcactcgatcatttatagtgacactcataaaattcaaaattctttaaattacagccaaccactgttcagccatcatgacatctggaccttcgaaaaaaattggaggcgtctacttgtgaaaccttccatacaaaggccccatatgtttgcctattctttcaatggaagacttgggttgataccccaaaattaactacactgtgcttaaaacatataaactacaaaggcttattaattttatttgttttaataataaacatactttggtttagaccctctaaagccaacaatggagacctccttcgcagccaaagaacgagcttgggaaatgacattttagggtaaataatgaaaatgagaatgaagagacagaatgttaaaacccaaataattgagctcaaacatgtcacatgttgtcacaatatcaactttgtcgcctatacatgcactctcgatactcgcaatgacttgtattcgtcaccgttcaaccgttgttttggaatcttgtaaacacattatgtgtcactagaactgttggaattattttaccaggatcatagatttataacaagtatgttatttaacatcnnnnnnnnnnnnnnnnnnnnnnnnnnnnnnnnnnnnnnnnnnaagtataagaaaccttacagtggtt

SEQ ID NO: 71061 - DNA, 1161 bp, Cannabis sativa
tctcaaaatcaaatttacctcccaaaggttaagattgcttactgatatatggaacatgttcactaagtcctagatgttgtgctgtaaggtttgaacctcatggcgttttcgttgcaccacaaacactgcattggttgaatcactatggaaaatcacgttcttgtagccttgcttatacacttcctctaaaccccaacaaagagcagctacttcacctgctagaggatcacaatgacaaattcgagaagtaataatttttgtgacaacctcttcctcattcctgaacacagcctcccctgtcgactgagcttccccgattgctacatcagtgttgcacataatccagcctgcaggaggtgggagccatttagacagcatagtagtagctggcaattgaatctcagcaagttcaagaagccttccatttatgtgattcaaattaacagttaaatgtgttgatttttcattgtggataatacaatttctctcctttcaaatgatttcgaaaataatggcagcaccccccaagaaaagatggtgatgaatagtgttaggtctatgctcctccttcatgaaccaattcagccaattaacccaatcagatatgttagcatcactagttatgatctgctaagaacaaccgaacaaaatagctctagtaaaaggacagtcccaaaagagatggaaggagctttccattgccaaagagcaaagaagacaactaatgtcggttatgctgaggatggatctaagtttttctcttgtgagcaggctgttggaaaggattttctactcttaagcatattatggattttagctccccaaatgattttctagtactctcccttaagttaactctgtaggccgatttaatagtaaagtcacattgggttttggtaaccaaagccaagagtcctctaaaggccgcttaggaagggtaatattgagtatcctcttggcatcctcattgtgaaaccaacacctaattaactcttcattccacctattttgaatgatgaaattgctagactaatcccagcagaggcttgtaggcgaggcgttggttggagagtaccccctaggacccaaggattgaagcaaatagaagtggcacctctattacctattttgcggcatagacccttatgaagatagcttcga

SEQ ID NO: 71062 - DNA, 1307 bp, Cannabis sativa
ttatagtatatatatagcatcaagacaaaccccattataatttaaagacctagctaaataggtgttggaggaaagtatatatatattattgattattataattttgctttaaaatagtgaattatgagtatatgaatatatatgtttattaaaaatatatgtcatcactcatcataacacactctgaaattgacaaaattttttattatagtaaattaagttcatacatgtcgaacaccaaccactaattatccatagaagggtcccaaaataaatatattatatataaaataaattgtgtatgaaaaagggttaattgtttaattaatatatattaattaattatgtgtttgcgcgtggacttaaattttttacatctaacgcacgagctgatgcgttatgactatcctaatttcttgctatttatactttgttttattgattaattgacctttaaatttttagactcaattcttacaatatttatttattaatgccaaattatatgtttcttttaatatataatatagggttgtttttgtaaattttttatttgtttcgacattaagaagagttttttctatgcatatatatgtaaattttatttttgagatcgtatattattatgaaatacactataaacttatcctatatctacatctagggatcaaattagaatatgtatatatattatatacacaaattaatacgtaactattatattaattaatttatgaaatatttaattttgaattaattttattaattatgaatatgaacacaacaactctccatgccattttattattgtttcgtgccattttattatttaattaattaataatacactaattattatattaactattaatgttaattaacaaattaataaagatagatgaatcacttactaaaacatccacaaacccgccttgatcacttgctacgagccaaaatatatgtatatatacacgtgtgtttatatatataatgtgagtatatattatattaattaatttcatgcatgagtagcctggtatatttataagaaggcattattatgggtaatatatatatatatattaaagtcacgttgatataataaaaaataattaaggatctatatatgcatggttgcaagaaaatattttttataccaaagaaaataatagctgagaatttgctgtgaaaataatatattttgctactaaatatgaatggaagagaaattagtagctaaaaataaaatatattttgctaataagtaaaagtggtagttaaattggtagttatatacaaatattttg

SEQ ID NO: 71063 - DNA, 909 bp, Cannabis sativa
  modified_base (862)..(875): a, c, t, g, unknown or other
ggtcctgacctctttcaaaaaaatccaaaattttcccgatgtgtatacttacaagtttctcgatttaactttatgggattctttcaaaatgtcacattcggttgtatcatgaactcttaaaagttgttcattatacccatactttcaagctcaaacgtgaagagagggtattagaaaatctcacactgaaaatacatgtgaaacatcatagcttgatatagggattgagttactctacttagcaccaattaattttaaattggaacatcaatcactcacacttcactatgcacaccttgtccatagttcaaagaaggtttatagagagataagtttctaaagtgagatttcggccatcatttttcaacaatggccaaaaaaggaaaaccaaaggaacttgcatcgaccagcgtcttgcattcaaataatgcatgaaatttatgtccaaactgatcgtatctaattaattatcccctctgaattttagagtaatgcacacagacaaaaccaattataccattattgacttctgtgtgagagaacaatcaatcagaaatggaacacaatattgcggtccacaatatatatttattctattttaaaatgattatataacaaaatttttagtttaatgatatttttaattttttatgttaattataacaaaatatactattactttatagaatattttttttattaattttataatattattatatatatatttaaaaataaaaatttttgtagatattttatataaaaaaaattaatttggatttaaaataaatatttttaactttattgattatcaactttaaattaaaataaaaaaaaaattatgtagatattttatatacannnnnnnnnnnnnnaatttaaaatatttaaaatatttttaattttatt

SEQ ID NO: 71064 - DNA, 1480 bp, Cannabis sativa
  modified_base (483)..(487): a, c, t, g, unknown or other
  modified_base (730)..(739): a, c, t, g, unknown or other
agaaacagcggagtttcggctcgcttgaagctgagctcgtttaagctgttgtctttcttttttatgagcgttttgatggccacctagggcttgggaattagcgaattctctacaacagtactgacactcgtatttccggtcaccggagttctgaaatccgttgccggattccggtgaaccagacggcgtcgtttttgctgagtcagctacggcttcttcgtagtcatcttgtacgttgaagccgaataattttaagcgcgtggtggttggagttgggtttttggtaatttggtattctagctccgccattttagagagagaaagtgaagaaactaacaccgaaaaaaatggagagagagagagaaaattttgggttgtaataagggagttggttcatgagttaggggtatttatacacacatgtttaatttttatttattattaataatatttaaaaaagaaaagaaaaagtttttttttttnnnnnaaaaaaaaaaaatataaatagaaatagaaatagagagagatggttgcggacatcccaaggaggaaaaaaaagtgagtgttgtaaatatatgggaacacgacccgagagcactttgggtttgggggcccatgtaaaacccaactactatatatatatgttatatctatctttccaagtgtctaattctatgtaaagacaatcctaatttttagtaaattattattttataattaattagtaatnnnnnnnnnnatttattaaaataaaataattaatatttgatattaagttatattaatattgatattatgtttcacaaggatactaagtattatagtaccttttagtatttctcttattgttgttgttatataagggttaatattattttaaaccttaagttttacaaaaattactgattacactttctgttttataaaataaattaaattttatattttctataatagtaaaaatagtacattaagtttaattttagattatttttttttaatataactaacttgaagataatgtctaacataaacagatacaaaaaatgtatattcagtttcgtcagttaaggacagtcagttaaggacaaggtactattttgtatcattttaaaaatacatagtttaatttgttatttaaaaaaatagaaagtctaaataataatttttataaaatacaatattcaaaacaatatttacccgttatataattattattttttaaataaattataaaattttattaataaaaatcaaataaaatgatagtatgtaatctaattttattaattagcattaataattgttaaatattaataaaattataattttcgtctcaaacattattacatgatttaaatttataattagatttaatttttgaattattgaatgaaattttagaaataagtgatattatatatttttgtccaaattcatgatttagaatcttgtcttacatacaaagatagagctacat

SEQ ID NO: 71065 - DNA, 1883 bp, Cannabis sativa
tggttacagaacgcatttttgtttttcaaaagcaaaatttttaaaaacaaaaattttactttcactttgtaattataaaattagaaaacaaaagtgttaccaaacggcaataattagtatatgaataaatcagggaaatgtgacacaataaataacaatacccttaaccgtaaatactattttaaatcttatattttgtaaaaattattaattaaataatagatcatatattttttaaaatggtaaaaataagatcaaatcctgaggttaatttttaacaattttaatttttaatataatcaactttaagacaatttctaacacgaacagataacaaaatgtatctaattttatcataaaatctctagaccaaattattattaaattttattttgacaaaaaatcagttcatggtcttatttgcacaattttaaaaattaaagtctaattggtaacttttacaaaacatatggtacaaaatagtatttatcctgctcttaatgacatttcttaagaattttagaaaaaaaaaatatcgagaataagaataaaaattattacattttttttagcattgctataagtcaatttaagctgattacatttttttaataaaataaatatggtaaatcactattattctatttctaaaaaatttaataaataatatattgtaaatatttatttcgattattctttattaaataatctaaaatgttttttttagcaatgaaaataatgtaaaatgtagtgttagacgtatatgtttgtagtattttttttgttttgtttgaaatgacatatgtttgtagtatttatgtatccatatatttctattgtaatgtaatcttgaacccgggcattctatactcaaaatgtgatccacttgaaaaaaaaaaataaaaaaaaaccattacaaacaattttattttttcaaggatattaaaaactaaatttaaatacattttagaattcaaaaaaaaatattacatttataatttttagagtaatgatgtacattatctctctcttttttctcatttttttagaataatttctctatttcttattcaaattgaacaataacttttttttctataatttgaaagaaaattttgctaaacatccaaccaaacaaagccacgtgtccaagaaaaatttgacttttttctcactcgtaagacaaaacaaagagtgtgagaaatttctttcaaaatacatttccaattcaaaatccccaaaacaccaaaaccctctctttcttcgactcttccttccatctcttcatcttctccatatatataatccaaattcttcgatttcaatctccaattccatactctctctctcgctctctcactcctctcccatggccgacaaaccgatatttacgaatatgccccaaaacgagaattacgaacaacgcgcaagaagaggagaggaagaagaagaagagtttgaatcggaaggaaacgcgtgcagttgttttggtgtgttcgtgagaagacgacgtcgttctggtggagattacgagcgagagacgaggattaagacatggctggtgaagaaggtgaagaaagtgaaggagttttcggaagtggttgctggacctaagtggaagaactttatcagaaagatcggaggttactgtaatggtaataataagaaacaaaagaatatgaatcggttccagtatgatgctcagagctatgctctcaatttcgacaatggtggcgcgcgctttgatgatgaagaagaaactaatggagagggtgatcgtcttctggatttctctcgtagaaagagagattgcaacctttgctgttttcttcaagtttctcagggaagtatttttctctttctgtgtggaattgaaggtacaa

SEQ ID NO: 71066 - DNA, 3337 bp, Cannabis sativa
cctcctttagagttggtgagccaaatcacaactatggagtaccaaccaccatgtgtctaccgcctctatgccttgatcgaaataattacttcttctggcgctcccaagttcttccaacaatttgagctcataatcttgaaggcattttgctgaatcaagatcctcctcagcaaagaattcgtcaaccacctaaatcgaaagctctggttactaaccctgaattcgttctttggcatcgccttgatcaattactcatgtcttggcttttatcgtctatttctgaatctatgttgggtcatgttattgaattgtgaatcggctcatgacatttggcatacacttgagcttctttttagcacggcatctcgagctcccatgattcatctcatgaatcaacttcagaacacaaagaaaggttctctccccattgatgaaaaccttctgaaaatgaagaaccttgtagatggccttcgagctgttagaaatcaaatcactgaagaacacttgattctttatgttgttgctggtcttggcactgattatgaggtcgtggttgtcaatctcacttcgagagatcacctgacttttcaagaagtcaagttgttactacagaaccaggagatgtgaattgaagccaatactgcttcataaattgttgacttctcaggtgcctctgctaactttgcttagtccaagaagcctccaaatcccaacaacaattgcactcgtggggcttcaaatggttacagaggtagaggcagaaattcaagtggtggccgaggcaacaatggaggcaggggttcctattctcaaaatcgagtcatctatcagttatttggtcgccctgcacaaactgttcaaaaatgctatagaaggtttgacattagtttcaatggatcagatgactccaatactaacgtcccctcctctaactccaatccacaagctcttgttgcctctcaatcatcccaagatgatactacctggtactttgacagtggagcatccaaacatgtaacttcagactcttccaatctgcaacaacaagctcccaacaaaggtaaataaaaactggttgtaggtaattggctcctctcttttcattaaaaatattggttctagttctatagcagctagtaaacgtctctatctcaaaaacatattgcatgttccttctattcaaaagaatcttattagcatctcaaaattcactcattataatgatgttagtattgactttaaatctgattgttgttgtgttaagaacaatcaatccaagatccctcttcttcagggaacaattaaagatggcctctacaagctgtccacgtctattgctcctaaagaattcaagcacttattagctgtcaatcccactttctcggcatatcaatgtcaaaccagtgacaattctactattttctctcataccagaaataatacttgtaataaaaatagtttccttataacattgtggcaccaaagattgggccaccactctcaacatgttatgaataaagttttgaattccttaaacatatctcctacatcaatcaatgcgtgtcatgcctgccaatatggtaaactgcatcaatttactttcttgtcttcactacacaaaactacttccccttttgaaatcattcacacagacctatggggtcctttccttcatcccactagtgaagatttcaaatattacatatgtttcattgatgattttacaaagtacacatggatttttcccctcaaatccaaatttgacacagccacaacttttttacaatttaatgcctatgttgaaagaaacttttccaccaaaataaagagtgttcaatcggattggggggagagttcagactcttagcctccattcttgcaaaattaggcataatctttagacatccttgtctacacactcaccaacaacaaggaagagctgaaagaaacacagacgtgtgactgaaatgggtttcacccttcttgcttaagccaaaattcccctttaaccattggtgggatgcctttgtctcagccacatttctaataaataggctgcctattcaaacgaacaaatatatctctccttttgaaagcttgctcaatagaacccctgactacacttttttaaaagtgtttggttgtccttgcttcccttttctcagaccttacaacaaacacaaattcaatttcaagacttctatgtgtgttttccttgtctaaattccatttcacaaaggttataggtgtctccatccttcagggagaatttatatagctagaagtgttacttttgttgaaaatatatttccctacaattccttgtttccctatgttgcctctgtgcaaaaaccagcatctccactcactactctacccttccccgagttgaacctgactcctataaacctagtcaacactactcttactagaaccaatatccctccaatacatcagactgaaaccaagtccatatgcatcaatttccctacctccccagcccctgttgtgtctccaatatcacaccacaacaataataacctccaatcttcatttcagtctgagcaagcaactcaacaaccaacttctgcccccattaatatccagcagccccccaacaattctctcttcatccaatgcaaacaaggtcaaaatcaagtattcgtaaacccaagattctagctactactataaatatttctaaccaattttttactaagccaaaatctatcaaaaaggatcttgcagatcctcaatggaatagtgccatgatcactgaatttagagctctcatcaagaacaagagttgggttcttgttccctacaatctagaaatgaatgtgcttgacaacaagtgggtactccgaatcaagtatagggctgatgggtttgtggaaaggttgaaggctcgtcttgttgcaaaggggttccaacagacacctggagtagattattttgacacctttagccctgtggttaaaccctctactctcagaattatgttcaccattgctgtcacttataactgggacatacaacaatgtgacataaacaatgcttttttgaatggagatctaaatgagacagtttatatgcagcaaccaaaaggctttgaccccacacatgtgtgcaaactacaaaaagccttgtatgggctaaagcaagccccaagggcctggtatgaaaaacttaaggctgctcttctctcttggggattcaagaattatgtgtcatataactctttgtttttctccaacaaaaatggcaaactcttactcatagtaatctatgttgataacatgttaataactgtggaagatactgttgggttttgtgc

SEQ ID NO: 71067 - DNA, 1581 bp, Cannabis sativa
accatttttttggaagagtttcattctgctaaatactcaatccccaactgtaataaagagagtgtatcatcttcaagagttattggcaattcaaagtggctgaatcctccatcagcaaaaatgaaactcaacactgataccgcttgcaatactatgaatcaaaaatctggttttggagttgttttaaggaattcatcaggtgaaattttggctgctatgtcaaaaccttatcatgggtgttttaaaccaaaagtaatggaagcactagcgattatggttagtctgcaatggcttaaaaatttgaatctacctattcactacatcaagacggactttgttggtggtacaaggattgcacactagttctcctagtctttctgattttcatagtttgcttcatgacatttcttttcttatgtccaacctccctggagttcagatctctcatgtttatagatctgctaatactgttgctgattctttagcaaagtatgctctttcggtggacagagaatatttatggttggggaaattttcacctcctctaatgtctattgtattttaactctttaatataatatcattttatctaaaaaaaaaatactagtaaaataaataaacgtgttaattatatcatttcgtcagttccggtttgaaaatgcctagttgcgtgaaccactgtgtagccaggttgttaaagatagttgggagctgtgtgaaggtcagcatgttatgaagaaaatctcgtattgtggggaatctcttcaagcgtgggggcgagagtatacaggcaattttagaaaacgaattagccatagcaagcgggagatccagtattggaagaaggggtgtgatgctatatccgttcagaagtttcaggaggctgaactgaatcttagtgaagctatgaatcaacgagaagtgttctggctcattgttctaaacagctgtggcttcaagaaggtgataggaacagtaagtactttcatgctaaagctacttctagaaagaaacacaatacaataactcgacttatgaatgatgtgggtaattgggttacttgggaggatgagttgcccaatgttatggttaattatttcactaagttatttacttcaaatgtcaccgattactcaactgtggttgaggagattactccttcgatcaccgtggatcagaatttgtctttacttaggccggttttggaagaagaagttagaagtgctctgtttaatatgtatcttgataaatctcctagtcttgatggtatgaccccaggttttttccaaaagtactgggaaatagtgaagagtgatgttgtgagccaagtttgtcagttctttgtgactggtagtattcctgatggtctgaatgacacgaatattgttttgatttcgaagaagaagcagcctacttcgatgggggatcttcggcccatatccttgtgcaatgtcttgtataaagtagtatctaaggtgcttgtgaatcgtttgaaggaagtgctgcctcagatcatatcctcaaatcaatctgctttcatcccgggctgccttattactgataatattatgatagcttttg

SEQ ID NO: 71068 - DNA, 549 bp, Cannabis sativa
  modified_base (494)..(494): a, c, t, g, unknown or other
caagaactcaattatcttttgaactttatcatatattgatccttatgagtggtggtagatctgaaagatcacattgtaaaattattacctttatggaattcaacttaagtagcaatgaaccttgatagttcttgaagaggtaaatttttctattaattgtaatatatatggggatccttggggtgttacgaggataaacataactaatttattacccaaaaattaaaagtagaaaagatgaattttgaaaggtcatggtcactaaaggcggttgcaagcactagaggttgctattggaaagaattttaattctcgagcttcatagaaagtttgtaagaaaaaattattggagccattagagcagtaaagaaactgaaaaagaaatattactgagaaaaaaaaataagaattgagttgaaagaaaaaattcactaatattatgtaaaagtatgaattttggactcgtttagaatgtcgtattaggtcgtattgtnttgtattgtattatattgaattagattatacattatatttttatataatattatg

SEQ ID NO: 71069 - DNA, 1900 bp, Cannabis sativa
  modified_base (1632)..(1639): a, c, t, g, unknown or other
catattaaaacctttgttctatatcctccaacaatgacttgccataaattcaaaaactttgcataaacctcagttttcgaatgagctcaaaaattttatagaaggggaagactaaaagaggtgaggaagaagatagtgttggattaaaattcttaatatgggctcatatgtatattagtgtgtattgctatttgaagtttggtccaaaatagagtgatcattttagtaattatgggtcattgggtattaaagtgtcatgagcgaaatgtgtagataccctaagcgatatttctaatttatttaggggctaaattaaagtacttaaaactaataacatagctatgaggttataaattgatagtaatccccaataaacaagagctaatttctattctcatcttctgctatttggcttcttctctttgaatcaacaaagatattatttagatctatggttgtcaatttataattatatgtaatatgtttatctataaaattgaatattgttaatgcatattttatgagtaataaagatctctaacaagtggtatcaagagccaactttaattgagtctgaggatttctaaaaatctaaaaaattaggttttgctcttctatttatgatttggggttataagtttgtgattatttatttggtatttatctttcaaaattgttatagtgaattgatatgaatctattaatcattcgatttcttgggaaagagatctagttatatgcatgcgatgggatttgttatttgttttttctttctcgaattaattttataaagtgataagatagtgttgtttgaatcttattgattctttatgtctaataaggtttcactcctattttttttagtgagatgatgttttctttggattgactactaatatatcatataatatatgtcactgagctcatcttatctagcataaagccactatcaaaattaaaatttatgcctcctctttatgcatatatactttatatttgacatatgtattcatatgatgtgattctaagtttttactcatatattgggtcttttgggcttttggattaagtgcaccatggctatgggtgtgatctttttattaaaacttttcaattcatattttggttaaatattcatagttatacaatatgaggtatttattaataattttaaaattttggtttagatgcacatatatattctacagttttgatatatacaattaaatatggtcttacattgttaatgtacgtgaaaataaattgtaatatataagatgaaaaggctactcctctcattgtcaattgattttgagataaaaattcattcatctcatcccaaattctaacaaatatgtatgcttataaaaatattcctaacaaagctaatgttcctattgtagacatatcctttatatatatatatatatatatatatgcaatactttttaatgggtattactcattaatgggttataaataaatttaactataaataataattttaaaaatattaaaccattagattttggtccgatagcatataataaaatataaatttgaatttattctaggcttaatttagctacttaattaaagaaaatattaaaaaatacatctttttacactatnnnnnnnntatatttatataaaaaaaaatatttaagttaaattcaatttttttatcaattttttgccgaaaactttttttttattattttctttcggctgatggacccatcccaacctatataatgtaaaaataagaaaattatctaattaaatagaaaaattaatcataaaaactccaaattttctaatattacccattctaataaccattaagagtatatatgtggacacttttttaaaattggtacatgcaaacatgattattaat

SEQ ID NO: 71070 - DNA, 1237 bp, Cannabis sativa
gaggttaactttctaagctatgatatctttttgtaatttggaatttcatcagggacaactaagattaagaacttggatgataacattggctcggtgagtgtgaaactaacagaacaagacatgaaagaaatatgtgatgctgtaccagttgaagaggtggctggtgatagaatttatgagagcatgattagttcttcctggaagtttgccaacactccaccaaaaaagtgaccttcctacctaagaaaatgccattttggtatttatgaagtttattatatttgatccttgtaataagattacatgctttagattgagaaccatgtttggtgttctagccggtgaagtagacaactctttccaatacataacttaccaaatattgtaagcatattggtgttcaattagcgagcctactccaagcatttctcaaggaaatcttgcaccaactaaaccaccaatataataatgcaagattagaaatttgaacacccaacactgatattcttaaaaatcagcaaagcattaagcttgtatttagtcaaagtgattatgtttcttactttaataattacttttttagctattaggggaagtgcacatactatatgctagattatagaacctgaattttgtttctaagttatcatatgttgtacagtatacattgtagaattctcatggctactttactaatgtgggttcggattcacatgaatttagaaatgggaggaaagaaaggaaatgattcttcctccaatcactgaaatgtcattgaggataatgatttttatttaattttttaaaataaaagataattttgtcccacaaaaatatttttgacaacaattacgccttttccaataaaataaacaaaataaatagtttatttctgtttccaaataattttaataaaaacataatacaaataataattccagtacctactaatatatattattaatattattaatgaggtgccctgttttgggtctgtgtctgttatattttttgactatctcttgtgcattttaactgttttttcttcaaatccttccttcgatttttgaatatacctgattacaaccgttcccgccttgtctctcctcccttttccgccacacttcccctgttctttgccgtcttcttccttctccactggtgtttatccattgtgcagccctgttctgatatggatccattttcggattctttgcattccacactttccctcaca

SEQ ID NO: 71071 - DNA, 2017 bp, Cannabis sativa
ttcatcaagtttgatagtctcttcattacagcttgtaggatctccatttaatgattcctcgttaacattacttgtttctccaaactcatcatgtccgcaaatatcagctaacacattagctattttatcgctatcatcatcaccatcatccactaagtcgttattttcatattgttgagactggaaagactctccatggtatgaccaaatggtatatgtttgttgaataccattttgtaccaaatgatgctcaactatatataagtcttggaaacttcgactcaaacaaaagccacatggacacctaacttgaccttgtgtattaatataagccttcgctctttcaacaaatgccattacaccttttgtatactctacagataattgattctctatagtcatccaacttttgtcaattgacatttctagtaggaaaaacacatgtatatatcatgatacattaaaatgaaagaaaaacataagccataagttgaaatatatgtctttgaaaccatcttaataacttaatagagtagagaggtgagcaagttaaaatataatgtcacgaacaaaattatatatgtatcatgatatttgagtcatttaagtaatagaaagaacataaatcaagagttggcatatatgcctttgaaacaatcctaatataaatagacaagtagataaaaatataatagcatgaactcagaaccatatgcatatataaaaatacaataaaatttgagccatttaggtattagataaaaattatacctgcacgggaaacttctctaagtgaagataggtggtagaataaagtataattctgaatatgtattcttgttgttgtagaaattagattcagtattctgcataagaaataagaagaaaattcaaacatattttatgctagtggcggaaaaaacttgattatactgttgttttgtcaacagagcaggtgaatgatctgtctgctctcactggggacctttttaaaaggtttaactataactttacaaaattaactcatcaagaaatgaaactagtaaaatattataaactaataacaataataataacataattaggcaatatttgtggattttttttctttccgaacattcaagtcaggagatgactgcaaagaataaaacagatatattaatttatcatgaattataaattataatcataactactcttgaagacttatttttttaaaaaaaaaaaaatatgtatatatacttttaaataaaaatatataaaaaaataaatttccctctgctggccatcaagtgggcatatatactattatatataaatgcacactctggatcacttcttattacagctatgccttaattttcaaaagcctaaaagaaaacacagaagatagaaaaacaaaatgggaggtcacatgggcattcccatatgggacccctaaacaaacaacacattaattccctacttccacatgaagaccatgactagcacactgtgactaccacattagtacttgaaatctcttacttttcaagaaaatttgatgggttggtactctgctgcctaatatgatcatttgttggtaaatgtcaaagctaaagaattcaagagttcaatgtttaaacacataatttatgcaacttattttgagttctagccaactttgactgggggctgccccaacatataattatcacttctctttttcattttgtgatactgctctttttttagcaatacagccttaaacgcacgactaaaactaaggcaatgaatcatcactcttttcgtggattgtttaacaaaacttaagaaaacattcctctacttattcaacaagcttaacaaacactaaaatacacaaatctaaacttaaacacattactaatcaatggctcataacagtaacaagtgaacttgaatttgaaagaatagaagggaaatcaatgaaacagcaacaaagattggaactaatacaaaaacagggtatatggtactcttatatatatatatatat

SEQ ID NO: 71072 - DNA, 823 bp, Cannabis sativa
acaactgctcggcgaattacaggcccctaaatcacattgatgataacatggataagtgacacgctaaatcacaaccggagacttaccaaaaacctacctactataagctaacatggtaataccgtaaactaatagggaattaatcaaccaaagctttgaaactaacacgaatcaacaacatgaatttttcggggaacccagcagcaaaatccagttaaccagttttacaagtcctgtaaaactggttaaccggtttacaccagaaaatcccaaaaatttgaaaacctaaccaaatcgattccaaaccttaccaaaccttctagacttgcatattacacctcaatagatataaccctagcaatagaacaactacacaagcttagaattaaaaattaccattaaagagccaagcttgagttctaaaactcaaagcttgctcaagcaaccctacaaccactcaaaccagccaaaaacaacatatttaaacataatttaacctcagaaaataatttcaaacaaccacagtaaatacagttctcaaacactcaaaaacatgcaaaatctctaacttgaaactcaagaaactaaaaatgcaaagtgtgggagcttacctagagcttgagatcacttaaaccttgcaacaaactacttgaatttgaagaaaaagtccagaaccctggctggttttatggtgttcgaagagagagagagagagagagagagagagagaagaaaagagagcttcctttgaatttttgatatttcctttatttttttcctttttcttcaaatgagagaaatgcatttcctatgcattgattca

SEQ ID NO: 71073 - DNA, 1541 bp, Cannabis sativa
ccattatgttaataatgatatattcttgatatcaacatgttatctatatctttgatttttcaaagttcaaaacgttattcgacacaaagaattttcgttttgtctaaacattctttatccaattatatatcgattgttaatgtgattcattcaacagccaatctcataaaatttatattttttaagattcttgtttttagtcaaaattatgacaattattgatatgtgagtatgtaatttgaaataagttgaaagttcaatatttttcatcttaaattaactcataacttattttgttgatatatattttataaaatataatcttatcaaagtaattattagagttagcatcaattacttctaaacaaatgattgagaggttcgatgatgaaagccaacccattggtagggtgtattattttttataagaatgttaatctttacattctatttgcttcgaaaattttattgttgtggaaacatgtccttccgtgtaataatcttcaattaatttagattttgtgttcaaccaaataatgtaattatgctaatagtaatataagtaaatgtcctcatgcactacaaacacaataagttttaattaaattagggtcaattttcgataatttttttttttaaatataatcaatttgaagttaatttttagcacgaacagatgtaaaaaatataatcagttttgtcataacacctctatatcgggttgttattaagttacattttgacaaaaaaaatagttaaagatactatttagtaatgctttggaaaataagggactaatttgttattttacaatatatgatccaattagtatcttttgcataatacaaagtttaaaataggatttacaaagtataataatcttctcatattgaatgagtatcaagtaatatattaaaataccttaggccgtgagtcattgtctaatttatattagggttatgttctagatataacaatggaggtttcaaaggttttaagcaacatttttgacttagaattgaaaattgatcatcaataggattagtggggtccagaatatattaataacattttaatctctgtaatgagttattatataaatgaattacttttttttttattattatttagcgcatcgagttgatttaatttaaaagtatagatagattgatttattttatctcatttatgatgtgagcagtcagatgcttggaaaaaatgtgttatgagtagtgagtgtgtaaattccaatatttattttgcttttatgaaaaatttgctttgttgcttgtacgaaaaggggcactataatgttttagcatttttatcgaataccatatgagtcatattgtccacgagaaatgtgagagttggaatggcccaagagaattgatcgttgaggattggatgacatttgagattagaggcttgcgttaagcctacttcaagattggagttggtttttctttcactctctgctagcaaattaggattagagaccgacagatacgattgacaatatgcttccacattgaaatcca

SEQ ID NO: 71074 - DNA, 3268 bp, Cannabis sativa
  modified_base (1273)..(1273): a, c, t, g, unknown or other
tggtgttgttctaggcatggaaaaaccattggtgttactttgtgacaacactggtgttatagccaatattaaagagcctcgaagccataagaggagtaaacacattaagaagaaataccacatcatcaaagagtgtgtggcaagaggagaggtactggtagaaaaggttgatattgaagaataagataacctagccgacccattcaccaatatattgatagagactgcatttgagaagcatagagagaatcaaggattaattgaatgtactaattgtttttatgttagtgcaagtggaagtttgtttggttttgtgccctaactaaaactctatttcaatgttatcttgaatttcatttatcaataaaagaatataattattttattacttgtttaatttaatgcttagttcacctgtttgtttcatggtcatttgtttgatgtataaattctttgaaatgcttatcataatgttattcatgattatagtgttatctacacagtgaaaataattaagattatgtgattaaacattagtctcataatttatcagtacacatgatttacactaatatgataatcaacaatttggtttacttacacttagatagtggcatgtcttttcctaggtattggtaaagtaaacttgtattggatgtattattaaatatcagactggaccgatattcactaaaaatagatatcataaatttactgtgatatttattctaagtaaatatcctttagttgatcttagatcaacgatctcaatcttgagatagtaaggttctagttcaattgtattatttgtcttctttgacttgtttgttaaagttgaccaaatggatcttcccaatacttacatcttgggaacatagtagtataattgtgtaggagcgctaattatagatacggaatatatagcttctataaatacatagaagtgaaacgataatttccttcgagcttggctcaatgagattaaatggtagaatactcattttagtaattatattagtttattgaaatattatttacgaggatctaaaagttttaggataaaatacattgaagggtagaatagtaaaattgtccctacttgatacaaatcatcaatagaggatcattgattgtttgaattgaaacaatagataattaatagtgtatctatatttggaacatataaagcgttctctataatcacgagtgcaatttcaaatctatagtggagtcaggaggaattattaagatagaaaatttacttggtaaattntagaactacttattgggagcttgattatataggtcatggtccccgcactagttgagataatactggcttgtaaagtcagttaattggctttaattagtcaattaaaattctaaattagactatctcttatttatgaattttcactaagcaatgacttaattgaaaagaaaagagaatttatgatgtttattaattaagagacattgataggtctaattaataaataaattaaacgaaaaattttgtttaataattaattataatttttaaatagataaaattagtatttatagagttagagttaaaatatagtatttaagaaagaaagataggttatttaataaagtggcaaaattaaaacccgtaaggcccacaaggggtttggccacaagggttcaatttaaagcaattttatcttttttttaatccgtattttaaatcctaacctaaccctaataggtatcatataaatagataactataggctcttattttcataagctgataactcaaaatttactttgtcagacaaataagagagctcctataattttcaaaattccttctcttctcccttctagaattcgaagcctatagtgaagagagtacttgcccacacaattcaaattaatactcaaatatagtgtggaagattgtgaagaattccattacctgaaggagatccagatttacatcttgataatacactgcaacagaaaggaataagagttagagatttgaacggaaggagccattatatttcgctgccacgaatgtaaggttttctaaaacttgatatgtgtttatttcattgttttacgaaattcatgtttaggatgtttgattatagattataatcaaacatacatgttagtaaatctagttcctagtaaaataagttccaacacaaagatcttaatcataagatggttatgttttggctcaactgtactacatgtgttctttgacttgttcattacaagcttaccaaaagatcatctcaatactcatatcttgggaaaacggtagtgtaattgagtaggaaagctaatcatagaaatagaatctatagcctccataaaatacttagaagtgaaatgatgatttccttagagcttggctaacatacataaatggaagagctcttactttggtaattatattagtttacaaaaatatcacttataataagcttagtatattaaggatacaatacattaaacgataaaacggtaattttagtccctactcaatgtaaatcatctatagaagatcattgattatgtagattaaaatattggataacatatagcgtatctatttttggtgaatataacattctatgtaatcaagagtgcaattgtaaatctatagtagagtcgagagaaattgataagatagagaattttctcagtaaattctggaacaacttattgggagcttaattatataggctcaaggtccccacactacttaagatagtgttgtcttgtagactcaattaattggtttcaattaatcaatcaaaattttgagtaagactatgtcttaattatgagttccactaagcaagggtaaatttgtgaagaaaaggaaatttaaagtttatttgttaattaagagactttgaaaagtctaattaataaataagttaaatgatagttttatttgataatttatcataattattaaatagataaaattaacatttaaaagcttagaactagaaaatggtattattgagaaaagatatgtcttgacataaaatgacatttttgaaatccatgggcttctaatgaattcaggcatggtgtttataaacggcttttttttggaataattacataagacaccattttttataaaatatttacatttttacgttcaacataaaattaacagaaaaactacataaaagaaacatgaaaataacatcaaaataacaacaaaaaaaacatgcatataacaaaaaatcaacaacaaattaacaagatt

SEQ ID NO: 71075 - DNA, 1341 bp, Cannabis sativa
ttggttgcatattaaagtattagaatgtcattctcatagaatggtctttccaccattttggtggaatgactattccatttaaaaatgaaagcaaagatcattccaatgcatgatgagaaaaaatttaataatttttttatcaattttttatgcattttaaattttattctattccattcttaatcctattctcattctcattcatatttctatgttttcattcatcccaaccaaatgctaccttagaattgtaaattatattcttcatgaaaatagcaaacccattttgggagactttctgttcctcttataataacataaaaatcacaatcgtaggtaccgatactggcaatcaaatatcaatgatcacttacctcgcattaggagagtgaggagtgaacaaactcaaatacaattgtcacaagaggcctttggcttagacactagacatgagaatccactaatgcattcactcatacccattgattgtggtgcaccatacaccaaccttatttcagagcagatgtcaagagtggaaaggaagagttctaccgaggacttaattaagcagttatggtagcagtcctctttggtttcttacatgacagccttcgaagcaagctagctaggcaaggataacaaggaatgagaaagatagcggttaggtatgttaatggaaagaatgtaaaatactatactaacttcgatccgttcggtcaacctcacccatcatcgcttgttcgagagctataaattcaccagtgagattgttagtcaggttagatctatttgattggaaagttcttagcaattcattaatttcttttatgattatcaaagtttattgaatttattttttataatcataaaaactcttcagtatcttttaatgaattttgatgatcataaaaggaaaactacaatcatgttattcttatgaatttcaatgactgttaaaaagattaaaagatttttcatgttattgagatatttaatatggacagtttggcaagcatttatataaaaaagagtgtaaaatagagtttacactacaaaaagacccagctaacccgcactcgaagacccaaaaacgtaaaatttatactagaagaataaatctttttttattgaacgtatttgttcattgtgacgctttatcaaattctatcctatttttttttatcatactaatttctactctaccttcttggagttcattcgccagggaactccatttaaaacattctaatggatttcgttcaatttccttcttttaagatctcattggaaatcatataaagacaattcctatttaatatagctatttgtgcaagtatttta

SEQ ID NO: 71076 - DNA, 3263 bp, Cannabis sativa
  modified_base (1389)..(1396): a, c, t, g, unknown or other
ccaactccattgccaaaaacattctccacaaacatgaaaaacataatgattgttgtaacatgaatagtcatggatactgatattgcagccatggattaatagataataatggcatgcatggaaggaggccttctttatatagacagacctttgttgtcatggtcttcattgccctttgaaagttttttaaaataataatatgggaagatagattatgattggttcctacatacacacatatatatatatatatctttgtagaccactatacattatgcactaagggaactctacgtgttcttttaatgcttagagataaagaaaataaatttttggacaaaggtctaatacagcttgttcaaatcatggtgattcctactaatttacactattttacactatgtatatacatgtttagaaaaatttgatgtatatatttgagtgaagtgaattaaaatgatattttactaaataaataaattcaatcatgtcatcaatattaaatagaagaagtaaagaaaatgtcaaaactaggttaatgaatatgagggtggtactactactatgtatttatttattataaagaagaaatacattctagaagtaaaatagaaagcacacaaatgtcactacatggatgtatatatattttatgatcaatgactccggccatgctaatttttatggtagtctttgatcttttcaaagttaatttttcaataagaaatatatagttttctatatgagtaaaaatattcaattcctagagtaagggcatgcattttgtcctttagtactataagttagttaaatggtgataaaatatttattaagaaaaagaagtacccctcacaatgactcaatttgaattcttacaagttcactatgcttgtaatatatatagttagagaagtacaatcgtcaaccttttattataattttttagttattctttttgtattaaaaaaacacatgttggaatatcttttttaatttttttacagcagtattcgttataaatacaaatttattttttataaatttttaaaaaggttcaaatataccagtgttaaaaatttgtagattttttttaaacacacagtactgtaaattggaatatgaagaactttatttttagtattataaattattcaaaatttttaagtgattgtaagtatattttacaaatatcattatatattttttcgggcgtcaaaattgattaagagattataatatatatatactagtaaacatctcgcgcttcgcggcggatatataaaatattttacattatatatataaaaaaaattgtatattttaattaagtataattacttagtaaaaatatgttataattttaactttactattaaaaaatttgtgacnnnnnnnnttaaaatattaaatttgttgcctcaaaaaatagtagcataactctttatttatggtttaatttttagtgtatttttaatgtttgagttttagtgttttactggggttctaatatttgagtttgtgtttataagatctgcttttttttttaatttatttttatagatttcgagaacttgaactttgatgttgtttctattgattattgggattgagagtttgattttccatacgggaattaaagtttttcttttcattgcattgattaaaaaatattagtacaaagtttatggaatgagaattttgaatatatgaaaataaaattaaaaaatagcgtttgaatcgagaatcaaagtttatttttaatcttcttaaaaaaaaaagtttattgttaatctaaaaagataatatggcggggagaagatgaaaaaattaatttttatttcatttaatatgtatataatgtttttttaattaatttttgttttttaaaattatttttctaaaagaattattagtttgacaaatactatatttacatgtggcactttattgatcaactaacagaacgataaattgagtataagtttataaatttgaggatatcaataggaactacaatgatgacatgaactttatatgattggaatataaaaataatacattatgaaaaactttgattcataatctcacacttgtttcttcttttacataatctcacactttcttttcttttttttttttttttggttcaattcattgcaagatgataaaattaaagattaataaaaaacctaaaaaaaatataaaatgaagaagaagtataagatatcacaatatttgaatattgtccattgagtatggtatgaatatgaagatgaggtagtgcatggcgtgacaagtaactttttcttgtgactaaaagtcatatttcgtgacaaaatatttatgttgtgactaaaagattgtcactaaatgtaattattttttgtaatggtggtgtcgttgaagattgtaaataacttttatcttcttttagagatgtttttttacgttttgtcaaattgtctgctaatgatcaggctgctcatcttatggctaagaggatcttgtttatatgttgatcgtgtttatttaaagtttaagctcctatttgatgttgttgatattgttgagaccgaattagtttagttgaattaatgaaattcaattgaaaaaacccgtattatttaaaaaaaaaaatcaaaaaaatattttttttattaattgacaatcgatcgacttcaattcaaaaatatgaaaagtacgtaactagagggccaagaatttattatacatacatttattttttcaatgttgaagaaatgaatattctttgataatggatatgaatgtattatatgttaagtacatatatattctttgataatttgatatatagtgaatttattagtggagatgtacttttttcattttaatctcctaacttatagttaaagctaaaaatatgtaaaaatgtaatgattattagggcaaagaatattttactttttcatcctagaagaaatgaatgtataatctatataacatatatataaaatattataaatatgtacatttatgagagattttatttacggaatatgattattgccctatggttactataactattgaattaagattgagttaatttaactgttgaaagcctaataagtacatcaaatcgagtgtagagtacattccacagaattaaattacatcaaacaaatttatagtatatcatataattagattttcttattataataaaaggataaaatctattcccgtatataacattaattcctcttcttcaagttgaagta

SEQ ID NO: 71077 - DNA, 1007 bp, Cannabis sativa
ccatacttgccacagacttggcaagttggtcttgaagtgttggtgcgccctcttcctcgaaaacgtccaggactccctcgatttccagagaaacgaccaccactgctggtataatgattggagttttgagagccacggccacgaccagtggagttgttcccaggattgtttttggctgccaaattagcttgaggtgtagatgatgttgctggtttgctgctgatactgagagtttgcaacctctcgattttactgtcaaagctcagtaaaatatcttggagttcttgccatgttgtggttggtcttgcttcaatctgaactactatcgacaaatactctgcatctagtccagaaagcacattagccaccaagtgttgcttctggatacgggtctcctggcaagcgccaaaatgtcggaccaatttttcttttgccgtaagtactctgtcatgggtgtagatccttttcggactgtctgaatgagagttcttgtttcatccatcttggatttggagtaagctccatatagactctccaatgaacgccagagaccagcagctgtggaggatcccattacttcagtggcgattccttctgtcatggaactatacaaccaccccataagtagctgatcgtttatgatccattgctcataatctgggtttgtttcaagttcaccttcatatttagcttctccagcaactggtatgaactccggtgggcacattctggtgccgagaagatagccgtgaagtctgtgtccacggactatagtggagaccatggttttccataaggtgaaattatttctgtcaagttttaacgagaagggctgattgagggtagtaggttgctgtgtgtatgtgtttgggagctggattggtgcagcaccatctctgttggtgctagttacagaggcaccttcggtttgttcttgaggagcagccattgaggaacgagagagagaggctggctctgataccaagtaaagtttggtaaaataatga

SEQ ID NO: 71078 - DNA, 1410 bp, Cannabis sativa
ggaacacgttttttatgccattataatgtctatttttagtgttttgttttagccaagtttttaatatgatcatggttttaaataattaatcaatctattagtattaaactagtttataaaatcacacacatggcgtccctatagattagggcattacaactccaggcctaagcgtctcgatatatcttcatcttacgcaagacgcagtcctcctcaatatttgtcttgccttacctacatatggaaagtatatttgtgactcgaaagacttgataagaaaagcataaaatataacattcaactaactcgtgactaggtgcccatacacccaatcgtaaagtcaaaaactatgtctcaaatgttcttgacaaaagcctaaaatatatatgtctatatcttagggcaactctatgtacacctcacaaataccataatatgcttgttgactgaggtttttggcaactaattaaatgatataatgatgagagctttggaacagttaatgcagggggtttttacgtagttcgggcattaatgagccatagtccacgagtctttgttattaatgagagttcttatacagagaatgttcttggtgaattctctctctctgtcttgttttcttttttcgatcgatcctctttcccatttttttcaagggtatttatagagttttgcaaggatcactaaaaagggatcacttgtctttgagtgccagccatctaggtggacaagttcctaagagatataaaatagggcatacatgacctatgccgtaggtatcatagggattaggtgaaagtaatctttatccttccttgattgatgtgatttttcataatggactcgtcactagactctttgattatcgtgtaatcgctgtaaataaggcttacgccatctgtcatgtccttttatgggcgttctaagacgtttcccccatgccccattaaatgtgaaatgattgttcaaataggttctccttctcccggagatgctttgttgtatttctagctcccacagaggagagacatgctttatgttcctctccaggggctcactccctgaattgcacatgcccgtctatatatgacttacttaattttgtgggtgaggtgtccttgaaatccacgtgccacacgcagccgctgccacgtattttgggaaacatccgaggcaacttttaccccccaagtctcatttagttactggtaaacgaggcttgtatagggccttcggtctcttaataaatgtagtggcacatgctctaggcgcgtgggtcgcatttatgattatcatcattgatttttatttccttttgcatgaaacgattcacttcccgtttattgatagagctttgcattaatgctggggtcagagaggtactcaaacgttttaactgtcctttct

SEQ ID NO: 71079 - DNA, 1769 bp, Cannabis sativa
gaaaaaagtaaaaatattcattactagcataatattgtttatgcacttggaaaagatagtagaaaaccttaaagaagcacctatatttacttgatgaaaatgaaaaagaaatagaaaattggcatttggtatgagattttgatttaatggtggtaatattaatcccctccaatatggattaacatcacaaatttaaaattaggatccacttggaacacaaactttttggttataaaaatttaatttagttagatcttacgtgttaaattaaaatggtggtaatattaatcccttctaagatttgggtttcatattctctccaagcttattctctccaactcaaactcgcataataaacaccccattaggtggcatatggttggaagaaatcaaaatataggtagaataagaataacattccaatactttcacataaaactaaactaaggaattaaataaaaattgttttctttccattcaattctatttcgttacctcaaatcaaacaccatctaagagtttatgagttggaagtgtggtatatctacctgaaaaaaaaatagtatatcaactaaaattttactatttacatgttatattttgatataatattattgattgattaactaaatattacaaaagttacaagtttgttactaaaaagataatatttaatctaattggaattgttatattatttataaataatataatatatagattaagtatgtgtattaaattaataatatgtaacatattacaatatatattaattgtcatcattttgtaacaaatgtgggagtcacttgttattatgagtaacctcacaattagaaaaatgggctttagaggcaatttttcggggccttcgccgtcagttttagcaaaatttgctaccgacagtgttccatgcgacactatagggggagcattaacacacatcataaggagaccctatgtcatcagttattatgacataaccgacggcatagggggtcctattgtattatgcaacctttatggcgtcggttatttgttaataattggcgtcgtagtgttttatgggaccagttattagcaaataaccaacgttgtattcaccccaaattttttggtgcatttttctggtgaaatctttcctgtaatttagaccagattcgcgaagcatcttccatgtacatgatgctatcagctatggtaagtgcaatagagtttaaaatctaggatataaccaagttgttgcatttgatccaagaatcataattctcatcatcttcatcaggttctggaagctttctattaatgaacttgatcttattcctcgctagtaaagccaccatcttcgatcgtcaccatgatctgtagttgtctgcaccagtaagaatctttggaaccagtgatgaagaagcactgtcaccactagatagataataaagactttgtggatcaatggtagggaacctgttgttttcatcgagagctgcgaatcgattagattgatcagcagcttcattgttgctattacttcaagtatgagttcctcttccttggccatggaagaatagagaaacaaaaaaaaagagaaagagtggaagcacgagctcaacaattggttggctctgatactattttatttttgagagagagagagaatgaaagaatgagctgaaactttttattaaagaaaaatagagtacaatagcagagcttatatacacagctcgattggagaagatgaacctaaccaactcactctaactactaactaa

SEQ ID NO: 71080 - DNA, 1313 bp, Cannabis sativa
gacgatatcttctctggtgctacatctaaaaatattcttgccgtgacttttagacaagtagtgctacaacagctttggagctttgaactggttattttcaggcctggtactgaaagaaatatggaagatcttgaaaacctaagagaggtttgttgaatttcatcctttcttgccgtgtaattctcctaatgtatcatgtctgcattagtttttgtaaaatgtgatagttatattaatgttcttccctgcaggtgccacatgatactgataggttcggttctcttatgcatttcatattagcaggtcgctgcatctttcactcttaggtcatcagatgaaggggttatctctgtgcttgctgaagctgtttgcatgtctgctcttcagagtactgaaagaaatttccttgatagttatcttggaggaagtgcaagtaatctattcaactggcttcaaaaaccaagacaagttgtgtcgaaagattcttcagttaaaataactaaattttttgaagatgagatagttgagaatgccaagagtcttctggaaaattatcattcaacaaagggacaatttaagcctggaggaaataaatcaaagaacaattggtggaagccatcagtgcactctaaattggaaaagataggtggtcgtcaattcattgcttggacaattgagtatattcctgctaacaagattcaaattgatgctgaccgacacaaagaagtaaaatttgaaggctggagaaaatcttcggataataggtgggaagtccttctcacacactcccaaatggtacttcactccttacttttagtggcttctgattttgcttttgatgttatgtgtctgattttcaaacttcaacatattgtgaagtgcactagtgtatgagggttctagctaaaatgcaatgtgaagttgaactgttgaatagataggggtgtgtagatgctctccttgttgaaacaatttgaccagtaattatgatgaaacaattgatcattagattattttaacccactaatgagatccaagtttaattgtcaaacttagagtcacatagaggtacatttaatatgagaaaaatgatgcattaagttattgtatggattttgttcttatcataagcatgcgataaattttgcaggctggactgtcagacatagtagacatgtactatgaagatctttactccttgcctagtaaagaactctcatgtggtgtggttggaaattacactaatttgcctactaaaaaggtattgaggtgcaagtatttctagttttttgggactgatacgtgaagcctta

SEQ ID NO: 71081 - DNA, 1550 bp, Cannabis sativa
ttagtaagtccatcagcaatttggtcgatggctggaacatgcctgatgtccacaagctggtgtagaattttcctctcgaacaaagtacaaaagctcgatgtgctttgttctggcatggagaacagggttggctgtgagaagcactgtgctgaggttgtcacaccaaacaactggagcccttggaagagttacatgtaactcagaaagaagagaatgaagccatgtaatttcagcaaccacattggcaagagacctgaattcagcttcagtgctggatcgagaaacagtgtgctgtttcttagaagaccaagctacaagattagatccaaagtaaatggcataaccagaggttgatcgtctatcatcaacatctgctgcccaatttgcatcacagaaggcaacaatctccttgtgtggggctttggtcaggtgcaagccatagttcattgtaccactcaaatatctcaagatcctcttaactgctatccagtgaacttggaggggattatgcataaactgacagactttgctcacactaaaggagatttcaggtctggtaatggtaagatactgaagggcccctactatcgatctgtacagttgtggatcttcaactggatcactgccataagctgatagcttgagtccacttgtcatgggggcagaagcagatttagctccttgcatctgagtttttgtcaacaaatctctgatgtactttccctgagataagtgcaaaccatctgtagtgtgtttcacttcaatgcccaaaaagtaactgagttctccaagatctttgagagaaaactcattgttcagattggtaacaatttgagaaacaatctcagggttgctgcctgtgataattatgtcatcgacatagactaggatgattgttgtggactgagttgagtgttgaacaaacagagagtgatcggatttggatgaagcaaaaccaaacctggacagagactgctgcaacttatcgaaccaggctcttggagcctgtttcaaaccataaagtgccttgtggagtttgcagactagattgggagatgtggtgatctcatacccaggaggttgtgtcatatacacttcttcttgaagaactccattcaagaatgcattattcacatctaactgtcgaatttcccacccttgagttaatgccaaagttagaacaactcgaatggtaacaggctttaccacagggctaaaagtttcagtaaaatcgaatcctggttgttgatggaaacctttagcaaccaaccttgctttgtgtctagtaacagtgccctcagtatcttctttttccttgtaaacccatttacaacctatggcttgtctgccaggtggtaatggaacaagagaataagttttgtttctagttagagcaagaatctcatcatccattgcatgtttccattgtggtaacttgagagcttgagcaagtgttgttggaatggatgagacactaaacaccttaggtttgtggatgccagacttggctctagttgtcatgttgtgtttattctgagctgtgggaacag

SEQ ID NO: 71082 - DNA, 2602 bp, Cannabis sativa
  modified_base (2156)..(2156): a, c, t, g, unknown or other
cacctatacctgtacaaagcatttggtaaaaaaataaaacagacacaattgcacgatgattataaacgaggaacgaaattcattgaatgactaaagcggtcaagtccgaaattaaaggctgcccagtcagcaagttgtttaaaaaatgaaaaatatattccaagtgtaaagaccgcttggccggtcactttgtctttaaaaaaaaggcttattagttgaataggaaaaagaagatgataaaaagaaggcacttaaacagcaggactcccaggctccttgtatgggtcagcaggatttgaaaggactggaggatcgtcattctgggcaacaagagcctcaacactctgattggtaagggaggtggaagtggtcgcctcggaattcccgtaggctacctgagcagcacggtagtcgagaaacatgtctttggaagggcccagataatcaaagtttgcctcgggattggccttccaaaaatcataaaaaatctcgagaccagctgtctctaaggcattcaccttttccctgagcctcactacttcggctttatgttcttcctccttagccttattctcatcctctaacttgttgagaagagtttggagtccctctctttcgtcatgaagactgacaacgtcccgagataaagaagcaatgtccgcttcgagctgctcggtggacgacatttcctgcagatctttagtcagttcagcaactttggtcttaatactaaggagcttcttattgacctctcccagctctatccgcatagccccaagttgaacccgagcttcctcggcgtccttcttggccaagtccacttctgttcgctttgtgtttgaaatggcaaggttcttagcaacagtcgacttagctcgggaataggaataggccatcttcagaccagtctgtacaaaaagaagacattacaatccagactatttgaagagaagtgaaatggaaatgttagaaaatacttacccgtgaaagctctttcaaaactcataccataaccagctccaaagacaagtcattgtccgccccagccaactgctcgttcacctcaaggactgaccgactcacatagtgggtgagcatatctctgcctcttttagtctcctggtgcaatactagaggtatggcaggggccttaacctatttagacacgcttctgatcagttcggatccatcttttgcctgctcggatccatctgaacttcctccaggggaatctttggacttggtcacttttgaggcaagagggtccacaacagtttgttcttcagaaaggtcaatgaccacttcagctagtgccttctctttagacggggtctcaccgcctttggacttcttggccggaggggacaagcccgagcttccccccactctcttcttcaaagcctcaatcatcttctgagacatttctgcacagagtaaaaacaatacagtcataagaaagtataatatatatgaaggcatgagaatcaagaaagttaaatgcaagatggagtactctacacgctggaagaagcatttgcccgaacaagcacggacggggcgtcgtcatccgaagaatttgcctactcttctaggacggctttcccctttccttctacaggggtggatggccgaggaggtagattaggctctctaatctggatagtatgttctatgggtctctacccggtcgagagggttttcttcttcttgagcggcctctcctgctttgaatattcatgagcctccttctccttctcaaaattttcctgagcatattgtttggcttcggctccaccgttcaacttagcgtcacgcttaagttgaataagctccttctcctgctcagtttcctcagcacagccagccctgttgtcttcttcctccccttcacaggttgaggtataaagtctatcggataaagcttgtactccagaaagttggcctccaaggttaacaaagtgatattccgggcagcatctagcagatggataatcctctgagccctgtctctaagtgccaatgagaggggtggacggtaatatatcggcatctgttgaaactgagtataggtggaatccatgccctccacgaagtagtactcgttaacaaaactcccgatcttgctaacatccttgtccacggtgcccgtcagccanttgaagtctggctgagagaagtagaagtaccccaacctactttgcttgggggtagacttgtcaaagaactaattgacctcgtgcggagacgacacaccccatccttgaatggcatagaggacggactgggcagatagatacttaatgcctttggggtgaactgggtccgacaaaggcgaaaataatccgccaccctcttgaagtacgagtgcaaaggtagcatcgccccttgcttagtgtgagcacctgaccaggcacaaaacccttttttgtgggttacttgctcagtgtttcaaagaagggacgtaagactcaagtccgcccagacatccagccttgtctaaggccctcatacgtgcctcgcggatcttggacgaagggcccacccatctggcacctaaggcaccttgcctcttgtgagaaactgcttcagtgagctccttggt

SEQ ID NO: 71083 - DNA, 1294 bp, Cannabis sativa
ggggggaacactaaccagcggaggctccagagccagcatgaactatgaaatctctaaaggtttgcccatctgatgatccgccatgtccacccatctcagaagctattattcacaatgttttaacaaaacccaagtaagatatcatggtgaatcgtcgtgtatatatacatacgcatgaaattgcatctgggtctgttacattgacctcaaagactggattttgaaaaggtaaaagcgagaaagagagtgtcttttggttttgggggacttgggtttcttcgtagaaaggggttttaggcggtgagtttggctttaggatgaattgggtcagaagatcaagacgtgtttggtacttttcttatgttgagtttgagagtctatgaatcgaaaacgaaactgggtttggtttttgtgaatgaatttgtaggtttctaatctcaaaattccaaatatagaaaagtgtttgggttccactgtttcatctcatctctctcaccactcaatttagtacccacacatttttttttctttcttttttagttatcttttgttttctttctaatttgttttttaaacttttaatttattatacatgtaaaaatctatcatcttacacttagtccttttcacattttcaaaccaatccaatcatgtttagacaattttgtccatttgatatggtcaattttgtataatgtaatcaatttataatgttttaggaattttatgacaatgtataatgtaattgttatttttggtaaataataaatttgtgagaaattcaaaaaatttaatatcataaaaataagatttaaatagtctgttgaatataaatattctttataataaattatttcaaattttaaatgataaatcattgaataggtatcatgatattcttaattattttttaatgtaaattatgaattatcactaacataggataggagctaaaatatgctatatgctcccataatcacctaaagggaacaataatatgttcattaattgaatgaaaaaaccaaagcaaaatcaaatcattttgttcttgttttgattgaatatatatatatatgataaatcatttaataggagataatgccttttttcttgaaaggggagatattgattataattatgcatagattgctcatttatatgtactttgctttttggctattatttttattttatttttcatttattagatttattgtaaatattttttctttaacgttaaacaataataagttgggttggcattttgtgatgaggtgatgagcagtttcaaggc

SEQ ID NO: 71084 - DNA, 2430 bp, Cannabis sativa
  modified_base (1712)..(1713): a, c, t, g, unknown or other
gataactccaagattaaaagctacccggccaaccagttgtcttgaaacaaaatacaatattttccaagtttaaaagcctcttggtcagccatattgtattaaaaaagggcccataagctgaaatgagaaaaaaagcataaaaaaagagaaatttcaaacacctagagtcctcggctctttgtacgggttaggtgtgtcattagcggctgggttctcattgccttggttggtcggagcattggtgttgactgccttgaattattccttgtctttttgggcttcacaaaaactaagatatgtctctttgttttaattgaggtaatcaaagtttgcttcaagtttttccttccaaaattcataaaaaacatccagggcaaccgtctccaagctttccaactccttttgaaacacctcctgctcggcaccaaattctgtccgctaagatttgagagtctcctccaaaacattcttttccttagtcgaattggaaagaagggtccaaaggccttccctctcgtccttcaaagaattaacatcgttagccaaagccttattgcccgcttcaagctgagcagtgaatgacatatcattcatctccttccttaagtcctcaacaagcttgttggcagccaggagttatttattaacctcgcctagttgggtactcttctgctcgacctctttcttagcttcctccaccacctttttcaagtttgtggtggttgttgtagcttttaaggtcgcggacttggctcaggagtacgtatatgtcatcttcaggttgagctgcacaatgaagtaaaattaaagtctctacggatggaagcatggaaaataaaaccaaaggaaaattacttacttgggtggattccttcagcaaactacccatgaaaaactctatagacatgtcctcccctttggccagttggtcattcaccttgggaagcactcagtcttggtaaaactaaagcatctccttccccttcttagtctcagagttcagcacggtaggagtcactgagggtttgggtagcccaggctcatcagtacatcctcccttagaacctttggaaagggcagtcgtcgactgggatttggagttcctcttggttgatgggattatatctgacaccacctccttagaaacatcagcaggagggacacctgagctcttctaaaaagttggttgaggagtcttggtgcttggaattatgcttttggctggcacatcgtccacctttgagtgctttgctagagacttccgtccggagcatcccccgacctcttcttaagtgcgtgcagcatcctctaagacataattgcacataagtaacacaagaatgtcagaacaagcatgattcaaataagtaggggtgatcgcagtgcaagtggtgtagtttttgaccattttttcaaaccaactcgcacatgcagttttaacaactttgcaaaccgcacctgcaccgcgaaactaaaaaaccgcagaaacctcaccacaaaaaatagtgcgatgtggtgcaatttttttagtattttcggtttgaactatcaccaataattaaactatcacaaatacaacaaagcttgagcaacacttgtcaaaaataacataaggcttgagaataaatatgaaacaacaaattaaatttcaataatacaataattagtaggctttgggttggacattcacatattagacctaaataaatatnnaaattggtatttttataatgtgtggtgtggtgtggtttgaagcgtatattaacaattcaaaatcgcaaaccgcaccgcaaggtttaggaaaaactcacaccgcaaataattttaaactgtaatttttttgcggtgtgagcggtttgagcagtttgatgaacacccctacaaataagtgcaaacaagattaagaataaaataaagtacactatatgtggataggggcaccctcccaaaaaagcaaggaaggggaatcctcatctaaagagtcctcttgttcttgctcgaccacgatggcttttccctttctccccacctggacagaagattgagcaaccttatcagcaccgtctctgatcctaatggcccacttaatatgtactttttcaccttggggagccctcctcttctttttcttgctcggagcttcctgttcgggtataacctctccttcctgggctggtataggctctcttactacctgcttgaccacttgtccatgattagatgggtaaagcttgtactggataaaattagctttagtggccaagagagaaatgttctaatcatctgagggaagttggagaatttcttgagccctctctctgagtctcagagtgaacggaggtcagcaataagaaggaatgtactgaaaactggtgtgctctgtgtccatgccctaaacaaagtaataatcctccatatagccaccaattt

SEQ ID NO: 71085 - DNA, 3058 bp, Cannabis sativa
  modified_base (749)..(771): a, c, t, g, unknown or other
ttttgtggtcagtatagatttcacaccgttcaccatataagtagtgtcgccaaatcttcaaggcaaacactactgctataagttccagatcatgtgttggataacgctgctcgtaatctttcaattatcatgaagcataagctattactttatctgcttgcattaatacacaacctaagccctttattgatgcattacaatataccacaaatttttcttgatcagtcggcagggctaacactgaaattgtgattaatcgttgtttcaactcttggaaactattttcacacttgtctgaccacacaaatcgctgattctttctggtcagctaagataacgacattgcgatcttggaaaaaccttccacaaaacgcaaaaacccattaaactaagaaaactccgcacctcagtaactgttttcggcctaagccagttcttcactgtttcaatattctctgggtctaccataatcccgtctttcccgacaatatgttccagaaaagacacatgtaacagccaaaactcacactttttaaattttgcataaaataaaataaaaaaatacagtactctaataattttctaaaataatttgttaagtttaattgaagaattatgtcaaatttaactcataattatttttattcactatataataatgctattaattattataattcattgattattataaactattacattctttatttattatattataataattttgaaaataataataatannnnnnnnnnnnnnnnnnnnnnnaataataataataataatcttttgtatattttcaataaccatcaataataactgactttttttttttttttacataatttacatcatgtgcattaaaacaaaattataaataataatggataaaacataatataaatttatatattaagttaaatttagcaccaaatttatatcttatatttgagatgatctaagaattaacatgcacctgtcattttaatgttcctaaaatataatacagtaacataatatttggacaaggatataagattgcaaaacttctacgactaggataaaatatgtaacaagtttgataaagaaaaaacatatatctacacatacgtgtattgtgagttacacttgatttaatgcaattttttttttttaaatagtaagtgaccttttttgtgcttaacgcattggtaatggtatgattaaagcaattgtccatgcccttggcacatagactttcacaaaaatatctaaagcacatactctttacttattatggattttttttgtcactaattttacagcaaataatcaattcataggggacaaaaaggtagtggatgtggataattcatggaactgataggatagaattttgattgagattgggattgggattgggatttagaaggaaacaaaccgaaaaatcatcatcaaattggactcaatgtcaactactatttatataaatataaatataaatatatttagagtagtgctaccttaatctcctgttacaatctcttaattaaccttcacgttcaaaaatacatgtcaaaatatttttttttttcaaatattttttcgttatgcttataatattatctctgtaaatttttaaaattttttaaatagtttacagtgccgaaaatacatttaaagttttttaaacgtgcgtggtaaattgaaatatcaaaaactctgttttcagtactataaactattcgaaatttttcaaaaatttacagagatgatactgtaactataacgaataccgttatgaaaaaaatttgaaaaaaatattttaacatgtgatttctgatgtaaatgttgtaattaacattcctcgtatatttatatagagtgatttggagaagaagaggaaaatttattgaaactacttaaaattatatttattttatattttcttttaccagctttttacttgtatttttttcaaaagaaaaaaatcaggaaaacatattatttttgtaaaataataaaaaaaatatgatccgagaaaaaaatataaatttgttattttgtagatattgttgaaaaatatcctaaaaataaaacaaaaactcaaggacccatttgcaaatagtttacgaagatatattttgggtgtattttattacaattggaataaaatgaggatacaaaaatggtataaagaagaaattaaaccctaaaccaggcaacaaagtaattaaaatttttacactgttcaactgatttggtatgaaggaatattgctctaattttctttttgtctttaggaaatcttttccttaaatcttgtcgtattccaatcttgttagctatatatgcattatttttaaatataaagtgttttatgggcaaatattcttttcccacttttttttttttgaactgatattctttttccactttggttgctaataatgtctttatcttatttgggcatgcaataaaaatggatttagtgtccacaccactttgcaaaaagggggaaagagcataatgtcatcaaaattattaaagttgtaggaaagagtctaaatattttaaaagctttccttccatcgccaactccatcttcaatcttttaataaaacatgaatggaccaaatgtacttgccttgaatttgcggtactcatttttgggtccatgtccttctaattctatgataacattttgtggtagtcatttttcgtctatgtccttctaattctatgataagtttgtgtgagttttacatattctgttgtcatctttttaatctatgattattttgtttatttaattatgatttatatatatgttcatctcaaaaattaacacggctaatttttgagattatttaagcgacaatcagtagattaacgagaacgtgcccaaagatcacgcggcatgagtcacttggcatggtcatcatacaagtcacacgacatggttaccatgcaagtcactcggcatgccattcttgcatgtcactcgacaagccattcaagaaggttactcaacatgtcatttaagagagtcagtcgacatgccattcttgcatgt

SEQ ID NO: 71086 - DNA, 1465 bp, Cannabis sativa
cttttgatgttagtcaactcccattggttcgaccttgcacttacatgaacactatattccgaaacgattcgtgcacttgcgagtataaatattaaaacactcacttttgaggacaacattctatttcaggttggggtactgtgtggggtgcagtgtggcttgcaattggtgtgtagtttggggtgctggttggggtgttctttgggttgcacattggggtcttgtcatcctcctaagtctctgtcttctactccttggtgactcctgtaaatcaaatattacacattagcattttcagattgtgtgtcttttacttatttaatgctttaaatctataaattgaatatacaataaattctaaccatttggtgtgtttgttgtgctgctattgctacaggttgtggtgttgtattttgagttgcagtttgtggttcatgttgagttgcagtttggggttctgttgcagcttcagattgtggtgttgtttgagttgcagtatggtgggcagacatcctccttagtctctgtcttctactccttggggactcctgtaaatcaaacataacacaatatcaaattaagttgtgtgtcttttacttattgcagggtttcaaatctataaaatgcaactccacaacttctaaccatttggtgtgtttgttgtgctgcaactgctacatgtacacttttgggggctgcttcatgctcaattttgggttctccttcggcctcatgttcggggttctatttggtgttcaggttgggattgggatgcaaaatcaaattctggaaactcatatgcaggttgggatataatgtctggttcactctcagatgggatttgatgctcagtttgtatctactcacttgaaactgaatcatgcatcaccctcctctgcctcctctctctgagccttttgcttcctggtgtctctaaaccttcatttacaccaacaatcacaacctctgaatcaatagataacacacttaattcctgcaataccaacttattcattatttatcagcaatcaaaaactaatttaatgcaatcagaactaacaaaaatactaaaaaaatccataatcttaacctgggcagttggtgcaacatctggtataggaagactttctggtgcaggagggggtgggaggatagggaaggttgggaggcctccatcatcatctagatgagctaagtgctcctcagcaaaggccatcatatcctgaaaatcttcatgatcaccctcatcagaatcatcctcctcatctccattagatccatcatcttgttcatcatcttcatcatcttcctcatcattttcatcatcttcatcctcttctccatcatcttccttagaatcagattcagatgatgatgatatctcgattgtctctggaacagtatttcctggttgggggctgcactcatgagaatgaacttcctcatccacccactgtgctgctaa

SEQ ID NO: 71087 - DNA, 1115 bp, Cannabis sativa
atattctctgatattctcggtatggatacagcttcacacaatcctcaaatggtctctgcttgtatgcacaatcctcatctcgtgaattgggtctctttcaatcttcccaaagttaataaacattgtattttaccccatcagaaggcctagttgattcctaaaaactctagtcgggcctgggtatgtccgtacccagttctttcctataaatagaatatgatcccttcatgaaaagggtgacaaattaaatttttggggggaattgagaattaaggttcttcaactatggcgtaaatacttgtatgaaatatttcaaaacttttctagcttaatactattaattcgtggactagagttcattcactcaaaccacgtaaaaatcatgatatcttcttttttaattgacttctttttttagcttatttattttataattagtttttaaaaattaaaatgcaatactaacaaatttatataacataattttaatattattatatatatatttttaaagtcatatgaaataaaagtgtttttataacttttattaacaaatttagtacgataagtttatttttattattatttaaaaagacatttgcttaatttaattaatctatctgtttagaattctttttcatcttaacccttaaaaagtttagattacaatttacatagaggttttaatttataatcaagcttgtatactagattaatttgtgattagagtaaataaaattttaagtaaatattattttagacttcgtattctgtaaaagttaccgatttaattttttatttgttaatatttagactttgtattttttaaaaaaatacaaaataatcccttaaattaatattgagtcaaaacaaaacttaataataatcatatttagaggtgtaaagaccaaattaattacatgtttttttttatatatatgtttgtgttggaaactcactttagattgattatattttcttttgaaaaaataatgaaagttgagtttaggtattattttttaggctaattagtaatttttccactctgaactttgacatgtactaaatcgtgccccctgaacttttttggtcgttaaaattccccccgaactatt

SEQ ID NO: 71088 - DNA, 1652 bp, Cannabis sativa
atttcggatgctaaaacagataagggtgcatcaatatatccatttcaagaggtgtattgtagaattttccatatatatatatactctaataaatatagttttttttttcaatactaattcgaattattgatagttatttcattataaaaagataaaccaattaatatacacactataataaacatatattcgatcaaaaactaataattatatgttagttacatgtttttcatcctattaataatcgatgtatgaccatatccagataatttgacaaattaacaaacagtatagtagtttaatttatttccaacataattaaatagtaataaattagcttacgcttcttattaccatattgctttgcagctgatgatctcttctcatgcttccttccattttaaggcagagatttaattatgttattgtgttatcaataccaaattagaaaagagagaataaagaggcctcatgctccttaaattaaaccattaattgtgaagtattactatttccataaaccacattaattagtttgctaggtttgtaataaaaaatttactgtgaaaggaagagctaaatcgattgatccagttaatctattaatagccagaagcataagtatagtagatgattatttatgattgtttattgaattggaatatagtacatagtcctgatttgttttaggtaatagttttgtagtgtgtttagtgattagtgtagttggatgatgatggtagtatggtgatgaattgatgatagtattggatgtgtatataatagagaatggtagaataaaaatttgtagaaattattgatttgggatttctctggttacactagctatttaactcaagcttagtatttatagggggttaaagtttaatatttatagggagttaaggttggtgctacaagttcttatataagtttttcttttttgttttataactttctaagatattctaattttttttagttttattagtcttacaaatatagtttctaggtaattttagacttttttaatatctttgtaaatttatacgagaattcgtaatatataattatacatcttatttttgcaataggtggttgtaatgagaatattctcaacctctgcattcaaaaatattatttctttttatgatattgttcattataattacaatatcatttttgtaagtttttgaaattttttgagtagtctataatatcgaaaatagatttgaaatttgttgaacacgcatgataaattaaaatattaagaactctgtcgatactgtaaactattcataatttttttaaaaatttacagggataatgttgtaactataacgaataatgtcataaaaaaaatgagaaaaaatattttaccatgcgttttcagatatgaaaattgagagaaagaagttataatatggattataataaacactcatcttttctaaataagaaaaatataagaatgtataacacttttcatcaatttatttgatcattcaaaattaaagtatattgaaatatctctattttcttcaactctctttactctaaaagtttttgttacataacttctatttagaaaattgatcattttcaatggtattttttattttttttaaaactaaaatagctaaaaagttaaa

SEQ ID NO: 71089 - DNA, 765 bp, Cannabis sativa
aaaaaggcggatttggttgcaatttcaatatgataggctcccatacatgtgttttaactgtggattaattggacacgaaatgaaacaatgttctatgaatcgggctaccgtgaccaaggaagatgggaaactttatccagcattcggttcttggctaagggtggacttaacaggaagaagtgaaaaaaaggaaagggaggaggccgacaaaacacaccatttaacagatgtagaggacatttctatccaatctgcacatgccatggaattaaacaccatggatcgagagaccaccattcaccaaagaagattacctaaaggtactattcctgaatatcctatcattaccaacaatgaacatttaaatttatgcaatacgaaacctcaactaatcacctctattatccatccatgtgctgcaacatctgagacaacaatgccaagaaacattgatacagagaaggaggaaatagagtgggtgctagaaaaaggaatggtgaagacctacataaagaaagtctactgaacctgaatgaggaaagggcatgtcgagctagacttatggaagtggatccaattggaaaagagactacagagacactcatagatgttccaattgtctttgaaactggatttactaatcagaataaaggagctcgagagaagcgacggaagtttgtgccaaaagggagcaagactcaatcaaaagggaacatgaacacaggctcaagatacgacatactttccagggaagtttcacagcaa

SEQ ID NO: 71090 - DNA, 956 bp, Cannabis sativa
cacagcaacatgcatgaatactagctagtcccaaataatattattatcatgaaatgaaggaacgaaacatatagaggcagacattcactttattcatgacaaagttttgaagaagcaacttgatgttcaatatattccatcttacaatcagtttgatgattgtttcaaaaaggctataacacattctaaattcaatttttttgttgagaaactttgtgtgactcatgttaaacaaaagatttggtgaatgaaattacttcttagaaaaatgtttagcatcagtatagagtatttataagctaagcaagttgcaattaggtaagagctagttacataacaattgtactaattactagcctaataaaaaattactaactaatattgacaacccccctcaaacttagtgtcgtgaaatcttgagcactaagtttggacctcaaaagtgtaaaccaagaacaacctaaggctttggtgaatatatcaacaactatattacatctatgcaaatgatatgaaaacttagtaatttgctgagaactttttttcttacaaagaagagatcaaactaaatatggtttttccgaacatgtaaattaaataggattagctaacatcaaaattttacttagattatcacaccaagcagttggaggtctagtttgatggactttaattcctgagagtagtaactcaaatcacgtaatctctattgtaagatgagatattcatctttaatgctacttcttgagacaagatgatcatgtaatcaaattttgatcaagaaaaatgtaatatcctgaggtactacgtcgatcatctggatcactggcctagttagcatcataatagccagtcatctaggtttgagggcttctagagatgaagatcatgatctagagtgccaagatatcttagtagtcgcttaactgtgctccaatgtgattgtaaggtatttt

SEQ ID NO: 71091 - DNA, 897 bp, Cannabis sativa
tattttcaaatagatatatatctttcggatctgaacgtgtgttctttatttgtttattgatcttttatctcatatgcataatttatctacgatatggtttattatatgcttgtttcactgctcataattttaaataatcaatttcaatttattatatatagttgtaactatttggtctccaatttgtttatttgaaaaataaaattacttactctatttcttcgcaccttttaaataaattgtttgtgattttaatataaaacaagtactggggaattactcatatactatttttctattttttttttttttaaaatttatggtttgagtttctaaagtatatagttgcagcgctagttgcaataggagtttctatacgatttgttaccatttaagttacagcgctagttgcaataggagtttttatgtataatttcgtaaaaatgtaaaaaaaaaaaactgttttaaattgtaaaaataaaaaaacacctaattaaaaataacttggttaaccctatattagttgatttataataaatatttcctttattaaaaacataccacaagaattaatatttaaactttatttatttttttaagaaaaggtattatatcttaatgaataaattcatttacagcaatagcatgaatagggccaaaaatgacaaccatccaaacaatattagaatctactttaagagcgtatctacaagaccataagctgcagagctagcagtcttacgaatatgctgcaatgaaacacgtggaaaagagggcatctaataaataacatcacgaatcaagccattaaatctgctgtaatattcataataataggcattaacgctttgcgggataacaagagcatatatccgtttcaataatttggacctcaca

SEQ ID NO: 71092 - DNA, 2770 bp, Cannabis sativa
aattttttatttatcgcccgacataaaaagattttttttagtgtacagtgtggggttcaattggaggcattgtacatttgtatataatattcacacaatggaaaccaatgaaatataaggtgggattcttgcatatgttatttttttttattcattgtataaaaacaataaaagaaaaattaattgtatagaaataaaatagatattacatatttgtatattatattgttttattctttaaattttgagttctcaactgtattcatatcatcatatgtatatgtttgtttctcataaaatgggggtataattaatttaattgatactcttgtctttttatatatatattcttagtggggttgtatcgaattatttataaacttgaagaatattgttattatatttatgttatatatatttgtttacatttagtgtagcatgtaataaataagtgaaatattattaattttaattttagacgatcagagtcaaaagagtgtaatgtaaattgagtagagggataaagtcaagattatgagctttttcatcatctgaattctatgtatgcatcactttcacttttaatttaattttgtaagtcaacagtcaaataatacatttagatttacacatattgatcaaaaaagaatttgttattggacgtccgtgatgtttagcatcttttataggtaacgcctcacggttagttgataatattttttaaaaattattattttaagttatatagaactcgatatttaattacaccaataacagtataatactaaagagtgtgctagacatcaataatactttgtagcacttttacaaatgcatacattaattgagacacaaactcctacacttgttcctttaaccaaaaaaaaaaaagctcctacacttatggaaagttaaaatattgatgttgtagactaattagcatccttcaataaaaaaaaggcattacatttaatgaattttttatatgatcttaaagtttacataattaactaaaattagaacacacacaatatatttaatgatcagaaattatataaaaactaaattgttacaaatatataaataattttattttaaaaaatgtatacatataaataatttgcaccatataatttagtagtactaaatttctttttaaaaagtagaagttgcaagttgaaaccccttacccaaatttataaataacagaagaaaaatcaaacctaactaagactgcacatttattttgttaggtaaaataaccaaacattgtaggccaaatagctacacataagtggtcgaagagcatatttggtattattttttgttttttgtttttaatttttttttttagaaataagaataaaaaatagtttttgaagtttttaaaacacaagtcacgtttagttagtattttctaaaaataatattaattaacaataaatttttttttaaaatagaaaacaatattttttgttttcaaaattcttattttttgtaacaatattttttaaaaaagaaggctaaataagcctcattgttttcaaaaaaataattttctatttttaaatataaaaaataattttttatttatgatgtcaaacatttacttactgtcttaccctgtaatatcattggacaatcgaaatagtcaatttttttcaataataacagaaatatttaacaagcttagctacatttagctatgcactatattataatagttattttattgtaagtgtcaaaaaataataaaataataaaaacaaaatctacatttacaaaaataaactagtattttagtacatatttttatatgcacatctgaacaattagaatcatttttcggttcaaaaaaaaaaaaatcatttgatattgatccaataaattacccatgatgtttaggatccactttgtaatactttaaacttcttttaataattaactattaaatatttgtactaaaaggatggctctagttgagtctagtcacatgatataacttatccacccaaatatctcttcactaatttgtcttttttcatttaaaattttgatatatataataataaccttaatatatatataaacaaattatagtttagtagctgttaagcatgacataatttctacaccaagaaaaatacagttctgaaaagtcaaacttacacatttcaagtcaacataataatttcctataaataataaaagctggaaaatgcactgcagtcacaattgaattgttcttatttttctcatatttttatttttatatatttatatatatgagaaccttcatagaaagtacatcaaattttcttaggcattaatggcttacttcaatgtgtcttaaagtgaaaatgaaacccaagttggcttttttattcaaagcttcaaaatcaaaatatggaccctcaaattctgctcttgtccatttcactcctaattttcatggctgaataaactcattatatatcttcttctttttcttccatttgtaatgacaaaaatgaaatgtgaatgttttgatttttgagtgtcaagaatatgtgtgacattattagattctattttccattataaaagagtgagaaaataaaaaccaagttttttattcagatcattcaacaacaccatgaaaaatgttattgtttttcttcttcttaattttcttgtgcttccattgaagattacttgctcaccaagaacacaagcagaggctctcataacatggaagaaaagcttatcaatggaatcatcttctctggat

SEQ ID NO: 71093 - DNA, 767 bp, Cannabis sativa
ggactagattgacgaactgatgatggactagattgacgaactgatgatggactggattggtgtgctgatgatggtcttccccttgattgaaatgtactacttccagaacgaggagatggactcaaacgatttggacttgcactacccctactgctcctataacttttctccatctgcaaaagatgctgatatgctttaagaagaggtaaagagaaatctactctaaatcttcacagaacataaccaacaaaattataatcacagaaaaggatataaccacttactgtcgatgatctagatattgaaataggttgacttcgaggtcttccccttcttgtagaagtttgttgctgtggctcatcatccagtgaaggaaaaagaggagtgtcgggaggtgttaataacctatgaaacaaatatatgcaaaatttagtacaagcagagaatttagcctcaacaaaactaatatatttctaatacgtcaactaccattgacttatgactgaaaaacctgacaaattgaagggataatattttccagctctaacaacctacttaaatttacagagacatgggatgcaagatgcacatacacatgcagcatggataatatgctctagcagccagctagttaacccgttctgcttacccaagacattatcatagtctgtccatattacaagagaattgaacacttttgaggtacaatatcacaacctatacatgttgcattgcccaaaaatttgaaagcagaagttactagcagt

SEQ ID NO: 71094 - DNA, 3125 bp, Cannabis sativa
tcataatgtgcaggacttgattaataggttccataacaatgttaatcggcttggtctatgggaagcttcttggattcctagaagcatcaattgtgtggctcactctgtagccaaatgggcactcgatacaaaccagtttgggagtattgacctgtccaattttgacagttcccttctcaattgttgagtagatggctgtttaagttctttctttgttcatttgttttagttcgttctactgttcctttagttctagtttgtttgttagttacttgtcctcttagctttgcctgttgttgcccctgttggggttggtttagacttttgctggctttggccgtttgtttctcggtttgtttttacttgatgctcttttgtttggtgctcttgtgaagcccagtaatcaaaaaaaaaaaaaatatataaatataaagtactttttatagcaaaataaaaaataaaagatttaaatattatatttattttaaatattttttccttcaacaaatatatttttattttttgtaatatataataaataattaaatatatttttagtaaaaaataatttaatatatagtcttttaattaaaataattttctctaaaagttgggttctaccagctttaatttttagttgtagcttcttcatatataaattcttcaataagctgtttttaaattacttaccaaacacatttttttcacagcttttaaaagacagcttttaactttctaaaagttgtgccaaactaaaatattataaatcatgtgtttgctattttatatctatttttaaataaaaaatagaataattttaaattattttatatttataatattattatatatatttaattaataatttaaaataaaaaatctaattatttttttgtcaagaacttaaaagatttttttttttatttttaatatttatcaaatattaaaaaatgcaaagatacatgttgctttcagttaaaaaaattataaaagcgacaaagaaattatctttaatgattttaaataattttaaatatatttaaataaaaattacaataaaaaactcttaagaaaacacttttcatatgaaatacttgacaaagattaaaaaatatgttttacattaattttaaaaaattacaactaattatgcattattaagttcttcaatcgcctgcataaaataaataattaatactaactttctgataaactaaagtgaaaaaatatcaatccatatataacctagatctatatcaccacaatagtttctaaaccatgtgagactttttaaacataactctcatattttaaagatataaagaaaaatatattaaaaaatgtgaaaaaaaaaagagaaaatgtaaagaaagatttatagcatgtcgcctcaattttatttaggtcatcctttatacatacatattgttttagatatatttaaacaaaattacaataaaaaaaattttaagaaaatactttttatatgaaagacttgacaaatattaaaaaatgtaaaattgtgttttgcatttattttttataaaaaattacaactaattaagcataattaagttcttcaatgaagacccacataaaataaataaataatacaaattttgtaataaattaaagtaaaaaaatagtgatctatatatatatataacttagaagtatatcaccacaatagtttctatagtatgtgggactttttgaaaataactctaatactccaaagatataaaaaaaatatattaaaaaaggagaaaacaataagaaaatacgaaaaaaaaaaaaaaaaattaacatgttatctcaactttgtttaggctctcctttatgtataaaaagatgtgttataaaattttaaaaaaatataaaggaaaaaatataaaatatcacatagacccttctcatgctttcctatatattttgatttcaaattaaaaaaactattaactatgaattaacagtttcgaaattttaaattttaaattaattaaattgcaatattgacaatttacagtaaatattaatgtttaaattaattgaatgaagaatttttttttcttataatataaaaaaaataatgtatattactcttaaaatatagattttaagttttgcgagactttaaataattgtctaagttgtcttatgattaagccaattttaattgttagtaaagttgttcatcaaatcgctcaaattgctcaaattgtccgtaccgtaccgcactataaaaattacaatttgaaattttatacggtgtagtcgcggtttgaatttttcctaaaccgtgcagtgagatttgcggtcttaaattgttaatatgcggtttaaactaaaccacatggcatattataaaaatacaaatttttatatttatttagattaaatatgtaaaggtccagcttaaagtctactaattattgtattgttgaaacttgaaacttttttttttatatttatttttaataagtcttatggaatttttgacaggttgttcaaataaaattgtatttggaaattaaaaaaccaaatgtagtaattaatttgagaacatgattaaaaacggcaaacactcgtacggcaaataaccctaattgctaacatattcctcgaaattatgccatttgagtagttggtaaatttttattttatgtgagataataattatttaattggattaggtacctacctacatacctagacctagctacctacatgtactaataacaatagattaaatattatctaatacccatataattaactaatatggatatattattaaccatccctattaggggtggacatccgatccaatccaattttttttttctcatccgatccaattcaattagtaattggatttagaaaatcatcatccgatccaatccaattagacctcaaaatccaatccaattattaattggatttgatcgattttttaattggatatctaattatagacctaaatttcaatttttacttaaaaatatgaaaaaaaaaaacccgtaaaaactaagtatcaccttctatttaagtttaatacttcatatacatactattcttacaagtgtaatgtagctaaaaaatttaaataattaaaacaataacat

SEQ ID NO: 71095 - DNA, 642 bp, Cannabis sativa
ttttcgatctcctttgtgtatcctaagcggaagagtaggactaggagttgcaaatcctcatatttatatactctcaataaattaaaagacagtttctgaagttattccatatattggcaaaaaaattaaggatggtagtgtattaaaatgtgatttattttgattttttttcgtgaacgtgtttttttttttaatttattttgtaaggttagtaaacgtattattaattttgatgattcttataattatagtggcatgttcacttatgtattggagaattaatcaaaataaactaatgaataaaataataagagtacaatatatatatatataaaaaatccaaataattatgttatttactgaaattagtcaggatagaattaaaattattttataatattgtttctcataaaatgttgactatattctatgtgagagatagacctctgttttaatttataaatatttcaaataaaagaaaacaataattaaaagcattaattaatctaccatttacatatataaataaagattgtatttaattttttttaactttgattttgacataaaatgaaaataggttcaaattaaggaatttaaagttcataaataatgttttgtttcttgtgattcatatattaa

SEQ ID NO: 71096 - DNA, 1111 bp, Cannabis sativa
atataaaatatataattgtcttgtatcatgagctcacgtggtacatttagaatgatcaacattattcatataatatgttagactagtcttctatgaccaagaatttatgcattagttgcccattaaatacagtcaaaaatacaaaatattgaaaagaaggaagtgaacgtcaggctcaaattgtttatcatgagaagagggtttttagagtctttagtcatccacaatttcaaacatgtaaaaataatatttatgagagtgatagagacattatacttcaataaaacgaaaattcccttaaaagtttttttttggtggtttaacttcgattttaagaaaatttagaacctaaggtgttttaggcaaaacgaaaggggtcaaaaaaaaaaaccgaatttattgtgaatccataacttctatgacttccgaaaccataatctatgttatttacgattatttgctaataaccgaaatcgtaggtccttttttttattttttttatatatattttttattttaatttcatttcgatgggagaataatcaatatagagagagtctgatttagccagatcacaaatctaaaaataacaatttttcttttttaaaaaaaccaccatatagatttgatttggatgcaaataccacatgcaaaccaaaaaaaaatggtaagaaataatagaaaaaccaaaagatgacaaagaaaaaaaaaatgagaccttctatggtggtcgggtgtgttagaatatgggataaggtgaatggagtttcatcttaaaattaattgacaatggaaggagtaacttattcctcttatattttctattatctttccacacattagcaatgtaggactatctaatatctcccttatccctaattacaagtgactcttttttgctctactttttggatcgatatttttttattggttctttttattttttggctcactattctcgaatcacaagtggcttttttgactttggctcttggataattttttttggattttttttggtggctcattttttttggctctacttcgatcgattttttttttagggtcggatagtcgtgaagttgttttttttttttttttgctctgatac

SEQ ID NO: 71097 - DNA, 951 bp, Cannabis sativa
aggaaactaatgtgaaagtgattgtgactagtttgtaactttgtatcgtttatatcttctatataaacctgcaagatgggcggcggtggagctagtccaatcttggtaaagagaacctcaagacgagacatagggagaggcttcgtgagaccatcaactaattgatcattaccaaatatatgttgcacatgaagggtgcctttttgaacttgatctcgtacaaaatgaaaagccaatgtgagatgcttcatgcgcgaatgaaaaactgaattggctgcatagtgagttgcgataagattgtcacaataaatagtaggagcttattggagaggaacatctaactcgcggagaagagactgaagccatataattgttagattcaaattcttaatatgagctcatatatatatatatatatatatattactatattgctatttgaaatttgaccgaaaataaagtgatcattttagtaattgtgcgtcattgagtattaaagtaatgtgtagatattttaagagatatttctaatttattgaggggctaaattagaaatacttaaagttataacctagctatgagattatatattggtagtggtcctcgaaaaataagagacactctattctcatcttcctccattaagagagaaaactagagaacttaagtcttgtattcttagaaactcattacccaaaatcagaacagtacaaagatcacccaaaatcagaacaaagatcatctctacaagatggattaagattatcagtatctatgaaacttaatcttgttattgcatattttatgagtgataaaaaattctaacaagtgttatcaagagccacatttgattgattctttaaggattcaggtggcgtttggttggaggtaatgcaagggaatggaatggagaggaaataatttttatttcattcctttgtttggttgcat

SEQ ID NO: 71098 - DNA, 4189 bp, Cannabis sativa
taaactcacagtcgcaacaacagccaaggaaaatcaaatttaattttgagaaattatggctaaatgatgaagatgtttctgcaataattatgcagaactggaaagctttagaactaggtacgattatagagaattttatctctagtctagatgtttgtacgcatgaactccaaaagtggcactcacaaaaatatggtggtatgaagcaaaaaattccaaaacaaagaaggaagaattaaagctgaataattttagaaaagcaagaacatatgtacaagttttgaaaaaggttgaagatatatatattggatgatatgctagcccaagaggagacatattggcaccaacgatcaaggttgattgactgaaatgtggagaccaaaacatgaaattctttcatggtcacgcctcttcaaaaaagttgaccaacaaaatcaagttccttaataatttaaatggtgttcttgtcaccacaaagcatggtatggctaagattatctcagcacactttgaggaacttttttcaacttcaggcaatgatgagacaactctggtggatattatctcaacaatacctacaactgtaacggaagatatgaacaataccttgttgcaacctttcacaagccacaaagtttactcagctctgtccttaatgagtccagataagagccctagttgtgatggtatgtcaaccatgttttatcaacacaattggcaattggtttgtacaaaagtaaccaaagttgttctgggagttttgaatgatgagctagatatgaaactgttaaaaaaaatcactcattacccttattccaaaagttaaagtgccgcaagggatgggtgatgaccagctgataagtttatgcattgtgatttacaagctcatctcaaaggtcttggtttttcaatttaaaaaggtgctagctaacataattttagaaacagaaagtgcttttgtttcaaatcgtcttattatcgacaacattctggtagcttttgaacttgttcatcatctcaagcataagactcaaggaataaatagatttttttctcttaaacttgacatgagcaaagcatttgatagagtttaatggccatatttttcagtgattatgggaaagatggggtttcaccacaaatagattactttaatcatgaattgtttatcatgtacaagtttctcctttttgcttaatggagagctaatgggtaatgtcactccatcaagaggtttacgtcaaggagattcactatatccatacttattcctcatatgttcagaaggactcctgtttgttacaatgtgaagaataaataggaaacatacaagttctcaagctcacaagacatgctccttcagtttcacacttattatttacaaatgatagtctcttattctatagagctaatgaaaagtctacaagggccattaagagagtaatgcacacttatcataaagcctatggttagttccttaataatcacaaataagtcatgtccttttcccctaacacgcaagatggagccaagaccttttttctcaaacactgggtatgcctatatctgtatgtcatgaaacatatttggggttaccggcctatgcaggatgagatagaacacaatcatatagcagcatcaaagaaagggtttgtaagcttcttcatgcttggaatgacaaattcttctctattggtggaaaggaggtgcttctgaaagctatggttcaatccatacccacttatgttatgagttgctttcgtcttacaaaaaagttttatgaccagttagagtctataatagcaaattttttgtggggttccaatcaaaatggctaaaagattcattggaaaaggtagaaattactttacaaatccaagtttgaagggggtatgggcttctgatcctttatatattttaatcaagctctcctagctaagtaggcgtggtgtatccttgagtttccaaactccttagtcgtttgttgaagcatatatatttttctaataactcctttttaaaagcaagtcttgggcactcaccttctttaacatggcaaggtattcattggggtcgagagttgcttgttaaaggtctgcgctacaaagtttggaataaatttagcatcacttgtggtaacgatccctggattccatgtcataatgaatttaaaccactgtcctacattggaccacccacattaaatgtggcgtatttaattaaggacaatagggaatagaaactttctcagctaaatgaccactttgctccaatttatgttgatcgaatccttacaataccaccgagtttcttctaaactcaagacatgctcatatggcatcatatgactgcaggtgtttacatggtcaagttgaggtttcatttagccaactccttagctgaagttgacatttcttccacatctaacaactgcagcagttggtggaagagtttccagaatttaaatttccctcccaaaataaatttttttacttggaaggttatccaaagtgctttgcctattgtcgttgcattgaaaaggatgaaagttattaacccgatgacttgttcattgtgtaaccatggttgggaatctataagacatgctttgtttacttgtgggtatgcaaaaacagtttagaaggcttcacagttcacaattgattaccaaaaggctcatcatatgcatgatggagagtatgtgatccatttatcatcgctatacccaaaaagagagtttgaaactctgatctgtataatgtagggtatttagtttgaaatgaataaagtttttcatggtggaaataggcaagatggttcctatattgcttcctatgcagaaacctactatggaaactgcatcctttctcacaattgtgctaaagcacctactgccatggctgcccctactacaactaaacaatatcctatgccaacgaagggagtcccatggaggccacctaatctgaatggtatcaaaattaatgtggatgtgacggtcaatcaggccactaaaactttggacactagagcacttattcaagaccataatgaggttatacttgctgctattttttaaaccagtctaagattgttttcaatcagacaagatggaagcaaaggctctttttcatagcatcaactgggcatgtcaactataaatctccataacaaatattgaaatagatgttttaagagtctctactgcgctatctacaacatccttagatttatcttctttccaagatttaattttttatgttcgttatcttttatcctctttccttagagttattatctcccatatttggaaacatactaatcaaacagtatatggtttagcaaaatatgctctagagttggatgaaggtgtcttttggatgggcaaaattccccattctattttctctattgttgtaaatgactcctaatttataataatagtagaatttattctaaaaaaaagtataatttattatttcttttctttaattaattattaatttagttcattgcttaataataataaacttataatttcagtgtgaaatgttaaaaatagacatatgtcgatcttgaaactaaccaaatttactggtatggaaccaatacaaaatgatttgatggtatcataataatattaataaattaacatggaataagtaatatatatttgtctatctttgaataatgtataaaattcaaagagaataattagattattttttaataataattactgttctattcataaaaaaataacataaattaattttctctaccttttaaatttatcctaataatctattaatgattgatattgtcctacataactatttatgagaacattcttcatgtaaagccatcaactgttctgccacctgtataatcaataatataaatataattagtagttaaagtaatatttgttttaataaattgaagaatatttttataaacatgcatatatatatatatatatatatagttatatgaatattatttctagtacaccacttatatgcgtttcattcaagaaaatattttattctatatttttttcataattgtacgtgtgatacttatttaaattcacttataaattttataaaattccaaacaatttaaagtatcaaaaataaatttaagacagttatttaccacgcgcataagaaaaaacaatcacacg

SEQ ID NO: 71099 - DNA, 1791 bp, Cannabis sativa
atgatatatatacaaataattaattattttttagtaattaattagtattaattagctactgtttagtgtgtaaatttgccaaaatatagttatcaactaattaattgattgggaaatcattatatgaactaagcacatacttatatatattaattaaaattgaaacaatataactcgattggctatatataatgtcacataatattacaaataattaatgacattaaactatttttgttatattaattatatattattagctggtcatatgcaatatgtttagcattaattaatatattgatcataaacaataaaaaatcaagtatatattaaaaaaagagcataatcaatattatttattattattgaataaagcataatcaatattattaattctatgtaaacatgcatattgatagagtagctaggttttgtgagttttttcaaaaataatttatttattttttcttacaaaaaaaaaaatcaatcattgtcaaaaatcaccatatagaaactaaactattatttataataattaaattattaataaccatatatttatatatagccgccaacaagtgttattatataattaattaagttgatagtgattgttgtgttaattgagatgatatataaaaaatgttttaattggactaaatttttgtaacgtgaaaatatatgagatgattttttttattggttggtagaaatcggtgaaagtggttggatacatataaatatataatattatgtctaagaagaaattaaccaacatatatataaaatctcaaaatattataaataataaaatccatacatatttttcatatctactttgaattttaattatatataatatacatataataagtcaatatcaggtacgagatttgtgtttttcatatcgaaattcctaaaatacccctatctaattaagcaacaatactatatagtggtgggtatttggtaattttcttacataaatgtaacaaaaaataatagttttgtactttccaatttccatgaaccatctttgtcaaagtgttagctgtaataataaaagaaaaaaaaataattaaaataataataataataaaaataagaggattactactagttaacttctacctctaaaattacatgccttaactttttattgtttttatagtggtaattaattatagtttgaatataattcccataaatttacaagaataatgttataaatatatagcgaacaccatcataaaaaaaactaaataaaaatattttgaaatatattttcagacacaaaaattattaaaagattataatagaaaatttgatagtagatagcattcctctaattaaactaataataataataataataataataataatcagagtatattatatagtagtaattaattaccacgtgagataaattaattaattaatttaataatattataggtagagagagagcttgaagttgaatactgaaattaataataataatatgggtcatatatataggtgccattaatataggtgctgcttgtttcaccccatttaagaacattatttataagtagtattattattactatatattgtgtgaataagaatatatatgatgatgatgatgaatatggaagaactcccaccagggtttagatttcatccaacagatgaagaattaataagttattatttagcttcaaaagtttctgattcttcttttacttgtaaacctgttgctgttgttgatctcaacaaatctgagccatgggatcttccaggtat

SEQ ID NO: 71100 - DNA, 1591 bp, Cannabis sativa
ctttgaattagctcaagaccctattgttactctttgtggtcacctcttttgttggccttgtctatacaaatggcttcatcatcactcacaatcacaagaatgccctgtttgtaaggctcttattcaagaggagaagttggttcccctctatggccgtggcaaaactcagtccgacccaagatcaaaatcttattcgggtatggatattcctcatcgccccaccggccagagacctccaacagctcctccgccagatgcaaatcaatttacaaataatgggtttggatttatgggagggtttgtccccacggcaactgcaagaatgggaaacttcactttggctactgcctttggtggattaataccatcattgtttaacatacactttcatggtttccctgatgctactgtttatggcacaacttctggttttccttatggattccattccttttatggtggtcatgctcatcatggctttccccagccagctaatcggggttcgaatgccgataatgtcttgaagaaccttcttatggtggttggagtatttgtgatccttgcactgatttgttggtgatggtgaagaaggccacattctgctttgtagagaactcaaaaaaagactcaaaatccattgcaatatggtacttagaattccccaattttctacatgtaaatacattagctttgtggttaatcttctatgcctcccaatctttttcaatgttgatttttcttgttgccaattgtgttatgagtatatgcaagacacctaatgttttcctaatatatgtttttcaaaatttcaatcttttttgcacccaaatgaattgcctttatgaatgtcaacttcaattttgtgtaattattttatatatcataaatgggatctttttctaagtgttgaattagtaaaaacaagatcttttcaaataaatggcctttctgaatgagtcttaagtgttaagtttggtttatatggagatgttgttggcgtattattctgtattgagaaatcctaagtgatgaccctaatagtcatcttggacttgaccaacattttggtagttagaaataaagtgtcagagtcatcgattttgctaagctatctaacagataaagagattattctattgttagaacgaaaagtaagtttaagatatcttatttgtctaagttctttattgtaattattattaccacgttttgggcaggattttgttgaagttttctgctttggttaaatttaggttctctgttccttccttgagagagacaccattgggtgtgattgttgtgacatcagatattcagatctaatctatttgattagtttaataaaataaaataatacacgcttatatccctttattttccccctattattaccacggcacccatgcgagacaaccgcaccttttataactagcgccgcatgattgttatatgtaactcgatacttaattacactaataatgatatgacattgaggagggtgttagacactagaggtgtcttttagcaattctctattattacttattttgcttgacaaagtagtgcgttgctattggacatcagtagtgtc

SEQ ID NO: 71101 - DNA, 1197 bp, Cannabis sativa
  modified_base (1133)..(1153): a, c, t, g, unknown or other
ctttatcttaaaagttatttttttccttatatggtcacttagggagattctagaaaaactcttaaggatttatcaagccaaatatgttcagtataatatctaaagatgaacattatatcctcacaagattctagccacacaattagtattttcaacttcatgtatcacaagtgaatatatagtgagtatttattgagttttcactcccatatgaacatgaatagccaccataaaattcttggttgttaccaatcataaaatggatgtttatggtattaattggatcatttagaagtgttttgagttcttaaaaaggctcccaattttcaaaaaatgcatataatgccttgctgaaaaaaaaatctattttttcagctttagttcattttttttttctaaagtattccaaactactcccacttgattttgatctatttatatattttataaaaatctccaccagcaatatttttaataactgtcattcattcacatttataaataattactaatatcttttactattaatttaaaagtaaaaaaaaaaaaaataagaatcaaattgaagaatttgtaattcttattttgtgatcactctatacacattttgtaactctattggacgaaactattattttgctatacttaaatatttaatctaaatattatattatgtaaataatataacacaagatttggtagtactaattggcgaacaaaatacttaattggcctaattagaaataatcaataaattaataaattaataggaagttgggagaaaaaaatgagtgtccacacaagtattagaaaaaaaaaagagtaaaattatagtaaatgatccaaagatatagtagtaattaggtaaatgtacattttaagtcacgtagataaatgacccttttatgttatttaatccttaaattttcatttgccacataaaattttcttattttcacgtttttaatgtttaacctatattttttattttttatttttcttcatcatttttttattatttagaagaatatcacttaaatattgtggatgatatttatttttaattatatataaaaattcactacaaaaaaaaaaatactacttttagtcacaactttttagtcacaacatannnnnnnnnnnnnnnnnnnnnacttttagtcacaacaaaatgtttgtgactaaaacatagtattt

SEQ ID NO: 71102 - DNA, 2306 bp, Cannabis sativa
ttaaggcataaaacccaacaattctttcccaggacatccatataataccacgacccttgcttgatgtaattttccactaaaaatttgccataagcttctcaatatcctcacaaatgcctagaggaattaaaaagacactcatagcataggttggcaaggattgaatcacagtcttaagaagaatttccttgcaagctcgtgataaaaatttgccatcccaactattgatacgagccatgaccttattatttaagaaaccaagaatagaggtcttgtttcgaccaataatgttaggcaaaccaagataaagactgtcatccgacgcttcaagcatcccaagcacagagcaaataccagaatgagattgggcagtagtgttaggactaaagaagacagaagatttggaaaaatttacttgctgtccagaagccaaatggaaggtatggagaaaggtattgacactcatagcagcttccgtagtggcttaacaaaagagataattgtcatctgcaaagagcatgtgggttatagagggggcaccatgagccaccttacaatcttgaataccccgatttgcctcaaacttgttaataagcctcgtaagtccttcagcacacataatgaacagatatgttcaaagaggatcaccttgctgaataccgcgggatggaatgatagggccaacaacatgaccaccatggattacattataacggactgaagtaatacaagacataacaagatcaatccacttcgaatgaaatcccatatgagacatgacaacatgaagataattccactcaacacgatcaaatgctttgctcgtgtcaagtttaagagccatgaaccccttcttgccctttgtttttcgttttaaatagtgcatcacttcaaaggctatcatcacattatctgaaataagtctaccaggaatgaaagcactttgattcacagagataatctgatcaataatacccctcatacggtttgcactttatacaaaagggcaatcgaccgtaaatcactcatggaaacaaagttcttcttcttgggaatcaaaacaagatttgtggtattcagatcattaggaatgacaccagaagcaaaaaaatcagtaaccatgtttacaatatccggaccaacaacatcccaatgtttttgatagaaacggggccccataccatcaggaccaggtgccttatctggatgcatttggaaaagggcatgccgaacttcatcagtagaaacaggctcatttacaccagtatcccaacctgaccagtcaccgttcgatttttgcaactgataaatttgattacttcgtttacgagagctagcagtggcatgaaaatacttgctgttcttgtctcctgcgtttaaccagtattgttttgatctttgattccaatagaagtggggaaatattattaattaataatatttttttttttcatttttttatgttactgaacgagtcattctctttattatcattattatttttttttaataattaataataaaaaaaaacggtttatcttgggtttagatagatttttattcctcttctggctactcttggtggtggaagaagttgtggggtcctatatccctccgaaggtgaagatcttcgcttgaaaattttcatctaattggattccttccaattgcaatcttaccaaatatgggcttctgaggtatgagtatgcccccttttgtcagattcagttaaaaacaagtcaccatgctttatgggattgttcttcactttctctttgtcgaaagctttgtgatgttaaagtagattatcctttgatgatatgtgttgatttcctttagttcatttacaagctcattgattcgctctcgatgcattagattgaattgatcttgtttattttgtaacaaatttggttcagacagaataaattagtgcataacaatgttttaattcctctttatctgtgattttctttttgagctccaacatgatgattctcgtactagtgattaggtgattcttaagtcgattgttatgacttagaacgatttgatgtctaattaggtggccgatggtaggtgggtaccaccgcatggaagtatagtcaagataaatgttgatgcggcgcttgattttgagtctggaatttgtggtttaaggatgttggaccgtaatattaaaggagaattggtggtgtcgacgatttggcacttgttgggcaatttttcacctgaactggttgaggctttggcgttgttaaatccaactttagtgtcgattgtttggttttactagcattcacttg

SEQ ID NO: 71103 - DNA, 824 bp, Cannabis sativa
tatgcatgtcttactgagtctgttgactcatcaattttctaccttgtgtaggtaagggtaagggtaaagtggaggaacagtgtgtgaagggttcgacattgattgtgcatatcgtggtagcgcaacttggagggttccgatcatattgtattttgcatttggttttcatagtcacatcgggcatatgtgtaaaaaatgttaccataagtgtattttgtatttttcaaacgtggatattaaatcttgggatcccaacttataatttatgtgcatatatataaagttttaaatagttttatataagtaaattaaaatcaaaataataaggtttatcaagttagagtattacaatttggtattagagccactaggctgtttactgaaggttgttaagatatgaacaatcaaggctagagatgagctcaactcacagttctgtaagcttttacctattagaaaatggtttaagcttaaattttaataaatgtgttgtaatttgttcaaaatccataaatatgtggtcttgagcatgtattgaccactgtctaacctacatgccttgtggattcaaaggctaagtcctaaattatggacacccaacaaaacgttaaatttcaatctataggtaggcttttaaagctgcatatgttcaccatcatcagaggaaaatcattaggattttttatatgccttctcctctagttcactgtttggtattgattaatgaattgaaacgagcaacaaatacaaggtactataataaaatcttttgcaaagacaagtaaaaatgtaaatctccattgttattgattcttagttcaaaa

SEQ ID NO: 71104 - DNA, 1856 bp, Cannabis sativa
aataaaatattgtttctgattattttctattttaaaccgatacatttctcacattgattattctgattctaattacagtttagtaaacgcgccactaagcatttcttcaaaaatattttgttaatgttttttaattttaattatatatatgtgtacttatgttaatagtatatatatatatcaaagtaatgaatatttattagaaatataatatttaaattatatagagaaaaaaataaaaaaattaatacacattgtaatgtaaatatttgaagtaaaataaaaaaaataaaattttaatgaaatgaaataaaaatactgttgtgagtgccctaaaacataggaacacattttaatttttttttttttgtttttttaaggcaaagaaacttttattagccagcaaattcagctactaaataaggtagcaaatcagttgggatatccccaaactgaaactatgatcaggatgtaagatggaagctcttgcaagactatgagctactatattaactgaccgcttaacaaaacaaattgaaatattttttaactccgaaataacaataccaccgtaaacacttacagtctgaaataacaataccaaataatgaaatcatcttcacctgactctaagtgcaccaccgtaagacaatcagtttcaacaaaaacttgctgccttggtcttctcttcaaccaactaaagtactaaagttaaacgtgcttgaaacacattttaattttagttaaacgtgtaaaagataaattaatgaatttagtactagagtttacacttttttaaaaaaataaataatctaattaattctgcacttatacacatcattaactaaatggtaagctgtatatgtaaactgaactgattgttacaaccgatgtttgagcaaacgttgtactccatttattttacttacaagaaaagaatggatgtcaatgtatacacaacaattatattatattatatattaagatatatcaaagcataattaggtcaaaatttgctttaatggatcaccctttttttttacatgttaaatatcaataattactttactataaatattttatataaaattgaattcttaataatcatagaattatatttattgagttttattgcagtgtccaataatataatcaattttaatgattaactctcattgtgtcgattcgcaattagttttaattaaattactattttacccttctaattacttctttatccttaagtactattttattcactagtgaaaatataatttagatttcatctaaatttatgcacaatttcagttccagaattaacacttaaagggaaccaacatttgatctgttaagaaagtcaagattctataattgtagatcatgttcccagccatccacattatttgaatcataaaacagaaattgtaagaatcatcttctcttagaaactttaacgagtgaatcaaagaaattaataatatgaacaagagtatatagttactcaagatttagaccgatctattgatcatcgttatgatataaattaggtctttatagtaaatgtcatatttgataaagacaattttattcatatcggtcctcgtcatatgtaatctctattatatacaacacatttcacttagatgtcatactacgtcagtaatccaaactaagattacttgcaccgaaggacaaacatcaatgaactgtactagcaaccattgattaaagattctatagctttaatatgctgctaactgttttattcatagctaagtgatcttagttctataaagcaacaagtcacatcctcatatatgaataagatatttttttatatatatatttatataaat

SEQ ID NO: 71105 - DNA, 1318 bp, Cannabis sativa
ctcacattagtttatatctcattggttcaatttttcaaataccagcattttcctgctattttatcctccaaatttatatggccacttcactaattctatgataaaatggaacagattgtgacaagaggactacattatagtaattgcaataccttccatatctataggtgtagttggttaaaggcagaagaccagtcattacagctgaatgaatgaagccagggtcatgccacccaaaatcttttgctgggctaactagaatatccgattctgttttgatttttcacataattaaaaaacatgttattgtaactagtaacagaaaacagaaccaaatgccatagtaaaattagtagaagtggtaacttactacacatatctttctgagtaaaagtggtaactagtgaagtttgtgttttcccatctccatattgtacttgttgaggtttattatctccactaacccatgtcactctcatcttcaaatataaagcaaagaaaccataaattcattggtaacatctatatataaatatatcaatatcaaatatggtaaagtgtcttgaaataagatcactataataatgtccaatttttcaaaattaaagtataaatgtaagatcattaaaaactggcctaaattatacataaatgaagttaaatattaaaattttagagtgtacatgtacacccttagtcctataatatagaaaaaaagagtgtataataattagaactataatatatcaagacttaataacgtaaaatttgatacttaattatactaattaatacgaaaaataaatattgtacttacagatgttgatgtggaatctatgctgttaagatgtgcatgtaatggcatgttggggttgagaaaggggagaggacttgtcctagcaagagtgcaaggtgtgtcgaagccgccaccaaagaatacgaaggaaatgtcagttcttatgttgatgatgtgaaaagatacggtggcgctgcatgttgtaacctcgcattttcctcccttgccttgtttactacattctttctttttgcagcttaggtagtctggatctttctttaggaagattgactgcgaaaatgtaattaaattattgtattgtataatattatattaaattatagtttatattatattagagactcacaacacttaaaggtggtgctagtaagaaattataatattaaattatgtatggaactcgataattaattatattactaacgatgtcatatgttgaagagtgctagctaagcaacactgatactttttagtattttttaatttttatttatttattta

SEQ ID NO: 71106 - DNA, 1537 bp, Cannabis sativa
aaaattaaagcttactacaaccatgggatagaagtaagatgcatgaaatttacctcatcatgatcaggaaaatctagctgggcaagaggagagcatggccgtggtgtttccatgaacaatggagctcctaacggatatgcatcatcaggagaaaatccctgtgagagttgcttcttgatgctcaataactcatcctaatgataagggaacaatgagtgtcaaattgcaaaacaaacctagatgttgtcttcgtattcaaagatatatatatatatagaagctcaataggattgacacatttctaagttgaccggctatcctatccttcattccaagaccagccaaagtgaaaattggaatgcataatcagcataagatttcttttaaccagcaagaaaaattcaggtgtagtgtagccagttcataaatttccagtgtagtcagcaaaattataactttttttcaatatcctcttccaattaatgtacactaaacttgaatttgttctacgtcaattaattttcaacgttattgatatactttgtttacaagaaccttcctatatttcacaagtccacatgattagcatttcatttgttgaatccttctatagttctgtatgactttggattttccacattttaaatgcctcttaataaaccagaagaaaaggcaactaataaactaaagaaaaattgattctcacctctgacagttttgtgaatttattcatgaagagggatatcacagtttcttttaaccgttcttcatctaactctattgctgaaagagaatccaatgcagaaacttcatcgtcctgtgatccatatgatatatcccccttatcataccctgtaaaagccgcttgcagccatgcatcatcaaccaattgaagatgaggatcaacctataaatatcaatattgagaaaggttaaataaattacagtaaccattgtcaaggaatttgacaggacaacaaaacaaagaaaggcccatgaacttttgaatcaagagatgttagtgattaccgtcttatttgtcaatgatgccttaacaagaggaattagctctgggaaattgccaacccttgcggaaaatataatcatgaatgatgcaaaggtaaaaagagactttctgcgagagggctgcccacctaaaacgcatcaaataaacaaaaattaggacagagcacaaccatactacattactatcttctcatttttaataaataccacaatactgtacttgacaaatcaatcagtacaagtgcatgtacaattttaatcgaatttattttttaaaatttgatacatttaaaaaaaaatcaaatttaattattaactttctataaaagtaaaaatatgactaaaaatttaaaataatttaatttaattaaaccataaatttgtctatcaataatattattcgtatttctataattgaaaacaattaaagaaaacataaaatatatatttatattaatgacttaaaattttagctttttaaaatataataatatttttattcttaaattta

SEQ ID NO: 71107 - DNA, 1135 bp, Cannabis sativa
aaaaatatttactattcgatctgatgaagaaatataaatataaatttacctgttttggacattttctgagcagtagtactttaataaatttaaataaataaataattacagctagctataatataattcaaccaacaatttaaggccataaataattaataatcaatgctatggccgaaactttaaagtagataattgacaagagtcatctctgttatggaaaattattaatacgtacgtacgtaccattgctgcattgcatgtaattaaaattaataaagagtttttatttttactatctgcagatgtgatcttttttaatgtagatatataaataaataatcatagtgaatagtgatgctgatcatatttgaattaattggtatatacagatgataataataattaaatttgttcaagaaaagttgatatatagacatacattttctgttttatcttgtgctctatctcttttaataacacaaattatattactctgtcaaaatgtataataattgaaaataattaatgtataaattatttataattagattttttttctttgaaattttgacgtagtaaattgtacaatttttcacatgaacaattgccaagttagtaaagtgaaccaaatttgataataattcttaattccaacaatctaaatctataatatcagagaatttcacattattgatttgtggaaattatataatagttagaatatataagatccataatttacttttttcattgtcaataaattttaaaatgaaatttcatgcatcttacaattttaattaacatgtaatgacttgaaaaattcaaaaacacattttgacacatatcaaaactcgagcatgatttgatacatatatatacaatatttgtgacatgcatttaatacatacttctacgatctatctttaaagagtattgttattatacactatgcccaacaccttctatagtaacatttcagtacaattaattcaccatactttttaaaaattaattttttaatttatacatacttaattaaatcaataacaatataatactaaaataaatataagaataatattttttaacaattctcttactctaatcgtgaatattcaaccatgtaaacaaa

SEQ ID NO: 71108 - DNA, 1004 bp, Cannabis sativa
aaccatttaatagtgatccaatgactaaaaaaaaatgtaaccatgatagttacaataaaaatgtaaccattgaaacctcctccatatatatatatttacatattatgaataagagaaattttattgctcaaaaatactacttagagactccaaacaagactatgagaaagcctcaaaccaatctctaccctttttatttattttcgttattttaaaatgagaaaacctataatacaatatttttcttttttgatctataatatgtacattatacactttttggtcccacaaattataaatatttctaatcttccaaatataatacaataaagcatttatacttgccacctaatagatttgctagacattttataactaaagagaaacaaagacggaaagataggaagaaagatagagagaaagatgaagaaatcgatagtgtttcttattacatcaatgtaccaatgtggttacttacataaaatttgaattagagtctaagactctaacaaactaacagatttgatctaactaacttgacaactcaccttaactactactagtaaaactaacactaactaattagctattttaacagtccccctcaccattagaattgatgtattttcaattctcagtttgtttctaaacatagtaaatttttgaaaataatacaaatattcaaacaaaatattagtaacaagccaataaaaactatacaaaattatattgaataaatctagagttgtgagcaggggcggagccaagattaaattctcggggggccaattattaaaatataagtatcgataaaaaaaaaattaacatttgtttcaacaataaaagttgatactttaaataaaagacatattcacataaataagaaagagttttgaaggcagtacaattaatacataatcaaaattttaagagaagaactaggaaaatcaaggtcaaagtttttattaggaatattctacttaattaggatacttaattaatta

SEQ ID NO: 71109 - DNA, 2958 bp, Cannabis sativa
cgttacaaaaataaaaaatatcatccatctattaaagagtaattttaattcatttactaacgatttttttactcgatcataagtaaaatagttcatattcttatatatgattcaatatttttacatttaattcatgtgggacaatattgttgaatactctcagatcacttaagttgtttttcattcttgaatattccaaaaatgggtactactaagtcggttgaattctataataaatacttgttggcattctaatttctcttcttcttttaagtaaagttatttttgatggtaaatatccttcctaaatatttttactttggaaaaaatatttttttagcatggaaagaaaattataaatatttaagtatttaaatttattaatgatgtaataattagacaaaaaaaaaacatgggaagagtaatatttaatatagagatgagtagttgaaatgtacttaattcctctactttcaacatcatcatctcttatactcgatcagaaaatgtactttcaaaataaacctaacataaagaactgaaaaataattaacattcatataaatatagcaattaatatatagtcagaaaaaagtaaacacaatccaaaataaatacatgtgaataaaatatttattgttttgggaactcgagctacaataattacggaaactgagaaatatataattaattattagatgcaaaaagaaaagaaaaaaaaatatattcttttgaaaagttctttaaattattacttaagtatgaaattataaagatatcagtaaaacgtataaaattgttgaattaattttctaaaaaagtcattaaattataattaatttaaaggtaagagtacattaactttttcttagagattttctttttaccaagaaaagttaaattataattacgaagatcccgaaagccaataccaccatcatatttgtgtcgacaaagcctctttcaactcatccaacttacactcttactagaagagtttgcttgagatttctaccaaaatttagacattaaaccctcaaggttagaacaaatctcttttgtcaacaagaacacactcatagcataggaaggcaatgcttgagcaactgacttaatcaaaacttccttgcccgcctttgacaaaaaacgactttcccaagagaagattttcttttgcattttgtccttaacgaaacccaagatagcatttttattccttcccataatgcacggcaaacccaagtaaaagctattatccaaagcctccaccgtccccaacatctcacacattctttgtctagtatcaacactagtattattactgaaaaagatggatgacttagcataattcacctgctgaccagaagttcgttgatacacttgaaggagttgtaacactcttacagcttcatcctcattagtcttacagtacacatagctatcgtcagcaaatagcatatgagaaacacgaagggctcctctagcaacttggcagccagtcaaccaacgattgcgttcatattgttgcaatagagaagaaagtccctcagcacaccaaaaataggtaggaggatagtggatctccctgcctaatacctctcccaagataaataggccccataatcttccctccataagtaacattagaagtaaccgtggacacacaacacataatgtgggagactactttgcagcaaaaacccattctaagcatcatagcttccaagaaaggccaaccaacaagatcataagccttgctcatgtcgagtttgagtgccataaaaccatccttacccaccctttttcttttcaagtaatgcataatccaaaagataccattatattatcagagatcaaatgccctggaagaaaaacactttgagtggttgatataacatcaggcaaagcaagttttaatctattagcaagcacctttgagataactttataaaccacattacacaaggaaatcggccggagatcactcattagctcgggaacctttttctttgggatcaagataatatttgtattattcagatcacgagggagagtcccattattgaaaaaagatcttaccaaattaacaatatcatctcccacaatatgccaaaatttttggtagaaaaccggagtcataccatcggggcctggggacttatcaggatgcatttggaatagagcttttttaatctcttcagtagtaacactttctagcaataaaacattttgctcctcagtaacactcgattgtacgcagttgagcgcatcaccaaaaacaacatcttcataaccaaaaagttgctgaaaataatcagttaccacagttggtaaatcatcttcccaaccaacccactctccatcattattattcaacttctgtataagattattttgacatctcgaggttactttggcgtggaaaattttggagttttgatccccttctcttagcccctgttgcttgcttctttgcttccaaaatatctcgcggtgcagcaagatattattcaaattaatttgggcagctttataattattgtcagcaacaatatctcttgctttcttccaccttcggatttcaactttacactcatggattctcttcttaaaatttcccgtatagtcactgccccacgcaagtaacatttctccacattgttgcactttatccatcaatggcaaaccggctgtttgaagccacatatcttccaccatcttcaaacaaataggctccttcaaccaacaattttcaaacctgaaaattttattcctaacaggggccacgacattaacaggagtcaataacaacgggcaatgatcagaggtagaaacctctaagttaaagagtttacccatgagaaataaatccatccattgttgagaaactagagctctatcaattcaaacttctatccaatcattagtacttcgtccacgctcccaagtatacgggta

SEQ ID NO: 71110 - DNA, 2311 bp, Cannabis sativa
  modified_base (2021)..(2022): a, c, t, g, unknown or other
cgggttaacccgaccaaaccgcccaaaccgttggtcggtttatagaattttttttttttaaattgggcgggttgcacttaaataagaatccctggctaaaacacaactcaatattatttaaagataagagaagcgtacgaacatcatgaactagtagaccaaaagaggatgacaaagtaatttggctattagtttccaaaatcaattgtccctacaaatgacggtcaatccagcttaaagcttcttttatgccaacaaattcatttatttcaggttgcacatgccatttcggcataaaaatccctgccattttctctgctgcctccatccgctgataactactcgatgccatggacacccgaacaaacccagaaccaagaaccagtaactaacgccagaaaccaataaaccaaacccaaacccaatgagagaaactataaaaccatgtcaaaagacaagacgaaaacaataaactatctaaaaaaaccatgtcaaaagacaagactaatgagaaaaacctaattagtttcaacacataaaactaaaaattctaaccccataaaaaatattaattggaactaacttaaaacagtaaaatataaatataaaataaacaataaaaagaacaaataaactaaaagtaaagagtaatttttcacatacgaaagctaataaattaaaacaaaagatctaaaaaccaactaataaccaatcggaaccgaaagctatactcgttcactgtcaaacctcctggacggaacccgcatgaaaccgatttaccaatcgcacagtatcttgggcaacccactcataaaagtgtgtatattttaataaaatataatataaagatatttttaattaataaatacgaaaaaaaaaaatatttttcaatttagtttggaatctactcataaatgcacgtggtgtgtatttttatgggttttttttttcagttttaacagaaaaaaaagtaacaatattacaaaaatacttttacttggctaaataaacaaatatatatatatatatatagagttcaaataaaaaaaattacccaataccatttacacacaccttcaactcaagatccatgcttcctgggcaattatcgcgcaaccacgcagcaacctaatgcaaccgaaacaaaaaattcaactagaaagagaaccacctttaattttagcaatttcacctaagaagatgactaaaataatcaaaatacgggctgtttcgaattaatgataaaaagtatagaaaaactactacgaaactaaaattcaactgaaaatccagtttaatttgcataaaactaatgattataatgatatctttcatatattgataatgttttatgtaatatatacattatatacgtatatgtacaaacacgtggaaaatttagtttttgggtccgtgtttgttctgattttattgtttcgttttcgttatttatttcaattcctatatgcatcactacattcatatagtattggaaatcattctaagcatgaaaattaattttagaaaacaaagaaatatcaaaaaaattctgaaaaaacaccgttcggacccgaaatttttgtgtaaatttaaagtctttgttttaagtgttttcgatgcatgaactctatatggatggcttaatttttacatttagatacatttggaattgatttggagtcttttggtcgtcgaaaacgaaatttcagatcgggtttgggtcaggtccgaagagttgcagaaaaacaggtaaaaacgacccagtttggctgaggaagacgacccaaacgatgtcatttttccagttaattttggctgttgtggtttgctcaaacaacatgtcgtttttcccttatggaaaacaacatatcattttttgtcgttgtgggcagcccttcaggttgaaaaacgacgtgtcgtttttccccttgtggaaaacaacatcgttttctacatgcattatcagccctttagaatggaaaaatgacatgtcgttttgctttttgcaaaaacgacatgtnntttaggcagtgttaattttcaaaagagaaaaaaaggaaaaattccgaattttttataaatttttatttatttggaatattaattattttcctattttgtattaatttagtcaataaattatattcattcaattttcatttttaatttaatacatatatttataattaatatgttagttactataaattattgaaaatgaaaatttgttttaatttggtaatttattacatgatttatttaggcatgtaataattgtgcaatttgtataattgtgtatttaattatttat

SEQ ID NO: 71111 - DNA, 2141 bp, Cannabis sativa
ttaattaaaataatgtatacaaaattgtaaaataccctaaattaaatgatatgtatacatggaaacaaaatttaattaggattgagtttgacaaaaaaaaagataaataattaacctcagttgttgatatcaattttgagataccttcaacttcaagagtggggtcgatatagagctttaatgcaaatttctttacacccattatgtcatttgctatgaacttcttttttgctttaatgctctcttctctattccactccatttatactatcctcttctcactttggcctgtataaatttaggctaattaaaatttttactctttgaactttaatatgtattaagttgtgtctcctaaatttgaatatgtatcaaatcgtatctcttgaactttgacattaacttaattctgttccctgaactttcattcatgttaagattctattaataaaagtagacagaagtctttaaatctagcaattttaatagttcaaaagagatcatgcttaacagtgaaataataggctgcttcttgattttcttcgagaacaaactatattaaataagaatttattaatttgtttaataaaataaaaacccaatcaattttagtaaaaatgttatcaatgtgagaaagtcccacattgatatatgtgtgagacattaatactatatgtacacaatttaaataagatcgatatgattcatactataaaagaaactacttgataaaattgaaataaatagcatgtatacattaatttttgatcataaacatagaaatgatggataacatgactattagtctagctttgccaaataatctttcagcacaaaacttttatacccaactaaacaaagagttcttaaattttcaactaaaattttgccatgcattgttatcttcctgacacattattctaagtgtatgtgaaacaacagtatttaattgtactttttatttttctgatcatttcaactttacaagagctattctactcaaaatcagtgtgacaaattcaatagtaataacttcttttgcaaccgaaatagtaactaggctcatcaataatctcaacaatcctccctttgcggcttctaaatgtgtattgatgtttttattgttgtcgttgtcttcaacaataacaagaatcaaatattattgatattacttttagggaggcacttgatgctattccaaatgttcctgcaacacaaaaatccataaaaaaaacttaaaaaattgaatgaggatgatgataatttattagtctctgtgggtaccgacaataattgcaccatttgccaagaaaatttgttgtttgaagattggaaaatcgtagagatgccatgttctcatctttttcacaagaattgtattgtttcttggctaaaaattaatcatttatgcgctttatgtcgctactcgatgcctactgtcaacgttgttgttgctgctgaaaattaatactgttatcaacacaccaacactactaccttgtccaaatttgtattattcaaaatattgttaacatttttttgtttcttttgtaatttagtatttagatgcttcgatgatcataattattattatggacattttaattagaattgattgatataatataatcttttgattgttcttgatgtgaattcattttttttttaattaaagttcaacttcattaaatcaaattatccgtaccaatggatgagtaaaaagggggtaaagaattcctactaagaacacgattaatctccacaaatgaagctcacacaaaggtgtccgattttctccccgctccctttaatgcgattctattaatatataacgactgattccttctcagatttatttattccacctgagattattaacagattattttacaaaaacaaacaaaaattgaacataaatcatcaatcaaaaccttaaatcgtttaagacatagccataaaaaaaaactaatcctgtattctttataatgagatgaaaaaaaatgtacccttaatcgagtataaatgtttgatgttaattaataaaatagcacaaaaagatgtaaagtaagataaagaaaataattttcattttctctcaaagaaatatatattgggatttataataggttgtttgacactaa

SEQ ID NO: 71112 - DNA, 6752 bp, Cannabis sativa
aatgataaagagaacaaagttgataggtattcgagagaatcaaaggaagcgatctgattcacaaggttcaaatgactctgttggcgggaaacgaaagatgctaattaaggctcatgaccatcaaaagcatgcatttatagaacacaaatataagcttcatttcttttagaagattagctgacaaataattacagaaaaatttctctcaacatgatcaaaatgcaaaaaaataataataaaaaaaagtgagtgaatgagtagaacaataagaaacattacatttttggatccattatagattataccaaatgttctctatttacaatatctataagtgggaaaaatcacaagtatgtttttgtattgtttgtcaagttgttgtgattatgtaaaatcttcttggaaatttagggaaaaatttctagtgtacaatataaaataacaacttctcaaattagaactctctgtctatttgattaaatgcttctaatactctaatttgaagagggcaataatagtcttgctactcaaaactgcacttatgggctatcccccaagacccctttcacctatatagtttaataacataatgaacaatgcagcctttcaatattctaattggcatatattgtaacagcaaattatgcagccataaaatattccgagaagttctttagtgtgagtatccattctatgttcttgagacagaagtaatgtttcaatctcagcaacagagtatgcatcaattgacagaaataacaaatgtatcataaactaagggcactttaaagattgttgaacatgttcttttgaggaaattttgtggccaacagaaccaagacgatccacaagagtcttgattcgaagcaagtattcattgatagaaagagaactattcttgcaattttgaagttgaatggtataaagatctattttagctaaggtttgagtaacgaaatattcttctagcattttttagatttgagctgatgtttcagcaccaacaattcgagtaaggacaccatcggacatggaggacaacaaccatgagtacaaaagttgatcttgtacttcccagtctgtgaattgaggattgttctggtgacgaacttcatcctctttagtgagatattttcttggaggctaatgagtattcgagatgaattgctcgagtcgatggcctctaatgagtatccaagtattcactgaaactttgtaagagaaaacaacaagagtgaaggtggaagttgatgaagatgccaaagctgagaagagaaaacaaaggagagaagacagatcgacaacaatggcggaagcgaaagaattactctgatgccatgttgaatattgagaaatgaaaaagaactgattcattgaattcaattgaagagtttcagctcatatatatacaagtagagagatgagttagttagactaagctcacaactatattctgttacaaaggacaactaagcaactaactaactacttaatagagcaatccttagattgtttcaattcagcaaatttaaaaactttatatatcagcaagttaatgacatagaaaggtgttgtaaaaattgcaatagtatgcaaagtagtcaagtcattagtacaaagctactaaacataatcttaattataaatgaactaaagtaccatttagcaaagaatggtaataaaagtcatatccctattcaaaatgagcagttacttacagcaatgtaaagtacctaaaaaaggactttttcattaatagataacgattctaaagaaggtgaaatccacattaaggcatccttcaactctatctctttttcaggatcacaattagtaataactccgagatgcttccaattcaacaagggatatcgacatatgttcttcaagttttctggccagatgagagccttaacgtgtacaaagatttataaaaacataacaatgttaaatactgtatataaattaagtaagaacttaaaataacaccatagaatcaaaccaatgaaataaaaacataatgtaacataaacataccttataggtgctaacatgcaatgtcacaatattccaagaacatttgagattcacaagaaaatttatcatatcgataaaccaatttgtgtcatagtctttctgcggcctatcatggattacaatttttccatacaatgaattagatgactccaccgatatgctaaaattgatattaccttcgtaacaaaagtatgttaattttgaagttggtttaattgtaacaacattcatcactccatcatcatagggttttctagaggaacttctcatgtgttggctcgggtattcaatgtactcccaatgtaatagattgaagtagcttagagtcaaattctcaagtagaggaagatttgaaatgagaatttctagtgatgatgggtgattcttcttacaataacaatcaaataatgcaagacttgtaattttcttgcaagaagagagatttattctgtccaagggaacgccatttagtaccaaagattcaagatttatggcgtcaacttcaattcgtaaagcatacgaaaacgaaagcatttcaaaagtaaattccatgaatttgaggattgaactctgtacaaactgaaattttttatctaaaaaagcataatcttgtaaccgcaatttctcaagagaaggacaacccaacaaaaatttagctagaccgtcatcttttgcattataaccattccaaacatcattcaatgataaagtttttaaagatggaaaactaaatgaacaagaagcatccaaatttacctcctttaactccaaaatagtcaaatattttgccttgtcaattattttaggtaagtaatagagatccccaatcatccaaaaggtattgtacatactaaaatgtatttccttaacattattctcaatcgcgaaagctaaccatttatctatgagttcatctttccttctataagaagaaggatgcatctcaaacttaaaactagttatgcttgaatcgccgataaaatacatgccttttttgcggtgtttcaaatattcgttgacataattgtaaaacttttcaagatcatcaatattatcatcatcactattattggcaaaaaagagtgcggggactgaataccatatgagtttccaacgctttgaaagaaggcatgtcaaaatcacatctcagttgggagaaacgataggatgtgatggatgagatcatcgggtagtttcgaaattatgtcatcattatcaatatcatcactaacacccaccattgatattaatgatgttgttttagcactcttacataccataaattgaattaaatcaaaccatggtggattatatacatgaactgtataacaacacagcaaaataatcaaaataaaactcacaaaaattaaattaggattacaaaataaaatattccaaaatgtaaatttgagcatacttacataatgatcaaaagtaaatctgcaagtcaaatttgcccttttcattaacccaaaaggattgagatttagaacgaagtgatatgcgttttttttttttttttacgagagagtggtataattttggatttgattgaaaaaaaataggtttttttatgatgattttttacttttattttgtttaaaattaagtttcaaatatttaaatttgattaatttgttgtagatttttagttgatctatttaaaaattcttaatatatttatacgtttttatattcaattttttttaattaattaattcgtttttaaataaataattaaatataagctaataaaatattacataaaattagttgtcacggatataactaacatttaataattaataattaaaatagctcgagtgcaactaaacaatgaccctttttataagttctttttaatttttagaattaaaaaagtatttctaaagatagtaaaaataagttaaaatttataattatttttatacttctagctataataaaggtaatatagaatagactatcgcattttaggttataattggttttaggtttttaactggttttttttttttgttctctggtttttgtttactggttttttggttttttggttttaggtaaactgtttttaaccggttattttggttctggtatatatttgttttgtctgttatgtatatgtttcttacggttgaccttgattttgtatattattttaaccggttattttttttatatgtgttcattaaaatgtcgtgtaatgttttatataccagtaatgcttatatacctgtcatatcagaatattattgtaatgttttgtttagaaccggttatttttttaaaaaaaatattggtgttattgttttggttttaggtttttaactggttttttttttgtttttttttttgttttttgattgtatgttttataatatgttcttaactatttttcacgttttgattgattttttaactgtttttttttcttgttatgttttgttatatgtgactttcattattttttaactgtttttaactggttattttggttctgatatatatttgttttgcctgttatgtatgtgtttcatacggttgaccttgattttgtatatttttttaaccggttatttttgttttatatgtgttcattaaaatgttgtgtaatattttatatatcactaatgcttatataactgtaatatcagaatattattgtaatgttttgtttggaaccggttattttttaaaaaattataggtgctattgttctggttttaggtttttaactcgttttttttttctggttttttattggttttttggtttttgtctgtcatttatgtttttttttttttttgcattttcaaagaaatttgtttttttaaattattttctttaactggtttttttattttttttttttattttttgattgtatgttttgttatatgttttaactatttttcacgttttgattgattttttaaccagttttttttcctgttatgttatgttatatgtgacttttattattttttaactgttttttaactggttattttgcttctagtatatatttgttttgcctgttatgtatgtgtttcttacggttgaccttggttttgtatattgttttaaccagttatttttttttatatatgtattcattaaaatatcgtgtaatgtatatataccattaatgcttatatacctgtaatgtgtattatctacaattgttattccaattttgattctgtgtataatttgttttgtcttttcagtttttcgttttcgattttaattagcattgatttttcaggttataaagataaggaagaggatcagaagcaattgaagaacttacctgaaaacgatcggaggtcgatgatcgttcctgaagctctgtcttcagtcgatgaaattttttggttttgagatcgactttccggagttgaagaagacgatcagagttggagaactttccggagctggagaagacgatcggaggcggcgattgttgctggttttggagaagacgatcggaggcgattgatctttgcgtttgagttcggtttgcaaatcgaattgcagtgatcaatcgcggctggtgattgtgcgatttcgaacgtgatgatcggagagaaaaccgcagagattagggagagagagatcgaagtgaatggattctgttatgttttcagtttggaaagtatgggtatttccattttaagcatatttatatattttttttggattcccatatttttcctttgaactaatttttttttccatgtctttttcatttatttttctctgccataaaaaagtaaatgacaacaaaaaatctcatatttatgaaaaatcctcttttcttttattcaaaatagaaaaatatcacattttttttaaattccagtataattccaaattatattaaaaaaaaagttagattcctgatatcaactccaaaatttttgtttaaaataaggattgttttaatttatactaattaatcaatccatttaaattaaattctataattaaaaaaaacgtaaaccaaaatcttataacaatgaattaaaccaattataatagtgtaactagtaagttttcttaatatttgattgttgttagtgtttttttttaatatataaatttctaaaataagtgtattatttttattttttatttattttatatataagtggccaactaaacaaataatttttaaactttacaagaaaaatagttatggtaaaattaactaaaatttgtattcatttatattttttaaaaaacattatccacttatacaacaagactaaacatttgtaaatattaacaagttgtaacttttaaggggcatgatcatgaaatgctatgagtttaggagccaaaaatacaaattatttgtttgtttgtataggtaagtgctcacctaaagtgaaagacaaagaaaatggtggcatgatctagtgtgcttgagttcttattaatatgacaaagaagatgtcgcttgattaccatcgccacatgcagggtaggccttgacattttgtgagccataggaaaaataatattttgggccttaattttgaaaaaaaatgtgttaattttcaaaatcaataaaaaaaatatgtgtaattttaaaaggaaaataaatttttaggaccttgggccatgtaagccataggcacaagcctaagccgcctataaatgttagtgcattttgacttctagtttattttttataaccattatct

SEQ ID NO: 71113 - DNA, 936 bp, Cannabis sativa
  modified_base (861)..(874): a, c, t, g, unknown or other
ttttttttttaatttttgtttattataatttttaatgagtgtgcattgtgataggagcagaaggctatagaaagaggctcttgctcttgatttagggtcaatgattttagatatgtaaatctctaatgaatttttttttttgaactctaataaattatttggataatcacttttataattttaaaaaatttatgttttgttatgatgacaaatcatcttttgtatttattctcatatacatgaattttgatttttcactactttaatttactctattctctttctcaatttttaacatttttaagtaatattaaatattattaattaatatttttcataaatttgaaatctatcaatctacctatacatttagacatatatatataaagaagagatatgagatagtgacgtgcaggggcagagccaccttatacaattgggtggccctggcccccctcaattttatatataatattatacttatttgatcactatatgatatatatatatatatatatactacttttaatgactttcccatgtataataatattttattatattttaacttttcaaaatttaaattctttgataatgatgtatatacatttctttctaatttctaattatttattttggagtgaaatatccacattctttcaatgcaaaataaattattatttctctaaataaaagtaaattagttatttaagaataattgatctaaaattaattttaatatttttactacaatagacgagtaatacaataattaaagaagaaaaaaatatataattaatattgtcactataaaaagctgctaccgataactttttaattataacataaattttttgtgannnnnnnnnnnnnntagtcacaacaaaaaattatttgtgactaaaacataccatttagacacaaactgtcactaat

SEQ ID NO: 71114 - DNA, 1743 bp, Cannabis sativa
ttttttgttatgttgttcttggaagttttttctgctttgaattgtgtgtgtgtgcaggaactagttaatttgaaatttgagattatgtgtttggattttttaattttatgtatctgtttcatgggtttttatttgttttaagtctatgttcgtctcgtttgatttggtggatttgaacagatccaggctcgtgtgtagctcatatctaaattttttgttttttttttgtgtgacggttttaaaccgtcggaaatagtggctcactataaatgacgatttattgtcgatggttttaaacagttgatacatgttttcgtcgactgttttcaaccattgcatgttctacctagttttgcaacggtcgaatagatgatagttatagagactgacaacaatacattatctgactatttaaaatcttcgagaaatccacattttttagtagtgtgcaagctaatttttacaagtcggtacaccaattcacgaagtgtaactttgtcacgtagaaggcacatccaatcacgctacattttctcttataaagcaaagaaatggagaaattataagtaatcaggttactgtgacagatatttttacaagctcatacacatattcgcaaagtgtaacttggtcacgcagaaggctcatccagacatgctacttcgacccttgaaaagtaatgaattggggtaattctaagtaatcgggtaaaatgtgacaggtatgtttaggaaagaacgtaacctaaaaaattgtaaagttagagaatagggtgcataaggttttgtagtcccagcgtcatgacatactaatgtacgtattgaatatttttttaactatttttaaataaattgaccaattgaaacagtgcaatagccaaacacaaaatttatatccaattatgccaagaccgtctaacattgtgaagtgaagaattgagttaactaaaatttacacggttactcttagtcaccgagtaactatctcaggtaagttcatttttgcaaccccatacacctattcgtaaagtcactactacaaactgcacttcttgtgtcagtttatagatctaacacctagtccacattgacaaaaagtgagagtataagtttctattataaactgagactaataagttttggtgttattttaaaattgacatttaaagtgtacatatattttttccctctcagtcagtttaaaactgaaactaataagtataagtgtcgattttaaacttacactaaagggggtagtttcaaaaaaataattgtttaaaataggctttagtaattccgaaattaccaaacttaagaacctatcaaactcattaacacatcgttaatttttcttaaagtttcagcattataaaaattgtaaaataaacatttctcattttcaaaaacctcttaaaacatataagaaaattattccaaggcagtcaagtacaattctcataataatttattaatttcacagccagtaaaaaagaaattatacatacaataaactcaatacaaaaaaatcttgaaaatatagttgctaaatataaataattatcaaataaaatcaataaaaatatactaaaaattatatcgatatgttggaatatattttaccaggacctagatttaataacaagtatggttttatatcttaaatatgaatttctaaaacaatgaaacttaaacacatataaagtatgagaaatcttacattggttgcagcggaattaaatggctc

SEQ ID NO: 71115 - DNA, 1139 bp, Cannabis sativa
  modified_base (97)..(105): a, c, t, g, unknown or other
ttgcattcagtattcaataataatctcgctttcaaataacatagaaaaaatctagcataaaatttagtatatgtgcctcgcacgtagttttttgctnnnnnnnnnatatatatatatatatttcaaaagcacgaaacaaaatgttctttaaaattgtaacatttttttaattaattttcagttttttaattaaaaaggtgaaaatacttttaaaaatcatatttttgaaattgtttttactttttaattttttaattgagaaccaaaattttgaaaaaaaaaatcacttttatttattttttcaaacaattttttttcttaatatatattggactccgatcaggtctaaatccagacttggaccccgacctcagacctggactcggccccacacccagacctagatctcggacctagacccaaacccgacctcgcacccagacccagactcggaccttgaccccaaacccaaacttggacccagccccgcaccccgaacctcaaattcaggcccagccccggccctagcctcgtactacggacccgggacccgaccttagccctggatctaggacccggtccggccttggacctcggccccgaaccccgaatacggccccagacctggcctcagactctggacccagccccgaaccccagacctagccttaaaccctggaccccggaccctaaactcggccctagtcctcaaacccagacttagacttcaaacccggtcaaaacttggaccttagacccaacccagccctagccccagacccacacccaggatcctagacccggcccagactcagaccctgaaattggtcccaaacttggatcgcggacccggacctagccccagactcaacccccagacctgtatcaggactcgaccccaaatccgacttaaataaaataaaaaataaaaataaaaataaaatttaaagaatatatttttattttttgtttttaaaattaaacaacaaaaacggttatagattgctaaaatttttaaaaataaaaattctatttttatttttattattaaaaaattaaaaaagaaaagtattaccgaaaaatcacctaatacatgtccattgtagctaatattatgtaaattagttgtgataataata

SEQ ID NO: 71116 - DNA, 1739 bp, Cannabis sativa
aaaattcggttacggtctggtcagtttgatggtcggtttgatggtcggtttcggtttatcagtttttatgaacacccctacctcgtcctcaagttcaagatgtggaagtgcaactgaaactgttgaacatttatttcacctattattacagcaatagttgctatcaagccatcacaaaatggttggtctgaaggttaccgaacttgagtttgaagaagttgttacagaggaatagaagattttaggtttcaccattccgaaagcaagtgtttgtggtagctattgcaactattgtgtatcacaatgaaagaatcagaatacagttttatgggagtataaagtcttaagtttgcctaatataatatatgttataaagcagaatattaaaaataagatgactatggtcatgcctaaaaaaaaacaagataggaattggtggggaccttgtaaagagatagaaatgaagtccggccttaagtggtgctaatattttgtaaatatgttttgcgaaatacaattttatattgttgatttagcaaaaaaaaaaattactagtgttcatgtgctgacaaaaatgtatcaacgtgttgtgtctatttttgccggtgtatatttgtacccataaaaatcttctttcttgtagtgtttaataataaatatgtttatttgtagttagtttttgtgaatgacgattcatttaaaaaaaaaaacaataaataagaataatattaatgaaaaatgtaacaaaataatgaaaatatacacttctcaaaaatttattgatgtagaaagatattcctaaaaactatcatgtatatatattaattttgagatggagcttcaaatcgaagataatcatataataatcctccaaaagggcctgcgctccttgattgagtcaagtatagtgtattttctccttggcgaagccaactcccaaacacactaacactaaaaatccaatacgacccatggattccgtgtctcgctattgaattatctctgcctagtaaatgtgtagataataggggaccttggttattatgattattcaagtgaaccttcaacaataataaaaacaaatctatagtattaatcataaatgttcattacataatattaatatataataagatgattaattcaaagcaccaaacatatatctaattaaaaaagataaaataaaagaacaacaacaatatttgtacctgcaaagctgataggcttgctgaagctaatgccaattgaagagtgtaatttcttgacaatatcacatcttccagtttgaatttcacttgccatgttgtattttgatatgtcccattttgtaattttctataatattagaaaatagtagagattactataatttgatttcaatataaaggatatgtatatataaatatatatttataaattaagctttctattttacctgttaacatgagcaaaaaaccaatctcgtcgataatcacttacaccaatggtgtatatgagatcttcctttggatacaaatctgtataacgatcccacaaaccatattgcctgaatctatttattgttttagcaaagttagaagatacattatgtatgtatataatcaactaaattaatataatagtcaaaggttacattgcaatattattactataatatcaaatttcataatgcatatacgttttttttttatttgaaataaaataggggctttttcatttttaaattttaaaacagtttt

SEQ ID NO: 71117 - DNA, 848 bp, Cannabis sativa
aattacaattcacatatatatatactgtacccattaagtaattggttatcaaattcaactgccaatgcacaaaaaaaatgttttttcttaaaaggtataagatgaagtttaaaatactataacaacaactaatctttctattataatgtagaattgaacaccaaaaaataattgttgttgaaatacaatggttattatttttgtacgagagcatataattcatccccataatactttcggtctgcttattatttatataatgaccacataattataatgcagtaatttctatttcttttttaaaaaaatagtccctaaggaaagaatgaaaggcaagaaacatggatagaataaaaggagaaagaactagctaatttcaatttattttatctttttataacatacaaattttaatttaaaactaaaatcaagattacaatttatttaaattttattatgtattatttcctcttgaaagaatattctgttaagaacacaaatttagtcttaattaattcaatataattaaacaatagaattacaaatttgcggaagcgtatcaaagttcattgaatcgcgtgaagaacaaaaaaagatatgattttctaattttgcagtgaactttttttctgtaacctttgtctcttgatgatggggtttcaaaaaaataaaaaaataagatactgcaaacagttaataatatttattgacagttaaaagattattaagaaatgtcttgtctattgacatgtgtttgatgtttgtttgagtattttgattggttttttctgtttgtttggctttctatcaatcggcttggtttctttggagttttctgatttcttgtc

SEQ ID NO: 71118 - DNA, 1434 bp, Cannabis sativa
tttcaagaacaccaggatccatgggagactaacaatgtctatggcaatctgataccatatagaagctatcaatacaggactatcaatgaacacaaagatactttgggtataaagtcttgcaaagctttagccatgaaaatggccttaggatcttaatttataggcagagagattacagaaaggagagttgttacaacagttgagactgtaactaactctgacagattaaaccagaaaataacagaagaggactttaactaactttgtactgtaatagaacggattaaaatgagttaccaatttatcgtggttgtaacatagggtcttggattattgaaggtaaaaaaaattgtacaattgcataacaaatcatcaaatatttaaattacaccacccaaatgatacacaaaacaaagcacaccaataaggttctcataggacaaggtcctaatcactattattacaaaaaaaacaaacaaacacaaataaacaacaaaaaaataatacatcatgaaaaaaaacactaaatagaaactcaaacattgcaatccctaaccaaatcaataatacttcaccacgacacgatcacgaccatcaatcatcgattagttggttgttgagtttgatcatcatgaggtttttatagtacagggattggatctataagtaaagcagcaatgctttctttaaacacttttccaacatgtgtatattgatcatcaccatttttgtaaagaagatccaatacttttgtaacattaagaacacgaactaagatagggaaaggcataacagttggcctaatgaagtcttcattaatttctttccaataattgaccactcttttattcagttcttcaattgcctctttttctgataccccatattgcttcatgtaacattccactgtagatggtatgtgatttctctcttgctcaaactatacataaatgcaacaaaaatatcatttcatgcttgttaaataaatatatatacatatgagttatatcattaatatatataaataataattactcgaactaaataaaatgtataatttatcttggatactttatctcttctcaacataataggccacagagatgtcatatagtgcacccctaagtatattgataccttcttttgtattttcgaatagttataatttttttttgtttcattatttgaatttcaaaaaattataatatcactagttttacaaattaatttttctatttatgacaaaaatgtaaaaattaaaattattaataaaattgttaaatccggccaaattaatcattgttcgtcactactttaaaaattaacacaaaaattaatattttttttataagacaataaaataataattgcgacataacttaatgtagtgatcataaattataaaacaaaaaaatcataaattaacctaaaaaa

SEQ ID NO: 71119 - DNA, 2063 bp, Cannabis sativa
  modified_base (1846)..(1846): a, c, t, g, unknown or other
ttattattatgttacaggtagaattactcaaagaaaaacttggttttgatgatgcattcaactacaaagacgagtctgacttgaaatcaacactcaaaaagtaagtcgaaaaattgttacaatacttaaaattgcctaataatacatgtttcaaagactaatagttttcgtacaaatttaatattttaggtactttccaaatggaatagatatatactttgacaatgtaggagctgagatgctagaagcagcagtggctaacatgaacacttttggccgaattgcggcttgtggggtgatatctgagtatacagacacaaacaagagagctgcccccaatatgttggacattgtctacaaaagaattatgatgagaggatttttggctgctgatttcttgaacatctatccagaatttctttcggctactgttgatcacattcgaaccggtgtttttcagacacttgaagacatctcaataggtttggagagcattcctcaggcttttcttggactatttcatggttctaatgttggaaagaagatggtgaagctttcagatgactaaaatctccttttacataaggaaaaaaataaattacttgaacgtttgtttcataaccaaaaaaaaaatatgtattacagttgcttatcgatcaatactttagaatagaaatattagggttttaaaaaaaatggttgactttttgtcttttctattgaataattaatgtcctatgtatactagttttttcttacaataaatgtgactttggtttctacaagaaaacaaaattgtgactttgttgcattttatttatatgaacattgtataatagaattgagaatcgattctattttaggtaaattgtaatttgttacaaatgaagaaaaagaaagctctttatatacagtgacagacccagaatttttactttgtggggacttatttatcattaaaaaaatatttatacatatattataatcactcttgctaaatttatttaattttgtggaggcttttctattattttggtctataattatcaaattaaaaaattacatttaattttttaaaaggcaatatttttgttaatggagctataacccccacattgttacttgtgggtccgtccctgtttatatacatacatattctcactagccagtgaagttagtcataactaactaaataaccaaaactattaccctgcaatggactaactaaccaaacaataagtacaagtattgggttctaatacaccccctcaagatgacatataaatgttttttacattcattttggacaataaatctttaaactgagaagggaatagaagtttggctagagatcagccaggttgagcatggatgcgatgtggagaagcttgagtttcccatcttgaattttctcgcgaacaatgttgtccatatggatggctcttgcattcatagtatagggcagcaggtacttgatgagaaataaggaaatccttctgttgagcaatgagccaagtaacctcataagtagcgttagccatatcccagtattctgcctttgtagatgagcacgatatagtaggttgcttctttgctttttaggatatgagagagtctcctagaaagatacaatagcctgtgactgatctatgagtatccacacatgtaccccaatcagcatcagagaatactttgagtgaaatgttgttaccagataggctggaagcgacataggcagtgtgttggagtaaaagaataagccttgactaggagttcctttgatgtattggagaagtctatgagtcacaaggagaagttgttgggattattttaccaggatttaganttactaacaagtatatttcattaatatcctaaatatgaattttctaatacgataaaattaaacacatcagagtttagaaaacgttacattgattgcagcgtaataatatgacttctttcgctccactcttgttcctttctatcacaaagtaataacaagatctgagcctggatctctttctcttcttcgggttggttaccaccgtcttccgcactat

SEQ ID NO: 71120 - DNA, 1588 bp, Cannabis sativa
atagaagagataggttaactaatgaaagagcaaaatattcctgtgaatatattaagtaattaataaaatgaatcatcgtactaagaaaagatatggttagttaggttggacataaaatataatttggattccattggcttccccgttgcacatgattccctgcgaccttaatatgcgctaaattaaccaaacacaagcaaagctaccatataaattcatttcttattaaaaaaaaacattataaattcataacataaataattacatatataatacgagtttcaatattatatctatttatatatattatagtcaacaaagatctacacacatgacacatacatacatatacatatagtatacattggaataacatgaaatatattctcacataactactctttgtactacctcatgaacattatacattaagaaatataaattttattatactacaacttaattaataataattatattaatgcccaacaaatcatgaaatataatttttattaagagaaaattttttatgtctattaacaaatatttgatcttttttttaatggttattactgatgaaaaaatattatttaaaaaaagtttttatacttaatattactgtcttatttaaataaatattttatttttgcattatatggttgtggtgttctgtagggccaagagagtgataaaagtaaaaatttaatttgtgttagagagaaaagtataaaaataatgcttgcatgaatatggtagagagaacaataacaaggtataaaaagatatttttgatataatataaaaagataaatatttttttaattaaatagtaaaattaaacacataaatttttttttttattttattattggttattgggttaaaatctcttttttaaaaattaatggtttttgttgtttggtacattttaggtctgattgtttgaatttagttttgaatttagtaatcaagtttctttagctgtttctttgggggtttaattttagcagttagacatagtttttctaattttcactatgctagtttctcttacaattctagaactaataatattgttgtccactccttaactaaatatgccttgtcaaaagttattagtaagattttatggtctgattatccttgttgtattcatgatttcattttacatgagatgaattgatttaatcaatatcctctccaccttctctttaagctcattgctaattgaaagatagtctttggggtgttttcttcaaaaaaacaaaaaaaaaaaaaacatatttttaaaattgacatttaattatagttattttttaaaaaaatactcattaatgggtaatttttattgaaaaataatcaatatatatacatgtgcaattttaatgggtattactcatgaatgagtagtattaggagaatttgagtttttatgcttaatttttctatctaattaaaaaaatctttcatttttacattatatggacagggggttgttccatcggctagaaaaaaaggaaaggtaaagaaaagtagagtttgacttaagtattttgtatagaactatatctttgatatattataaaaa

SEQ ID NO: 71121 - DNA, 2661 bp, Cannabis sativa
  modified_base (53)..(62): a, c, t, g, unknown or other
aaatcatgtctcctgaattttcatgttagaattttttactaaaattagataannnnnnnnnnatctaacaatcttaatagttcaggtgaatttttaacggctaaaaaaatttagaatacataatttagcatatgtcaaagttggggagaaaaaattaccaattagcattttaagaaatattagtaagtaataggaggtgcttccaaatagcaatgctcttattaaatttgcagttcttctctcttagtatgagtcactctcactctcatcaagctcaagttcaaagaacttagctgaaaccctaaaacagaacatacatttcttgaggaggaaacccaatccctcaatctcattctcaatcctgcaattcaatgaatgtttaatcttcatttcggttaaacaaccacaaagatttaggaattaatctatctacctttacttcttccaattcatctaaagattaagtttttttttttctttcttttctttgttgttacagtataggaccatgaaaaggactaaacgtacatcatcatcatcaatggtggttggtgaggatgacataatttcgaaacttcctgatgcattgatcattcacattctatcatttctcccaactgaagatgcggttcggacatcccttctttccaagcgttggagacccatctggtattcagttcccacactctttttctccaaaaatactaaatggaaacagggtaatgaagataagttgttcgaattttataacaattgtttgaaataccgcaaaaatgttaagcatcttattgttaattcagacataactagttttaagcttgacatagatggttactatcaaacaagtaaggctggttttgtagataaatggttaggttttgcagttgagaataaaattaaggaaatttgtttatccataggtcaggaggatcttgatgatgatgatgatgatgtcattgattacagtgagatatgctactgcttacctaaaatactaggcaatgcaagatatttgactattttggagttgaatggggtgtttttggatacttcttattcatttagttttccatctttgaaaactttatcaatggaggatgtttatcatttacctactgcaaaggaagatggggtggtgaaatttttgttgggttgcccttctcttgagagattatggttacatgattataaattcttaggtattgatagtcatcatcgattacaaagtttaagcctcaagttcatggaaattgtatttgaaagctttatgaatgatgcacaaattcaagttgaagccatgaatctcgaatctttggttgtggaatgtaatatctttgacatgatagatttctcttcttgcaagaaaattagaaatttatcattaattgacgtttacattggaaacgaatacttgtcatcgtttgaagctcttatttctaatatccctctaattgagaatttggttttgagcaaatgcgatttactacagtcggagcaccttacaatctcgagtctgcacttgaaaagttttcatattaagaattgtgattactcggatgatggtgatgagatgaaggttgttacaattgaacatgcttccaaattagcatacatttgttatgaaggaaatctcaattttaccatattaatggagccatctaatttgttaaatggaaaaattataattcacaagagactggaagactatggcgcaaaatggtttatcgatatgctgacttttcttgtgaatctcagttgctattggaatagtgtgacattggaggtagcaaattgtaaggtatgttcattacttgtattatatatttgttttatataattatgtagtgtcatttcaacttcatattgaatctctatacatgaaggctcttgatatgttttcataaatctgtatatgtagtctctcatttggccgaaaaacttgaagaacctaaacctatgtcgttaccctttgcttaactggaagcatctcagagttattaccgattgcaagcctgaggaagagtcagacttgaaggaagacttgatgtggatttcaccttctttagaaacattatctattaacgaaaaggtcatattttagttgctttacaatattagaagactgcattttatcagctttctttgctaaatagtacttcagttcagtccttttctaagattttgcactaaagaatctgactactttgcttaagaaagatatcaaacttttcttatatattcttgtgagctagctctagccgatattgttcgatttattaatgttgaagatttatttttatacatttgattagatttaataacttgaaaagtgtcttgacactcattacagttgggtactgaataggactaggagtatgaatgtagaggaatgtgggggctaaatccttgagcaactgctcttttgtcatctctttcctttggataatttggtatagattagttaatccctttgtgtagacaatgtgaaaaatctaaaaataatgaaatgataagagattaatctaagaattcttgaaactataattcattattcataatcttaaactatgaaaatcttatgtactctaaccttaatttttctatttggatcagtaaggtcataggcaatcatagttagccatcatgtaatccggaaattga

SEQ ID NO: 71122 - DNA, 1676 bp, Cannabis sativa
  modified_base (99)..(101): a, c, t, g, unknown or other
  modified_base (1612)..(1621): a, c, t, g, unknown or other
gattgagaacttgtgtgtaaatctttttaggtggtttgcatgcacttttgtagagtatcctctaaatagttttctttgttgttgaggatatggcatatnnngttgggcatgactctgattgggtgagttgtattggtacccttggttcattagaggctgattccgtcttcaaaaaaaatttgaatgatttctccaatttggattataggattgagcgaatgggctatcaaatgaattcccataagtttgaagagtgttcgcttcttcaaagaatgccccttagtatataggcaatgatagacaagactggacaacatgacttgtactataatatagagaacaaaattcattccgatgtatatgagtattcctcgattgacttaatgacatagcttcaactctcctagttagatttgctaatgaagtttttaaatctacgtcatctttgacattgtaaattccacctctcttaggcatgttggaagcttttgatctaggatcttggcaattctactgttgaaaatttacagaaagattctcaagagacacccaagcctcttcccttttaaattgcaaaaattttccagtgtgcattgattgtactatttgtcagtttgagagagataatcgatcataaaagtatttgaccaatctctatttttcaaaatcatggtgtggacattttagcaataaatcttatctttccaaatattcataaaattcttcgtgatctttctgataaaatttagtgatttctctcctaatattatctgtttaagacacgagaaaaatttagacaaaaatttattaactaattcatcccaagtagaaatagatcgggctgggagtgaatttaactaggctttagacttatcttttagtgagaatggaaaaattctaagcctaacagattaatcagaaaaattttaaaatcaaaaagcagaacaaatttataaaaaaacctttcatatgtatatatggatccttctctattgaactcataaaaagatagaaaaagttgaattatggaaggtttcaacttaaaatgtatagcatttgtttcaggaaaaataatgcatgatgggagactagtagaaatgggagaaaaatgatcaatgagagttttttcttccacatttacttgatttagttccatgatgtcaaaattttcacttttaatatcaacccacgataattttcttttaaccaataatttttagaatttcgttcccagggaatcatacaccaagtattataaaaaataaaataacaaaaaaattaggaggcagtgcctaccatttaagctcgtaaataaagactaaatttaaaatatagtaaaaaataaataatatgtatatatttgatagaaatataaatattaatattaatatatgtgcataaataaagactcgataataaatacatagataaataattatatatgaaaaaaatattaatattaatattaatataaagtgtacaatttaaaggcagaagtataaataattatatataacaaaattataaatattaattataattataattaataatatacatttattttataatatatattattaaaaaaactagaactgttaactaaggtttnnnnnnnnnntagctattctaagtgattagggtggaccatcttatggtcattaagataagaaagt

SEQ ID NO: 71123 - DNA, 1325 bp, Cannabis sativa
gaactattgggattgttggatttaaggacttttttctaattttagtaaaaaagtctaacatagaagaaagttcaggaggcataattaagtacatgtcaaagttcgaagggcatgatttggtagatatcaaagtctggggaacatggtttagtacataaacaattattgaaatagtaaaatttaataaaattagacaaaagtcattaaattcaacaatctcaatagttcagagacattttcaatgaccttaaaagttcaggggaatgaatgtcaaagttcagggaacaaaaatcttaacctaaaataaatatttataaacagcaaagaaccgttaaaaaatattattaatgtctaatactattaatataattaattattgatctcatatagttttgaaaaatatattttaaaaatataattaaccaatcgaatatagcatcacctataaaaaaaaaaagtattgcacgaaccaataaattttatagatataaattaacaaaatatataacaaacttgatacaattaattgagaaaacgacaaccttagtccacttgggaagaaaagaaatagataagatgacgtaagcatccatgcatgacgttatcactaaataattactagtcatgcctacatactataagtttgaaaaaaaaaaaaacaaaaataatttaaattaaattatacatgagagttttatttattattttatttttacataatcaaattattaaaatcagaacatattattttaatgagttcaaaaaaaaaaaatatattattttaaaaaataataatgacattggaaaaaaaaaagaagagaaaatgattaacataacacgacataaatatatatattaattgattattattatataagcctacaaaagaaaaaaagcaattgtcctttgattactattattattattattacatcttcactttttgtgctttcgtggttgggttatattatatgatatcaatttttataaaattaataaatatttttataatacttttgttaaaagtggtgttttgatatattttcatctgttttttttagtgtaaatttcatttaaatttaatcaattcggcttcaataatatcaataatattaaatgagaaattagattaaaaaaaaaatactattaacatataaatgagatattttaaccataaaataaataacttaattggcaaaaaattctaataatttataatagtaaaataaaatttaaatattttattaaatataccaaaatactattttgaatgttgagactgatagaaattataccagaatgagtctttaaagaatatttatcaa

SEQ ID NO: 71124 - DNA, 1441 bp, Cannabis sativa
gaatgtgggagatgaaagccttcgatcttgccgtttgggataaaaatagagatgaaagcttgagagagagagaaagtgtttgagagtttgagagagagagaggacgaattagatatgattttggggtatatatataaaatgcaaggcttttaccaacgatgtataacagtcgctaacgaataaccgacagttataaaccatcaactattccttagctgactgagacccaccgacacgtataaacatcaaaacacacacatataattgttttaaatagacgggaatactttacgagtgataaaaattgacggtaattctaaactatatatagccaccggttatcaactgatacataatttttttcctgccggtcctttaagaaaactaattttctaaccgatgagaatttcctattttgtagtagtggtagtgtacaactcgttaataatatcccttaaaatataaattttacagtaatgtggtcctttcatcatatactattttattttatcatgaaattagtgacacagtaaataatagttgataatttgatacaaattaaatatttttcatgccttttttactttaaagattaaaaaataaaaataaaatcttttattctattatttattgacataaaaataatgaaagatatttaatttgcatctatttatcaattatcattcactattttacttagtttacaataacattgaataaaatgtgatggaaagacaataatgctgtaaaagttatatttcgagggttattattaacgagtcatatactatcactactacaaaatagaaaattcctgtcagttagaaatttgattttttcaaggacttaggagagaaaaactacgtaactaattaaaactgacggctttagtttagaattgtcgtctgtttttaacactcgcaaattattcccatctgcttaaaatagttacgtgtgtgttttgttgtttatatgtgtccgtgggtcctattttataacagttagttattcattatttttatgttgtgactaaaatatatgtagctaaatgttacatggcctttatataaaatatattttttttttgagttaacgtcattaaaaagtatcagttaaaaagtattgttaactttaacagaaaaaaaaaaaacgttaaaaaaaagtcatctaataattgtttataaattaaaaattgtgttataacacattttatatagaatagatataataattgtacgagaacaatttttttttttaagaaaatgtattatcttataatttaatatggtattaatgttggtttggaaaaaattattttgatgtaccatttttatatagggaaatttgatatattatgctaaaaaatagaaagtggtgtttaattataccaagaatttacacatcaaaaaaatatgccaattttttaatttccttcctaaat

SEQ ID NO: 71125 - DNA, 1916 bp, Cannabis sativa
tacagaaaatgtaataagttttgtcataatatatctaaattagattattattaagatttattttgataaaaaatcagttcatgattctatttgtatcattttgtaaaatacagggtctcttttatcatttaacaaaatagaagtccaattgggaaccaaaatattatttaactttttttttttcatttttatggtctaggtgctccggtgattgctgcgtatgtacgtagggtgcgatgtgaatttaggttacaatttagattgctctatttgttgctctgttgttctttataaatacaaaaaggtaaaattaaaatgtataaataaagaaaaaatattaatttatacttaattactttattttttttttctatttacccttaaaattagtatatttctgtaacaccctaatatctaaggcacgttacgtgatttctaaatattgttctaattaacatttgctaataaaagggattgaaattaaaagtgtatttaataaagtatcataataattaaaactttacttataataagcacttttattaaatatttagcagtaatcccaaaatttagttacaaaatactttatatcataaaaagttctaaaattgttcacaaatacagaagtttgccaacaattatctcaaagatcacaacccttcaagtttagacaattagatatgtacaatcttcatccaagcttcgaactcactgatgttcaactttgaccaatcatttacctacacatagccgcaaggtaaacgtgaatcgaaaaactcaataaacaacatattaatctagtgtataacttagtgcccatatactcaattaccataaattaactaattggaattcaaacttttgtatctatagtatgattaataccaacttaattccagcattttagttgaattggtagcatttattcatactatttaatattgtttaacgtactaaatatttgtatattagtgcaatttttatatacacatactgctatttttaattaacatgctagctgcacgacaatacatatatatattttcaaagaaaatcaatataaattaaaataacaaacgtaacaaagttaagaaattagaaaagaatttttttccatctataaaaggtcattatctatatcctaagagcatatatatatattaatacttaattaattatgttgagaatattttcataagtaataattgtcacattcttaatttaattacacacaaattaaaaagaaaaactatatattagatgtgatgatatatctacttaaaaatatataggagttaaattaattaaatataaatggcctaatacattaaattaagatgtcataatttttaaaattaatagagaaataactttgatattcttaattatttagagaaaaaaataactcaattaaaataatttaattgggcttgatggtacggatatgaatgatggttaattaagaatgtttttttccttcaaatagtcaaaagcaaatggttaccccatttattaatcttttggacattcataagttagtctattaatttatttatttatttattttgacaaagctgcttgtctatttaaattattataataattttattttttattatcatatctatttaataataaccaaaatataagtcttatatgtattctgtcatttcaatacttacttcttcgccttcataattttcggttttgagttttttttaaccgaagactaacctgcttaaaaatcgaagataaagatcctttttctagctgtgtatcaataatattttagcaattatatattaagaagtacaaattcaaaaaacatgtaacaaataatttgtgtaacatatattacagaacaattagcactagtaatcatacatatgatatatagatacagattataattatca

SEQ ID NO: 71126 - DNA, 2024 bp, Cannabis sativa
ttcaatacaatttgacttttgaaccaaattcaataatctccaccttggcgaaaaaatcaaaccaaaaaatgttgcctccacatgcgccctaggcgctctaagtccaagagatgttaatcaagttcaaacagtgttgaaacttgatccctgtaaccacctttgtaagcatttctggagggttgtctacaattctgactttctggagaataacattcctttcatcaataattttacgaataaagtgaaatcaaacatcgatgtgcttagtgcgaccataatggacttggttctttgccaaataaatggcactctgactgtcgcagaaaatctccacgttctcaaagcaatacccaaatccttggtcaacccaagaagccatatagcttctttgaatgcttctattacagccatatattccacctctgtagtagacaaagctacagttgactgtaatgtcgatctccaacagtctggtcctcttgccattgtgaacacataaccagtagttgattgacgcttatccaaatctccagcgtagttagaatcaacatatccgtctagatgtttaccactagtcttggttctctcaaacttcaaaccaatatccacagtaccatagatataccatagaatctaatttattgcttgtcagtgacctttactgggattgtgcatgtagcgactcaccacaacatgtaaaatatcaagtctggtgcataccattgcatacatcagggcacaaacaacatttgcatatgaaatacggtccatttgcttcttctcatcggtagtgctaggtgacatctttgcacttaacttaaaatgaggtgcgagtggtgtactgacatgtttagtcttctcgtccatgtcaaacctttgcaatactttgttcagatactgagtttgtgtcagacagactatgcttgcaactctgtttcttgtgatctccatcccaagaatcttcttagcttctccaagatatttcatttcaaattctgaacttagctgagtctttagcctaacaatgtccacctcgctattagatacaattaacatatcatcaacatataagagcaaataaataaaagtaccatcttggagtttatggaagtatacacaatgatcaaattggctacgagtgtacttctgcactctgatgaagctgtcaaaacgtttgtaccactatcgcggtgactgcttcaaaccatatagtgacttgctcagcttgcaaacttaattctcatgtcctggaactttgtaattatctggttgaaacatgtaaatctgtccatctaaagtaccatggagaaaagatgttttgacatcgagttgagctaacttgagatcaaactgtgctaccaaagccaacaaaatttgaatagataaatgcttgacgacaggtgagaatacctctttgtaatctattccttctttctgggcataaccttttgataccagtctggatttgtatcgaatattgtctctaccaggaactccttccttcttggcacagacccatttgcagtcaataaccttctttcctttaggaggtcgaaccaacacccatgtatgattctagtgtagagacttcatctcttcatccatttccaacttccatttcttgcagtcaacactctgcacgacttctttgtaagtgcatgggacgtcatcatcaattattggaagtccaaatgctaccatatttttgtatctaccaggccttttaatctccctttgaaatcgcagagttaaaggagagcaagggagagcgagagagagaagagagaaaaggagaaaaagtgttttttaaaatttttaaaatcgtaaaaaattgtttttaaaatttacataaatttgattttaaatttaaaaaatagaaaacaaaaatattttatcgaacatgattttattttaaattgtcgaatttttgattaaaaaaacagaaaaactatttttaaagggctttttttagtattaaccaaaaaaagtaataatattacaaaaatacttccagctggccaaat

SEQ ID NO: 71127 - DNA, 1105 bp, Cannabis sativa
ttatgtggcaaaagataatataaacaataaataatataaaaagagtcatttctctacaagttttgaaataagaacatttgcttatatagtactataatttaggatcatttgttataatttttcattaattattatataatatttttttagtataattattacttttcttaacattcaactttttaaaatagagtttaattattctagtatttgtattaatattgataattaacaccatatgctaacacatcaatttgatatagtgacttttaaataagctctataaatataaatggcggaattattaagtgaaaataaaaagcaattataaatttgcacttacaaatgtcattattcctgatttcgataaaaaaaaatgtcattattcctatataatataaacaaaccattagtttcttaaaaattctatggtcaccgaaattttgttttccccatattaccatgtgaaacatgcttccttttagagagaacgagggagagagaatggagatactgaccaaaccaaaaaaaaagcattggcgtggccactaatggtgttgctaatgaacctaataagaattacctattcaaaataagaaagaaaagggggaaagaaacaattgtagatgtcttaattgaacgaacaagattttttccttataaaaatataggccaagtggtgcatcgcaataatttgatgaaggatttcaagtttgtggttagcaaactttgtggtagggtgtttagttcacaccacacaaactacccacaccacatcacattgtatacaaattatagtttaaagtttgttacagtgcaattacagtttgtgtttttgctaaaattatgcaatacgtttgttgttttaaatttaataattgtggtttaaactgctacatattatatattataaaaatattaatttttatattataatttattttatatatgagcaactcatatacttacaaaatccaaatcatacaattaaatttgaaaaatttgcagcgaaacccctttatattttaatttttatacatttaacctcgttattttttttttagtggcaaaacctccttaagttttaatttttatacacttaacc

SEQ ID NO: 71128 - DNA, 1258 bp, Cannabis sativa
taacatgcatttaggaaaaaaaaattagaatattgtaagcatgtaatttcaaatttcccaaaagaatgtgttgatggttttgatacgaaacacgggatatatctaagatcttgggacgtttcaagagcataagttaattcattcaattaattacacaataattttttttggtaaagaattacagaataatttataattcttagatttcaatataaatattttatttatttatatatcttaaacttaatatacattttttatcataactaataaagtgattaccaacataaatattatattagataatataaaatcttaattatattataaatagtcagtgtagctataataataataataataatataatcataaatttgtctatattttaaattagtttctttttcttaaatataaaattaatatatatatattgacacaaaaatttaaccaacggataaaagttataagtaactatatgtaaagtaaaaagcacacacacaaaatattagtgcggaagaagaagaagaagagagagaaaacagtatctcttttattggcgataatgagaaattacaaagatgaagctatatatatatatagctcaagaatagtaagataatctaactgaattctaatagaataatagaaaagaaactaactaatcttaaccaactctaactaaccaagactctaactcagaacagggcctaattctaatacaagaatttataatagttcaccctctgtatcgcaacaataatggaactacgtctacttcaaatttttattctcacgagattgattacaaaaaaaactgctacgtctgcacagaaagaaactagagagagatgttatgaccttatgagtacttttttaaatgtgaaaaatgagctagaggagctcttcttttatagggaaggatgccaaatgaaaataataataaaatattctaaaaaacgtgaaaaaataaatttaggctatttttaactgttgatgatgatataaaggtgaaattgattctggaggtgggtcgttaaattttggagcttgagtcgcgtccgcgggattaggggtgtttacggattggtttggtccgaattttcatagtttttgaaccaaaccagtgtagtggttttttgaatattagaaaccaaaccaaaaaatctctcaaaccaaaccattaagaacggtttggtttggttcaaaactacggtttaagtggaatttataattattaagtttttaattttatttt

SEQ ID NO: 71129 - DNA, 1829 bp, Cannabis sativa
actcaaattgttctcaaaaacctcataattacagccaaatggtaataaatctgcaatatactactctggtatggatgaaaaggagattaaatgagttgttgatatttttagttttagcagaaatgatatttccttcaaatatcttgacattcctatatgtgccaagagaatctctacgcaagaatgtaggattctggttgagaagatgatagctcgaatcaagacttggagctccaggaacttatcctttgtaggaatgacagacttgatcaattcaattctcttgactattcatgcctactagagtcaaatcatgatcatatctaagaaagtggtgacataaatagagggcatttgcagaagttttttgttgaaagggcaaactaacatggcaggggctgaaaatgtagcatggaataagttgtgtatgtccaagaaagctagtgggattggcttcatgaatatagctatttggaagcgagctgctctgataaagtctggtcaattgcaacaaagaaagataacctatgataagtgagtgcataatatttatccaaagcatgaggcttggtggggacacgataactcacctcaaagtagctggtattggaggaaattagtgaaaataaaagatgaggttagtcacctaatggaacctaaacaatttacattaggtatttaccaaattttttctggctacaaaatgcttaattaggtacaagatagatttcattggagcaagcaagtttggtccaaacttaattaacattcctaagcacaattttgtgctctaaattgtagtacaaaataggttaaaacaagagaaagacttcacagattcaacattgcagatgatgcatttgtattctctgcaacaatgttgtaaaaacagttactcatctcttctttgagtgtttgttctctcgggaatgtctatatttgttaaaaacttggcttggatggaatgctcacattattgccttgcaggatatactcaaatgaattgatagatctaagaagagtaaattcaagaagatggtcttagctgcttccatagcaacattgatgtaccaaatatggcaggctaggaaacattggcaatcaagcatgttagtccaaatctgttaatctaagaaacaaaatagcacatcaagactaggataacttgtgttatgtctaaatatgtagatcatagaaacatagattaagttgatatattgtaatttctcatgtattgattcttatatagacatccatatgagatgttttaggttgtataaattagtttgttagtgcagtgaaattttttattttaaaaaaatattggctaatacagtaaaaaaactatccaattgacctatattttattaaaactaatataagttaattaaaggttaaataaaaagtctaaaaaaatagatacacaatgatatgatgaattgtaaattaattgaggagtgctaccgtcaaccttctattacaacctcttagtcaatttctgtgcctgaaaatacatgtcagaatattcttttcaaattttttttacgacatgttcgttatgcttcatccctataaatttttgaaaagtttcgaagagtttacagtgccaaaaatacgcttgaagttttttaaacacgcgtgataattatactagaatactaagaactctgcttttggtactgtaaactatttaaaattttcgaaaatttacagggatgatcgatactgtaattataatgaataccgctataaaaaaattaaaaaaaaagtattccgatatataattttggacataaagattaatcaaaaaaattataatagaatggtct

SEQ ID NO: 71130 - DNA, 1809 bp, Cannabis sativa
attttgtccttaacaaaacaacatttagagtgaaattctaagaaaacattattgtcagcagttaacttagagacactaatgagatttttagtaaggtagggactttaagaacattttttaaatgtaaggaggagtgagaggaagggagagaggagttaccaatgtgactaatggctagtcttttgccatttccaacagcaagggtatcagaacctgagtaaggaatttcagattctaagtgttccatgccctgagcaatgtgattggtcacaccagtgtcggcataccagtcacagtcctttgaaaactcgggtaatgcagaactggagtaggcttgaggatcttcttgatcatcaatttcagcaagaaacactttggattcatttatttttggggtgacaaaagccttgtcgaatctgtagtgacagacggctgccgtgtgtcctgctttggggcaaacttgacagagtaaccggggaatggatgggtttctcgtgtatgcacgatcttgaggacgattcataggtggataatcacggttttggctgaaatttgggcaaaaattgtttctgttgttggatctattgttgtgaatgcttaggtgggcagaaagatgagcagtagagtcattaatggagcaatgtctttcaagcctgctttcatgggtgagtagtaaagattgaatagactctaaagagaggttatccacaagacttgttacatgaactaccacaggatcatactcagggcctaacccattgagtatatatatgcatcacaagatcactgtcatcaagaggatgaccagctgtagcctaagaattagcaagaattttaaccttatcacaatagtctgtgatggagaggttacctttcctgatggtagatatctgagatttgatctgaagcaatcttgctttagattgactggcgaatctctgttcaagggaacgccatgcttcatacgatgaggtgtactgagcaagagagccaagaatggtctctgtcataaaggagcggagccagctgagtaacaattgatctttttgtttctagatctggaattctgggtttgtatcgccattaacaagaactcaaagaggggctacaccggtgagcaaagtatcatcgagaccgtggccaataatggtgggaattacttgcgatttccatgcgaggaagttgttttgatatagtcgaactgtgagagacaaattcaaagaattctaaaagggattccattgctgaaccgtagttgcagcagtagcagtagcagagtgtgaagcagcggtttgagtagtaggttctgggtgccgaggatccatgaacgacgtaggtcaaacgctatctgataccatgtaaaacaagtgaacttatctatgcaattctaggaggacacaattagagaattgaatcacaagactttgcaaaagttgcaagtcttgaaaaatgaattggtatttataagaggatgaagtacagagctgttacaaagagaaggaaagaaaatagttaaagaaatctttaaccaactgattaacagtttataacagactaaacttaactacttgtaactaactctaaaggttgtttatcaataaataagggagaaaagaaagggagaacttccctcaccaattttgtaaggaatgtcaataaaggtaatagatcttaattatttttattttattttaatattaaatatataatgataattttgtcctttaaaatacatcttacaaaataactaccatataatatagtttaactgaaaatggtaattttgtcaatttaagtattccgattacg

SEQ ID NO: 71131 - DNA, 1020 bp, Cannabis sativa
aagttcatattttatttaagcaatattaacatatttagattaattacaaaaaaatacacaaaataattataattataattaataacagtaatacaaatgagtggtttcaaaaaaaaattactaatctaaacaaaaaaaaaaaactaaaaaatcatatacaaatcaatatatacaaacccaaaacccagaaatggttgaataatctgtatgctagtatatgattctaaaaattacaacaaaagaaattagagattgtaacaaaacaaacaatacaatcagacttcagtcaatttctaaacttgaacttgaagctttgaacttgaatctttagtaagataaacaactcattttttttttccattgatagaatttgaaaataaaataaaattacccataagcaatagaaaagaaaatcataatatgaaatacctgaaagaacattaaacattgaacaaaaaattacccttatttgatttcggagatctgtgaaatcaaaatgattcaatataacaaatacaaaaacaaaaatctttataaaaattgggggaaaatagaacctgtaagagagagggagatgtcggcgacaaccatctccaccatcgccaccatcccagagttatctccaccaacgaccatcttcaccagtgccaccatctgccgatgtgttcttttttcgagagagaaggagaatgaggcttccaggggcgtatatcttgaatccatggtgaaaacccatctccggagtgcggctatactagcgccggcgtcttccttctgagagagagaaatagggctgagacggttcatgtgaaaaaggagagagagagaggcgaatctgtgggttttcgggggcggggaactcgatttcgtggtttattttcacaatcggtatccagagcttcatgcttgatctgggcagtagctatcaatgcagagaataaagaaaaagagagagggaggcagggtgagaaaagaaagagagcaatggattgatctgtagggttttttttagtaataaaa

SEQ ID NO: 71132 - DNA, 1576 bp, Cannabis sativa
ggttgttttattaaaaaaaaaatagtattttttttaaaaaaatttgtataacagtaaaattgtaaacttttgcccaaaataatatagtatttttgtaaaaacctcaatatatatatatatataaatatctctttttacactatataaaaaatatatttatatacaaaatacatttaatatgtttattcaatgtattcttatatattcattaaaagaaaacaaaaaacataaaaattcaaatttttctagtaatatccattcataggtaacacatattaagagtgtacaaaaatatatgtatatatatatcactttgtgcatatatatatatattgaaataggtgattaaatactttatatataaatataaatatatatagaaaagtactagcgtcaactttctattataattttttagtcaaattctgtgtttaaaaatacatgtcagaatattttcttttaaacaattatcacattatttgctatagttataatatcatccctataaatatttgaaaatttttgaataatttacagtatcataaataagtttaaattttttgaacacgcgtgacaaatttaaatatcaaaaattatattttcaatactataaactattcagaatttgtgaaaaatatagaaagattgcaataaaaagttataactcgcacttctcatatatttagtttagggagcttatatatatatatatattgtacagttacacgatataataattgtataaatagacaaaattatatcatacatcatataattaattaaccaaccaatatacttattattattattattattattattattatgaaattaatgtaattattattagtattattatttgaaacaattattataattattttgaaatgcaatattatattatacatgtatagcaatttttattaatggagaaaaacctaaaaaaaaaatctatatcaaagcacgaagttcatgtgaccttattattatttaaattatgcataccaacctttttcatattttcaaaggaatcttgttaggtgcagagacagagatcaaccacaaaattatgttgatatataatccaaaacctttgaacttattacttttggaatatatataaacataccatgaatttcttgtcgaatcttctgttctatatatattttctatgatacagttatcttataatgtaaggtgggcatgcattgagctatcttcatgattttctccctacccttcaaattaatctcagccttttaaatatttttatttacgtgtgcatatacatactgtaataatatcttcgtcttcatagtgatcatcaccccaaataatgtttgtattcttatgaaagtgataaaaaaaatttgaaaaatgtgattaattatgtgagagagaataataaaaggatacaatgaaattgagatataaaattattaattaataggaccaatataattacataatttttattgagattttttttcaatatgttatatgattgtggctatatatttaaatttaaatttactacacattttttattttatattaattgtggttatataacata

SEQ ID NO: 71133 - DNA, 1087 bp, Cannabis sativa
  modified_base (306)..(306): a, c, t, g, unknown or other
aataaatatgcatgcatgatgtgtgtttgttgtcaatgactttttttctcaccctgttgtgatccttacgtttctgggtgattttacaatgtaccctcttaaaatggatatactgatgcatcttctacttgtttcggtgtaatttttttttcatattcatgtacgttataattatttaagatatcttaccaaatttagagaaattcagaataatatacaatacaaaaaataatattcaaacagtctattttacacgtgtataaaataaaataattccgggtgcaacacactgtttgaacgcaattntcggcgtgataaacttcaccgaatttcttaaaattttacaagatgtctaactataatttacatgatcataagaaaaaatttgactaaaaaattatttcaaatacacaaatatatagagatgtatcggtgcatcccttttaaaatgatacattatagaattttcctcttatattttctcttcccctgttttttttttattttttatggtccctttccttgaaacctataaattgaagtgattaacttattgccactcagttattgaatattgaaaatgatatttgtccaaccaaaggaagaaaaataaataataaaagcaacattttcaccagatggcgacgtgtaaacaacataagggaaacataggtctattattaattatctattataatcctatttcttaaaaaagtccatttatatataatctttagtttcatattgttatattttacaaaataggcttaaaataaaggtattttgatcacgctaggcctttgggataagcccaaagccccgggctcgaattgtattctactgttgttttataaaaacacagtattttaaaaaaaaaaatccgtgtgacagtatttttataaaaaataatctaattttcaatatttttgtaaatttctcaaattaaaaaatataaattacacgacgaaattataagttcatttttttatggcataaataattaattctttgggagtattggctttttggttttttttacattagagcttttttatactatatttttgtaaagaaataaaataaaaat

SEQ ID NO: 71134 - DNA, 2128 bp, Cannabis sativa
atatatataaccgactgaagattccaagaagaaagagataagatcataaatgagattaaaataataatgtataattcagaaaactaggcctcatataatttttaaccgctttttttgagtttatcacgtggtttatcttttcaaagctgatgcatataacatttataacattatgtatgtactgtctcactttcaatttaaactcacctaattttgtaattagaatcttttctaattaatcactatatacatatattatatagtttctatcggaagtttaactgttatagaatgaacatattatttaataaaagaatatatacataatattattgtatattaattcattctatctaatttattcaaaagagcattgctattagacaccagtgtctatcaccttctcgacatatcgcgttagtgatactccctaaaagttattatattaaactatatgggacccgatatttaattggaccagtagcgatattaacatatagaatagtgttagacaccactggtgccctttaacatttctctattcaaaaatatattcccactatcttaagagattatgaggagttcaaaatgtgattaattgaattattaaaccagaaaatataactgtttaaaacaggagtgctaaaggaaattcttttttgcactgtcttctatatgttcttttttacaattttattacaagtgtcatgtttgagattatttaattgtaattaataattaggcataaaattatcatctagttacaattatacaattctaaaaattactcaattattttttttttttacttaaaactcaaaaaatattaataaaaataatatcaaataatttattttattgtaaaatagacgaagcaaaagctaacctaattatgtttaagaatattggcagccaaactaactacgatttgtaacatttaactacataaattaatttttaatggttaaattctctaaacctcatttctgtgagttatttatctattccatttaaaagactttattaagtgtcacagtgtacacaaatgaacacgtgtcaaatttttagtaatccatataattttaattatttaaatattattaaaaaaataattaaaaaatatgaaaaatattttaaaaaaataaataattttaaaatatatattcttttcttctttccttttcttctctttccttttcttttttcgtataaccctaatccttctaagccccgatacccaaccctaacacccaacaccatccgacggccccaacttgtgaaccccaattacaaccaccgcctacgagctctattctaaccaccaccttagaattatcatcatgaatagattagaccgaaaaacaccactaacaattttacaatcatctaaagggactaaaaataattacagtcatccaacaaaaaatagattattcaaaatccaaccatgaccatccagcccagtcgtgcaccctcttctttgttcgcaaaatcgagctatgatttctctctctcactctccctctctgttctttctatatcttttcacacactacaagaaagaagacttttgccagcgcatttggccaaatgcaccagcaaaaggagtggcttgaaatggccaattaatttgactataactttattggtgcacaattgtgtctataaaagtaatgttgctggtgcaatttgtgaattttctcgataaaactgagaaaactaaccgccttttggtgcatttttttcatgatttgtttacttttgtgccaataaaagttctaatattttggcagggtaattctctcgtaggaatattcttttctagaaaaataacacatttattgttgcaaatatgccctggcaaaagcccaagaaaaagtaggttggaaaatcccaacaaaattgagttttagtgacactatttagagacccgcacaaaagtgcatgtcactaaaaggttagggataagttttagtgacacacacaaaaagactctaaaaattcaatgttagtattctaccatgagtgtcactaaaaatatggtgggtcactaaagagttactcccataatttttattactttttttttaaaaaaaaaaataattaatattgacctatagtgacgcgt

SEQ ID NO: 71135 - DNA, 2039 bp, Cannabis sativa
gccaagaattatacatattatttatgttatcgttaaaatacttgatatgtgttttggcttggcatcagcactataagaaaagatcactttataataaaaatctatctcataagtgatatgggatgaaaaagtagatgctacttaaatatgacaacttaaaaaaagaaaacaaaaccaatttgatccacttttgaagcattaataaaggtaaagttaaagtcttttttaatttcctttattatttatttttttgtattagtgaacccttttaatggacctaatttttgcttcttttttgtttactgatcggttattttatttttttatatatatatatatttatacactcatctcctatcaactttaactaaactaatatcaaaaggatcttgcttaaaatgaatcaaaatctctttgtttaataggataagatggcaaatatatataacatatatatgtaagaagtattctgtagttattgaacccattaagcaaagccattatgtaccatataagtaagtttctttttttttttttttttggaaaggctcatagaataattaaatttttgtcaagtatatatatctttttaattaccaaattaataaataaaaatatttaaaatcatactccaataattggtggtcacctcagtggtgatcatgtaacgaaaagccctacatttccaaattaattgccaactctctctcatgcatactccacttggcccttttaattttttattttcttattataggtagttataatatatataaatttgtacttttattctaaaatattattttctactttttctttataccttcaatgcaaagttgacacagcataatttcgtctgacatggggtgtcaaaaggaagaaaaataaaacgaaggaaggaaggaaagaatatactgtcacaatattctatatattatgtttttgcatggcaactttattagtttatttatatgaagaaaaaaaatatattgtagaaaagaaaataaatttataatgcactaataaatctagttaataaggggatttaaaattgattagagatataaaattaaatttaccacttcagctttataatttaattaattaaattgattggtatataaattataggcagaatctaataattaattaattaatgatctattatgtaatcaaatttcatgggtgttatatatatttatatatatatatgtctcgagtatatagcttttataaattggatgggaattaaaaaggagaccatgcacactttttatcaattattttcttttgttcacattatataattaagattattgtctcatcgatcgatctttaattatttgagataatgcatcactaaaaatgatcattatgtcaaaagtgaggtacatgttctagatacctaaagaaatttgtcactacttttttgggtcttctactgacaattatatatatatatatatatcctatttgaaatatttaaccctagtttaacttgttatctagagtctatacactaaacaaagtgctttcactgaacaatactaataataaaaacaaattctaacagataaaccaaccaatattttgtttaggagtaaaaagttacctcattttaggtttgattcagtagtactaaattaaatggatactatgtaacatgaaaggattgtgtttacattacagccaaaagaaaaagaaaagaaattaaatatgctctcctttaaaaaaaaaaatagtgtattgtacctccctttttaggacagcacccgaaactttctataaagcaagagtctgttatacacttaggtaaagtttagttgagaggaataaaaatgagaatataaatataaatacgaataagaatgaaaaaaattattaaattttttcttattttgtattagaaattttaatactttaaaatgcaaccaaagaaataaaatgtaaattgttttattttcatttcattacctctaactaaacgctaactaagtacgtgcatgtttggttagagaggatcaaagttatatgaaatt

SEQ ID NO: 71136 - DNA, 1410 bp, Cannabis sativa
cacgatttgttcagaggtcagaggaaaaaaattactaattaacctaaaaaaaggtcgcaaaaacagataatgaaaaggaattgtagaactaaatcaaaagaaaaaatgaatggtacaactaatcttttttaaaaaaattataatcataatataattaaaataactaaaaaataataatgatatattattttttttttatttatccaaataatagggacataatattaataagaatcattgaaaagaaagagcatacctaaatttttcttctagttccgtagcacttgcaagacttgagactattagttttcctcaaaaaaaaaaaaaaaagacttgagactattagtttgaaaaataagttaatattaggtataataaatttatattaaaaaaataatattttaataagattctagatttgaaaaaaaaaaaaaaaaaactaaaaaaagaaaccattattcagccataaacagccaaaaaaaaaaaaagaaacaatgaaaatttatagttaatgaaattgctcccttagttttagtgagtaaactttacaaaaataaattaaatgatgtatcattattatattggttagacataatataggatacaatatttgtacacaaattctattcaatattaatatcatgttacattacttaaaataaattaagcaataagcaacaattataaattacaagtattgtagagtttttaatttatttcttgacatgtacatgtgagatatgataataataacggatgacatatacagacaacaattttaaaaatagttgggatataatgataatacaaaaaaaaaaaaaaaaaaatacttacttaaataataataatactctataatatgtctctatatcgttctatttatttactttcatattaataatttttagaatactaaatatacactagtcgtataaatttaaaataataaaaattttccaatcttcctaataataataatttattagcaagcagtgttgaagaaatttaattcttctcattttaggaatgttaagatgaactatgagttggccctggagttctacaactaggcacagagctctctccaacatgaccctcactctcatactcttcaattggagctaaactaagctagagatagaagatgatgaaatgtagcaatctttatagcttttgtgagagatcacaatgactcagttttgtgggtgactaacaacatgtttaacttttcatattctcttataggagaagctgcggcctacttgttagttctagaatcaactacccgtttgaagcattcgtttgtaataatagagagtgatgacttaaagacagtgatcaacacgctgaaagaaactacttcgagtattagtaactatgtgttttaatataaaattctctcgaaccttt

SEQ ID NO: 71137 - DNA, 1198 bp, Cannabis sativa
aaatctcccataatgagccatagatctgtattattggctggattagaaatttagtaaacatataaaattattttgaaaaaattagaaattaaactaagaaaaaagttatgtttattaaaaaaatttatatttttgaagagaaaaaatatactcaaacttgtttttcgtaaaatttaatttttaaaaatattgaattttaatattttttatttttaaatatatttttaataaaaaataaataatttttttaattgcttaattagttttaaaattttaatttcttttttgattttcttaatcattagaaatgacatttttttttaagatttaaattaatttgtcaagatttactaaaaaatattaaatttttttaatttttattttaagggagtacgatttgatagttgtcaaagtttagaaagaaggcaaagtcgttaatttacaaagacacatcaacaatttaagtagaataatggaataaaatctaacagaaagactaaatttctttaaatgtaaaagttcaagagtatttttaacaagccgtatattttaagggataaaattaatattgtcgaaattcaaaaggcaaaattactaattattctatatattttaataaattttaattaaactcatagcattgatcgatctattacaaaaactctatcatggggttatgacttagtaattgtgaatgtaatataaatctcacaaattactcacacgtgagtaatattggacaaacccatacaatatttatatattagttcattatatgcttattatgtgagtttaatataatatttgttaagtttatattaatagatttaattcgattgatgatacttaatttttttttttaataaaatatgaagaaatttatagataggattataatatgatggtacgcattagtcttttgatggttgtagtcaggagcggagctaggactaaatattaggggggccaataacaagcaacacgtgcaaaaataaggcttcatgtttataaattttggtgaccaatatctccattttaaaatcgtcttgactatattcattagaaatgacaattttatccaaaaatttatttacctgtgggtaccctacctgtatgtgtatggtattatggtattacctgttgaattagggtacaggatagggtgtaagggtacaaaaatatgtacctgatacaggta

SEQ ID NO: 71138 - DNA, 2265 bp, Cannabis sativa
ttgacataaacaaaggagaagctaatctctctcacatgaaatcctctggatataatcatcacagaccacctttcaatggctctcagaattcctattttcactacagaaatggtccccctcgttcagatggctccagcaacatgtatggtggtcccccacctcaatttccatcaagaaatggtcccccacatggcaaaggaggctctgtgggtcgaggtggtccctttggccacaataaagtgcccagcaatacatcaggtcagaaaattcagtgccaactttgccacaaagttggacactctgtaaaacaatgcttttatcgttttgataaatcttttactggtcctgaaagttttgctaatttccctcctaatgctaatcttgctgagtgtcaagctctttatgcaacatctgaatctgtttgtgatgatggttggtacccggattctggtgccactcatcatatcacaccagatcactccaaccttgggacaagcacatcctacacaggtaatgagcaaatatatgttggtaatggcactggactgagcatcgagcatattggtaattcctcccttatttctcctttctcctctcaatctctcaacatatacaatcttttgcatgttccatctattacaaaaaatcttctgagtgtttctcaatttgcacaagacaataatgtattttttgaatttcaccccttttcttgctgtgttaaggatctagcatctcagaagatcttgttggttgggaaatttgagaaaggattgtacaagtttgattctcctcatctcagccactcttcaactcagccttcaaataaagcttctgttcctcaatgtaacacacatcagatgtctgttaatcctctttactctttgtggcacagcaggcttggccaccctgctgctcgagttgtaaaacaggctctctctcaatgtaatatttcattacctaataaaaatttctctgatgtttgttctgcatgctgccttggtaaatctcataagctgcctttttccaactctaccacaatctatcacacaccacttgaacttctccattctgacctatggggccctgccccaatcaattcatccaatggatatcgatactacataagctttgttgatgcttattcaagatatacatggctatatcttcttagaaggatgaagctttaccaacatttactaagttcaaaactcaaatagagttgcaactaggtcataaaatcaaagctctccaatctgattggggaggtgaattcagatccttcacaactctattagaaaattgtggtattgtacacaaattggcttgccctcatacccatgaacaaaatgggactgtagagaggaaacataggcatattgtagaaacaggtcttactttattggcccatgcttccatgcctctcaagttctgggatgaatcttatcgaactgccacctacctaataaacagaatgcctaccccaactctcaatggatccactcctttggaaacactttttaatataaaacctgactatagccaactcaaaatttttggatgtttatgctaccctaatttgagaccatataatcggcataaactccaatatagatcaacaccttgtgtgtttttaggctatagtatgtcccacaaaggttttaagtgtctttccaaagataaaaggttgtacatctcacgagatgttatttttgatgaactccattttccatatgctgcttctgctattcaacagaataccagttcaccacctactccaatgtccaattctccaattctgtctataccaccattactgcctactcctgtgtccaactcattgtctaatcagtatactgcattaccaactccatcatccacttcacctactgctgcattaccctcacctactcctgtacctgttgacatctctcccattcccactactgtttcaacacaatctgaaaccaatgctcctaatgttcagcctattgctgtcactaacaatttacctgcagataatgatgcttctacagttgtttctaaacaccccatggtgacaaggctcaaatctggtataaggaaaccaaagattttcctggcagcctgcaatccgagaacagtcaagactgctttacaggaacctcattggttcaatgcaatggacaatgaagtcacagcccttaagagaaacaacgcctgggttcttgttaaacctccaccagacagaacccccatcgggtgcaaatgggttttcagagaaaaatt

SEQ ID NO: 71139 - DNA, 1603 bp, Cannabis sativa
agtaaatctgattatacgaaatgagttttatttagggcataaaacccaacaaaaacttgtcatgccatgtggtaaattatacttttcttacctcaagtttcaattcagatatgtaggtcgacttgcttggagtacgatcgataatcctgagtcctatgtcataacaataataaactaataagcgtttatcccaaaataccgcttaacagttacaaggacagcctaggatttcctaccgattctcgtagttcaaatacactaaaataaaacttatattttaactctaagacatacaccatatggtagagcttgtcgcacgttttgaaatagtatataaaacgtctaaaaacacgagttaaaagttatgacaaaaatgcaattctagatctcactagaatttctagaaatgagaagtcgttttagcaaaaatggtagactctttttgggcatgaaaatctcaaattttgcactcagcgaaacgctcccgaaacctatccaaatcattcaaaacttcacaggacacatatatacaatatagataacaatccttatgtaacagaaattaaaattgagtccttacatagaaaacgtcattaatgtttagacttgagctataaaaagttctaaactcaatttctaactcaaaatcacctcaaacttaacaagaaaacattggaactagtcccatgactacctgagaataattctataaggttagaacctccataactattctaatttgtaagaccctatacgaaaccaaatgtttcaaacttaaaacagaattaaattttaccttaagcttttctctctccaagaattgttattctgctgctaccggagcttagatcgctaggtttcaggtagaaattcaaagaaaatggataaggagagataaggattttgttagaggacgagagtttcatttcctttcgtatgttttctgtttataacttataatttatatatactgttaacgtttaataataataatataataattaataataataataggagtaatagtaagtataataataatataatattaacgataatttttaattaatgattatcttatctttttttagccactaagaaatttctatttctaagacgttaaaccaaattttgtatactcctaattacctcaatacctacactatcaactgatcacaatatttccatcaattctatcaattaagtttgttatgacatttttggtcacaatcgagtctccaaggtcaccaaaattaaaaaaaaaaaatattacacgctaataactcgtattatattcacatgttccgtataaatctccataatttataaattacgcttatttatccacttataaaaaattttaaatttacattgaactagattagtaggatcagaatctcacttattatctgattaacccaaaatataaatataaatcctaattatttaccattaggcttatcgagatattattgtaatgatgatattttttcactacaacaaaagggactttttatcccactttttacatccgataaaataaaaagtgggataaaaacttttgatcccactttttcatttggaaccttaaataaatgttagg

SEQ ID NO: 71140 - DNA, 2990 bp, Cannabis sativa
  modified_base (26)..(29): a, c, t, g, unknown or other
  modified_base (2735)..(2740): a, c, t, g, unknown or other
agtccaattccctgtggttcgacctnnnntgtgtgagtttactacttgattgcgtatacttgcgtagtgatcataatgttcgtaacaaatctgtatctatttcactatagcaataatcaatactcacttcttagatttcgtattaatatcataaataattaattgatggtcaggtaagtaaagaaattaagcataaattaaatagatgcacataaaaaattgaagaaaaattaaatcacattaaaatcagaataaaatgtcaaacaatctctattaacaccctaaataaaaaagtctagctactcatcataattgaaaacatctgataacaattaactaagaacaaagaaaaagagtataagaaaagaactcgttgaaaaaatatcgataatagtctccagagcctctttctgcctccaatttttgtactccttaattgcctggtgaaaagtgttgaaaaggggtcctttatatagctaaacaaagaaaaaccctaattttctcgtagtttaaaagagacagactgagacactaccttgtagtgtcgaggcgcttaaaactcgatttttagcagcgagcttcctggtgcaatgactaaatattttggccataactctttcaatattgcttgaaattggatgattcaagatcatttgaaaaattgaaagagatatttaaaacttttatacacaatatttttcctcaaaatgaacacatcatagttgaaaattagattaaagcttcagacttgattttcaatcacaaatggagcgtgttgagcctccaaaacatagaatatttcattatttatatcctaaaactccaaattctatgataattcatcatattcatctcatttaacacgtttcttcttattttcaattcacattatgaattttactatttaaacctaaaacaaatagaaaacaagcgtaattatgcacaaaataaatataatcaattgaaacatacctctaaaacactttataaatgtacctaaaactaaccaatcaacatatgacgtcatcatagacactgggtaagtgcaaaattgtctaaagaatgtaatttaagatgcctaagtgatattttaacatcacttagactacttctatgttctagcaaagcttgtcaccaattctcggagatgttgctgttctgcgaaaatgagagacatgaatctctttatttttgagtgagtttcccatgttagaaatgagaaatgcaaagatttgaatttgacttctccgacttcatagatattagttattgtgaaaaactagatggacagtgaaaacagaatcagaattggataagcaggacccagcgcagtaaggccatttgtcaacttgagcgctgggcaccccatttttgagttcgcgagttgttgttttgatatttccaaagttcttaaacttgaggacaaggtctcctaccctatttttgaccatttcaaattcaatgatcgaattagatttgacatttgagaaattgaaagcagcacaccaggttgattgtcaacctgggcgctaagcccaacacctagtcaacctgggtgctcgtccctatttcaaggggctcaagtttatagttttctccccgcgtttgcttgaatcttcattatttgtgatgacagaaaattcccagaatacttttttgagaacttgattggaaatggctcaagttgacaatatgtcaacctgggcgttgggtcccatttctgtcccttcgtaagttccatttagtccccaaaaatagttgaatcttaatctttcctgaaaacaaagaagatatgtcaacctgggggttgggccttacttttggcacccatgaagtgttgttcttccccgaaagtgcctatctccccatttttgatgaagacgaagataatgcaaaattcgaattgtcaatctaatacttggaaggcgcctagattggcaaattatcaacttgggcgatggggtgccggagcaccgggtgctcaaaaataaacttactctgaatatgattttgatgcctcaaacatgttagtggtatgtctagttgtcccaatgcaaattttgacccatttacactaagacggtcccagaaactgaaaccctagttgggaatgtcaacttgggcgctgggtgaaaccctaggtgccgaggttggcttctggggtgtaagttcatgtaatttcaactcttgggacctggatatgattgctccatatcttcatggttcaaaatactaaaagatagtgagttggatttaaattattgaaatctgaacttccattctggagttcccgaagtcaacctaggcgtagggctagggacccctctcaggccgacttgctatgattcgagactactcaactctgaaatgttatctttcttgccacatgtcaaacattgatgtccacgttattaaggttacttttggtgtaaacaacttattttttttcttattaaaagctttcatgagttactttctggtaaagttgacaaataaggcagtgtaaaatagtgttgtaaatatgggttagattttttgacacaacacaaaatcagtatgagaggcatgagcacgattcgacacaaaaaaaaaactatgtgcttaggcacaacacgatacggtgttgcaaattgacacgacacgacttgaaaatatgaatttaggcatgatatgacacgataaatccgaatgcacgacacattaaaaagtatgataatttaataataataataatnnnnnnaataataataataatgatatatttatttatcaattgcattattgaataaatatttaagttggtagtagtattcaaattctaataattatcagttatatgattgtgtctataaagatgtacaagtaattaaaactacaaaatacacatatgttttagtaattaacttgtcaattgtaaaagaaatgaaaaattatggaacttaaattagagcttgtttaagaaaatagtctgggctatttttttttttttt

SEQ ID NO: 71141 - DNA, 1057 bp, Cannabis sativa
gccacaatatatcccaaattattaattgagtgaatacattgtttttgttacaaaactgataatttaagaggcgcactccactgttatatatcccatgtaatcttcacaaaacaatagtaattataaaagacgatagataattataaacaagctctcatatacatattatttaaaaacaaaaaataaacaataagtgtggattcaaacatcgcaaatctatttttgttgtataacaatgtcctgagacctagacaataaaaatgtagcttccttgctaataaaagtaattcgttttagtaagctcattcttagaaaaagaaaaaaaaaatgttaagcttattattatatatggcgaaatcatatataacttatacttgaaaataaaaaaataaaaatgaaaatatgagtgtaatccaattaccagccaatatacatataaatggtgaagtactgtatttcaaacaagacttacaagagtcaaatttctatatatatatatagtgtacttttttaataagagatataaaagaacacgtacatttatcaccatatatatattttgaaatgatgtgttccttgctacggaaattatacattaattaaatagtttcgtgtccaatactaagggaaaaatagaagaattttatcgaacaaccaaggtgatcggtttatatttctttttaatattgtctagataataagacacataatgtacatgtacacactaggtgtatccaaaaataatcaaattatatgtatgtcatgatgttttcaaataaatgtaagatataatttatacaatgtaatctttcaaacatattttcaatttttcaacaaaaacaaaaatgtatttcttagccctatacatataatttatacaatgctatatttctgagccctagacctgtatatatgattccagagagagatatgtataaattatttctcatttgtactgtcgaattgttattcccaaacaaagtaaatgagatcaactcatagatatctagctatatatatagtccaactccaacatatatataagccctagttttca

SEQ ID NO: 71142 - DNA, 1532 bp, Cannabis sativa
agagagttggttaagttatttattccctaactaacttaacaacctcgattcctacagccaccgcctttaggatcttgatcctaagcctatatataccaccctcacttatcatttcaataagataatcagattgagacggaaaaatagaaagagaaaagattgagaggtagagaaagagatgtactaggggtgttcataaaaatcgaaaaactgaaactgaccagaccgtaaccgaattttcgattccacgtcatcaccgaatttggcaatcggtttcggttatggtttttttgacatggtggtcgatttcggtttttgaaataaaaaatagttaaactaaaaaactgccaaaactgccaaaaattgccaaaaactatataaaactgccaaaaaccgtccaaaactgccaaaccgaaaaaccactaaaaacttattttcatctgaaattgccctgtcataattggcaacaagttgttcttgaaacagatagtctggtgtgcgtacaagctattcaaagtaacatccctatgacgtctcaatttggtttacttgttgttgatgttcgaaatatgttattatcattgaaaaatattgaattattttttgttaaacgatctacgaacaaagtagctcactgtcttgccaggagctcttgtttctcttcaggtcgtgcacttcagttggagaattgttcctctgaagtgtgttcgattgttttaagtgattgttttgcttaataatatgctactgattttattcaaaaaaaaaattatactagtttgtttaacctttttttctttcttcattctcatattcttaaaaaaaattatacataaaaaaataaaaataaagtatattctaaatattaaggtgaaaaaattaaaataaaatttagataaaattttattatataatgattagaaaatttatacatgattttttttaaagaaaatatatgaaaaaaatataaaataattattaaaattaacacaaaaataattttaatagattgattctttaaaattaatttaagttacttttttatgtggggtatatttatatataaatttacatgggtaaataaaatatttaattattattatgtcttatttttgattaactaaaaataaaataataattttcacataaaataaaatatatgaaaattatcaacgaaaaatatgtattaataaaaataaaaaagtatgaaaataagtttcaatgcatataattaatgtatatgtatttttacttaaaacatataatatgtattttttctgtatttcctctctctccctttatatatacacgtatacatttattataaaaatttaaaggggtcatggccactgcatgacataaggaaatttcgccactgatgatattgaatagttagcagcggagctttcagcaaatacaatccatatggtatcaaaggcaaggtcatctgagctaagagcaatcttggtattttttgaactctagctcttgaatttttagccaattggcctgaggcacaaaatgaaagggta

SEQ ID NO: 71143 - DNA, 2203 bp, Cannabis sativa
ggtaagggtgctttataaagcactacaattatgtgattatgtattgaatgaatgtatgtttagtgatgaagttgttgattataagttactatgatttacttataatgcgtaatatgtgtgttggtatagatattaaattatttatgcatgctgaataagtaatgaattatgagtacgcatattatatcataatgtgattacttgtgtttataatttccttgatttaatagcttttcttgctgtgtcattgtgactcacggtgcttcgtggtgtaggtaaggaggaagaaactgtggtcggccatgactcaaaggtctcccatcaatgtacatatcaaccgtggtatttcggctgccaatggataggatccatccttttgactattttatggaaatgtaaccctattgtgtaaatctggttttgagctaaagtgtaaaagtttttgaataggggatccccatacttagcaatcttttcaataaaagttaagttttagtataatttgaaagtttttaagtaaaccacacttttcctaaactaatagattaactaagaattagtttgtaaaagcacacacgtggcgtccctgtgagacaggacgttacaacatggtatcagcgcgaccaaggtttaaagatcctaaagagtggtttgatatgtacattagttgcgactactcgttcgactcatggttcaataagtgttaattgttagattatttattaattacctaattacatgcttgattgaaatgtgctagttactagaaaagcatagtaatggctgatgtgtaggtgtaaacatggaaatgcttattagcattgattatggtttaggagatactaaacaatggaaagttacggtcgccagtgtatagatcatgcacccgaggtgatctaatagtggtaattgtgagctttttaggctcggggttggtggtaagggtgtgaatcctccaccaccacaagactgggaacaaatgtatgctgtaatgtaagggatcgtccagcagcaaggtgaacaaattagagaattaagagagtagcaagttcagtctgctcctaaccctctggcacatttggtagtgccccaggatgtggaacattgtctgggatcgttgtacgagcaattcaggaagtagaatttgccagtgttcgagggtggtgttgatcgacttaaggtgacgcaatggattagtatgataacctccatttttgatttcatgtgggttgagagtaatgatcgagatgtgctatctacatgttatgtgaggatgcccgcatctggtgggatgccttctagactttgttttatgaaagtactacaataaatccattcgagctactaaggctgaagaattgatacagttcactcaagacaacatgatactgacagagaatgccaccaagtttgattgattggcaaagttttcctttaatgaggtggtcactaaggctgctagatacgccaagtttattcagggattggaagaacatattgcccgagatgtgaacatagctgctaaataattagtgtttgttcgaacctatgctcaagtagttgagctggcccttgttgctgagaatgtggaggatcaaattcgaaagagaagcaatatggggagagatttgtgcaaacaattgcccagtgttaacctaatgatcactggaaaagacctaattacccatcagctatgggtcataacaagaggttccaaggtaatcaagatttttgatgtggtggaaatgaaaattggataacctattcagagtgcccaaggtgcaaaagatgtcatcatggcgagtgccaagctagagtgaccatctgaaaagtaaatgttcagctacagtgaccagaacagaagaaagatgacactctagttttttctctaacccaggcctgatgctcgtccttctaccgtgacaagtcatatttctatcgatgttacctttgttgattgttttaattaattttggtgcaatgcattcctatgtgttgagtatagtgattggaaatttgcataaacctagacatattttacctagaggttttgctacctcactacgtactagagagttagttatccccaaataagttggttaggttccttctagtgtttgtggagggaagggaattgtcggttgattcaattatctaatgactatgggatggtccacccccaatcacttagaatagctaacaa

SEQ ID NO: 71144 - DNA, 2934 bp, Cannabis sativa
gctgcatcagtggcttgcaaattggcacccgatcggttccagcaggcccgagaatgaggacatgttaccagagcgtgcatcgttgtctcatcttccaagttgcaccgtgaacatactctgctgataggtacatgtcgatgctgaagttgaacacaagtaggcaaggtatttgtagcagcacgccataagaagttgctgatttttggtggaatttttaagtcccacaacttacgccaaaaaccagcattagaatgatcaacagcagccgctttcaactctctcaatcttctatacgcactcttgaccgtatatactccttgagaatcaaacttccaagcccatgaatcaatatcagaagtcgaactcaactggatggacaagataagttgctgatctctagagtcaaaaatgtcacggattaactccacatcccagcaccgcctatcaatctcaaacagagaatcaacagtttggccttgtaatgcagggtgagaagttgtaacatacggattctcaacacaatcaagccaagggtcgtgtagaatactcaccgaagaacctgaaccaatgcttcgctgaatcccactcaatacaagtggttgtgcctccataatgcttctccaaatgaagctcggattgtccccaacagttgccgttatgaaagacccatgggagtagtaccgagccttatatattctagccacaagagaagaaggttgtgtaaggagacgccatccttgtttccccaagagagctatgttaaaatcacggagactccgaaagcccaaaccaccctccaacttatgcctacacatacgctcccaactcatccaactagtttgccttctttgggatgagcccgtttgccaccaaaacttcgacataagccgttccatttccttacaagtatccaccggaaggagaaacacgttcatagcataattaggtagcgcttgggcaaccgtcttcaaaagtacctccttccccgctctagacaaaaagcggccctcccacccttggattcttttacgcagcttatctttcaagaaccccaaaatggctgttttgcttctccccacaatgctaggtaagcccaggtaagtaccattttcatcagcctcaaaaatgcctaggagatcacatatggaatccctcatggtgacatgcgtatttgagctataaaacactgtagacttagcgaaatttattcgctggccagaagcagattcaaagacccgaagcatctccaagaccatattagcctcttcctcggaagccctacaataaatatagctgtcgtccgcaaacaacatgtgagaaacaaaaggcgctccacgagcaactctacaacccctgatcaaaccacggctttcatatgcatgaattaggctagagaaaccttcagcacatataataaacaagtacggtgataacggatcaccctgtcgaataccacgaaagggtgtaatcggctccatagactttcccccatgtacaagattatagcaaacagacgtaacacatttcataactagatcaatccagcgttcagcaaaccccatctttaagagaatagcgcgaatatatccccattcaagcctatcataggctttgctcatatcaagcttaagcgccatgtgtccatcacgccctcttgttttcctcttaagataatgcataacttcataggctatcataatgttatctgagattaagcggccttgaagaaaagcactttgcgtatccgaaatcacacaagggagaacacccttcaatctatttgccaacaccttcgagatcaccttataaagcacattacataaagaaataggtcgcaaatcacccatagacctcgggttcttctttttagggatcaaaaccacattagtggcatttaagcttgtcggaaaagacccagtagcaaaaaactcttgtaccagccgaagcacatctctaccaacaatatgccagcatctctgaaaaaatcccggggtcattccatcaggtcccggggacttatctggatgcatctgaaacatagctttgttaacctcttcctccgaaacctccttgaccaactcaatattttgctcataagaaactcttggctgaacattagatgttactgctgtccaatcactagcagcagtagcaaataaatctttaaaatagttcaccatgacatcttccaaccccgagccccactcaaccaatcggccattactatcttgcaactgagtaatcaaattattgcgtcgtcgagaagtagcagatgtatgaaaatacttgctattttggtccccatcttgaagccatagttgcttggatcgttggcgccaaaaaacttcccgttgggcataagcttcagaaagaagtttttttgcctcggcaaatttgttaactgagttttcatcccttcccaacctccatttactaacttccttcttacatttgctaattctttccttaaaatttcctgtatactctttcccccaatcttgtaacggctgcccacactgaaaaatcttgtccgaaataggcaaattcgaattcgcctcccaactatctttcacaatttgcacacacaacggctcccttagccaagcattttcaaagcgaaaatgcttcaaataaggttgaaacacaccataggaagcatcaagcaaaataggacagtggtccgaagtcgaaaagttcatattaaaaagcttagcaaaagtaaaaagatcaagccaagattgactcaccaaagcacggtccaatcgcacctccacccaactgttagtgccacggcctcgctcccatgtgtaggggtatccaaccaactctaagtcttgcaaatcacaatcaaataaagcttgttgaaaaccaagaatgagacgttcaaggtagcgattacctcctcgcttgtcatcatgggaaacaacattattg

SEQ ID NO: 71145 - DNA, 2108 bp, Cannabis sativa
ttccaatatttttataaattttctttataaataaattttaacctaaccctcataatctatttatatctatgaagagtttagagatcgtccataattttgattaactcatcaaccgttaatatatttatagatatgtacggcacatttatgagttatataacatgtttatgtcttatttaattattttttttgaattatatgtaatgaatttaatacaatttatatgtaatgaattataataatataattgtgtatattttaaataggtcattgcaatgttatttttaggttaggtatgtcacccttaaaaatgattcaaatccaaacccgctttttttttttttttttttttttttgctaaagtgaaatttattaaaacaacaaaccaaaccaatttatagttgcaagaagggtgtgcaacttcccctaatgaaagaaccagactaacattcaacttggcagcccaggaggcaagcttgtaagcaccccattacaaacacgggaaattcacaaaacattaatcaactgcccaaaattcgcttattttgtatgagttttcaattgtgttattgtacgtgactcattttgccaatattaatattagtgcaataattgtaaatcttgattatttttagagttttttgcggctaaatcctatcaactatcattctacttgcaattaattctctaagctcaaattttaatggtaaaaccctccaaactacttaactatttgcaaatttacggtgtcatctactttctgctgccaacatagactgcttatgtgtacactcttatacacgttacacgtttatattggtacacctaatattattatttaaaaaatatatttcaaattttataatatttttatatttttgaatattttaattttttattttataacttttttaattttaatgtattttgaaaataatttttaaataataatattcggtgtaccaatataaatgtaccacatgtacaagagtatacacataagcagcccatggtagcagtttaccggatgacactttatatttgctacttcttcagtaatttgaaggattttactgctaaaatttgaacttggaggattaaatgcaagtgaaacgatagttgaaagggattaggtgccaaaaactcttttcttaatacatttcatcttgtttttccatttgattatttgaatccaacttttggttgaacaaaagaataactcaaaaagcctagcatattgggtgtataatgaataatttttctatttcatcttttttttttttttaaaaaaaaaattatgatttcaaataggtacaatgtatagaaaaattttgtaatgtcccataaaataggtctatccatacactttctatctgtttcagcatctgagaaatttttttagtctaatttattttatggtcgtctacgttatatttatttaagacatcttataaaattttaaaaaattttaaaaaatttaactcttaaaatatagttcaaatagtctacgcatataaaataaaataatcttgtgttaggggtattaaatttttatgaatttaatatctatcttaaataattacaacgtaaaccatttaaaaaaaaaattaactaaaaaatttccacaaataccaaaagagattaaaaaaaatgtatagataaaagggctgaattgtaaaagcactcctaatatatattttgaagacttggatgcatagaataggtagtgttaatttgacattaagaaagaatttgaaacttcccgccagccaaacacattcacaaaactttggcgcattttttatcgaacatcctataccattcagcttttctgataattgaatctaatctaatccaacggtcataaagccaaactgactccacacgcggatcgcagcctaatccaacggtcctaataacacactcaacatctatacataactcccaaacctcattaccaatatcactcgagagagaaaagttgcagagaaagaaaggaaccaaaaatgtcaggaagaggcaaaggaggaaagggtttgggaaagggaggagccaagaggcatcgcaaggttcttcgggacaatatccagggcatcaccaagcccgcc

SEQ ID NO: 71146 - DNA, 3161 bp, Cannabis sativa
atcctggtaaaatagttccaacacgtccttcttcaatcgagaaatctcaatttaagaattattttattgcctcgcaacaacttcacgttgttcattagacttgcgaagctcagtctccaactagttgattctctaaaggaccctttgttgagccacgtgagataaaaaagatgcatgcaaaagaacgaagtcaggaaagaataactaaaaagagaggtataaattaaaagtaaaagaagaaggtgcatactaacagagagagtaagatcggcgctcctcgcagataaactttgaaaatcaccatcattaataaggtcccaatcatcttgttgaaaatatttgtaaagatgctagcaggtggtggcatactgtggcaaacttgcgaacccttaatgcttgcaaaatttggcagagggcaagaaggctccaagaacaccatcccgggttgtgatcccgagaatctaacttgatgaacagtcccttaagcctattcattagtattcacagcagcaggtaccgaagaggtcgttgggggcatctctagctcacttacaatctgggtcaagacacgctttttgttagtcgtcgatttttttcaatgtcttcaacgattctgggttcgacccaaaaacagtctttaacgcaacagcttacttcttcccttttttggaacccaaagggctggataagagatattcaaagtccatatctacaagacaaaaggataaagatcaatacttatgcaatataaatagaaaaaatgtggtgagattctcccacttaagaaaattaccattgtcatcagaggaggatgaaaaactatagtagttactaaacttcgtagaatcggtaatcatgaataggtcaaaggggttaagggaagacatatcccaatttggatgaccagcgctatcaaagttagtaccatactgattggcaatcctgaagtaagaactattacaactcaattggacatgatgctcggggtatcaactatcaaacctatgagcgataagatctacacagttccaaatgtaaaagttgtatcgactatctctaaatttaactacagttgttcgctcggctctaagaacggtcagggaccatccacaaactacagaattattacctcatgaggcatcatctttagcttcctgaggggtcgtgttcttcaaatagtgggtgcgagacacataatctctatcttcctcataagtaggaataggaacttgtcaccaatctgaaaactttagaactttgaagtcattagtagattggtctctactcaggagagcacaagcctttagattgttctcgtgcaataagaaattagctgcttgcaacctaaaagaaaggccaagaaggatcttatgcctttttttgatctcgagagtggggacgggcctcctagtgatcactatcaacacagaaaataaaaaaagtagtaaaataaaacctacatttattgaattaaaactcaaaactaagcttttgagaaaaggcaatacttacgtatgatttgaaatttggtggtgttgatgggaaagagacccgaggtccaaaagaagtcatctttgatctcctttttattgggaagtctcacgataatcttgtgatcgttggtgtatgttcaaaggtaatagaaaccaccttcacctcgcttccttgcaggtcatgcctttacaaagtaaaaacataaaatttctagtggggtcagacactcccacttcaaaatatgatataaagatttcaaacagaccaatatcctttatgaattgggcgccaattggaaagaggcaatgccaagataattgcaaaactgccccaaccctaatatgttataggctccaagcgcctatcctagaaggctcgctggtgctacaaccctcttctcaagttacacgtttagggggataacagctgaactccccctcgacaacatacctaattcaacatccttgctcatttttgatgccgcatgaccttaatacttcctcaacataagatcctatggatctgactttagactccatcagttcaacctcgaaggtgactgtagggtcttgagggatctttgatttgcatgctttctgagccaaaatttcaaaatctaagtcgccttgtgaaattgcaacagtgactagaggtaaaaactttggcctctctaaaggaatattaatcaagtttgaaggttcaagtcaagcagcttctcgcaaatagtgacacctaccatctattatttcttgtaagaattgcctatagcgactagaagtttcatcttgactaaccctaacaatgtaattcctaattttcttgtcgtttaattcaagactggtttgaggtttttgatttttgggcttaaattttatggcagaaagttgaggataaacaaattataagaattctaggattgtggtttttgagcaaaattgagacatgattatttataataatgtctcaatttctagaaaatagaacacaaataaacccaaaattcttcgacttgtataaccttaaattttcttaaccctagatttatgcaaacatccaaaatcaaaatacccaaatgacaaagtaatgcaaataaggaaaacactaactaagaaaaagaaattatgagaatagaatgaaaaatcaatagaaaaagagagtgtgtcacttactgttttgataagaatttctgggcaaagaaaaacttcgcgatggaaacgctgaaggttgaaaagctgggtcttgatgatttctaggattagaaatatgactagacgaaatacgtaagaaaaatataagagataatgagggcatgcaagtttgggaagaaggtggttgagatttttgcaaaaagctcgaaggttgaaagttgaaatggcaaaatagatgttcaattttgaatttatacccaaaagatgctcaccatttgatcaagggagatccaatctaacggatgggaactttatactaatggaatagtcagagcattaaataagaaatgatgtgcctcaaagttttgaatcgccaaaattataagcatgcaatttttaaacaggataaatatggtaattgttatacctaaaattcagctattcactaggagatgacacatgtactaccaaagaaataggaatcagctcaaagaatataataattaaattgcattatta

SEQ ID NO: 71147 - DNA, 707 bp, Cannabis sativa
aaaatatatagtatttattgagcattaaatacagaatgtacagattattaattattaactctgatttaggttagcaaaaatttgagttaatagtttggtgttttcattgagtctttgataattaaaactctaaaaacacatctccctacccaaacacaaattttctattgtggattctacaaactgagacattcatgttgaacaagaagaaactattcatcgtcttggaaaggagcccaagacaacgccataccaaaatttcgaatacaggaaaagaggacatcctgaatgggactttgaaagaaatggaaatgaataaaccattccacaaataaggaatgaggaagcaaataatccaactagtggaattagaaaattgccaactttgacaaagtttggtcgaatcaaattgaaggaatgttaaattggagcgtgaagtcactacaccaagtgtaggtgctaacaacacgcttgtagagaaaattgaacccctaataagacgaccacgaggaaggcctcatggatcaaagaataaaagggcactaaatgtccctatcaaagggaacaatgcaaataattttgcacatccttaagagcaacaacctagaaatacaagggaaggtcccattgacaaagaaattctgaaaaaatctaaattatctaaatctaaggcaaacacaactcgatgttccgaaaccatctcatag

SEQ ID NO: 71148 - DNA, 1571 bp, Cannabis sativa
  modified_base (228)..(229): a, c, t, g, unknown or other
atttatctctatcaagccaagcttaaaggaaatcatcgtttcacttctaaatacctatataagatatagatttcatatctatgatcaacacgtccactcaattgaactaccctggaaaggacataacacttatccaatgtgtaagtaaccttatcgccgattatcatgccagtctaaatctagtgaactgacaaatcgtgggtattaaacttttaaacatataatcannattatattccactgtgctgatgaccactacaaaaatagaggtttataacgaggacaaaagttctcggtacaacttgagatgtccttggtaaaaccttataccaagaacaagtactcggtataatgtcctcgttagaccctcgtcgagtacaagttgagatatatcaaggacaagaaaattgttgtcggtaaagggtataccgagaacatttgttgtaggcagaagtttgggaagttctcggtgctacctttaccatttgaccattctatctaatttttaccgaggaaactcttctcggtagaatgctttaccaagaacacaagcagttttttccttttcttaaaaaaaaataattcttgtacatgtatattatgcaatttttattttgaaattagtactacacaaatacaaatgataaaaataaaattcattaataaacatcaatacgtttgtatttttatatttctaagttcataagtttagttgtagctagatgttaatgtgaaaataaaagagtttaaatagacactaaacataaacatcacttttgactcgctcttcttccatggttcaactccttcaatttttgccattttgctgagttgatctgcaaacgtttctaagttagtatgttgacaaaaaagtcttcccgtttctctcgtatgcttaatcccttgtggcatctctgttttattggaggagccactgccatgtttggaatattcctatgttagtatgttgacaaaaatatcaatacacaagttaaattaatataactaaacacacaatcacctccaacatgtgattttcaagacaaaggatcacatcctccatcaccccataagaacaagcaacaaccgtcatatttcagaaataacagaaatattcataacacaagttaaattaatataacctcatacaatcacctccaacatgcatgcaaatttacttggtgaaagatcaggcattgggaagagcatgtatcgaatgttttaatcaagaaatcatcgtagtaatatgtttttattgcatttaggctgttatagatcgcgtgtcataccaacatcaagatatataaactcatttcaatattcaaatcacagatagttacaaacttatcaaaccaaaaactgaaattataaaatgatttaaccacatctcaatcgtggagttatcaacaaagaccttaacaaacaaatcgtgagtgtaattaactagtatatctaatctaatcacatagcagtacagcagagaaaatccacctacaacacacactttcaaggattgaaagaacagacctgaactataatacccggtaaaaatatacatatattttaaattt

SEQ ID NO: 71149 - DNA, 2149 bp, Cannabis sativa
gactaaaactaaatcagtgacaacgtgtatctaaatactatgttttagtcacaagtaattttttgttgttactaaaagtcaaatttagtcaaaaaaaaaattatttctaaaggttaataagggtaaacggcaagtcaaacctgacttatttttaggcctagtcttggactgaggtgggctagacccgtacttaggatccactcaaacccagggcccaaaatttttatgtagtatatactttcttacatttttgtaaaaagagactcaaaatactcacactttacttaagataaaacacacactcaaaaaaaaaaaaaaaattggacccattattacttagggctgaccctgcttaattctaaaggttcggggtaaggtaccttgtcccttccccaccaatttggttgagtactgaatggaatgagtcaaattaacttgttgtatttatatctcggtacctgaaatgcatggagtgaagataccgtcgccaatcaacatggaagttccaagaaaggtgacaattaataggaagtatttggagatgtcgcttttctctagacgagatttaacccatgttgcaagtttcatgcgtttagtgggcaactcaagcttaaaatttgagatgttggtgtcctcagcttgctcacttggggtcaatccaactttagcatatcgacatattaaagaatacaatgcaaatgtccctcctacatacattacaacaattaatcatacataagatataaaacccaaatgtctatttaaaatagtaacagaaaaagaattaatctccaaattagaagttaaatctaccaatattgaaaacctaattaatttacttttaacacttaaaacaatggaaacactaaagttgtattaattttaaaatattagaatgtcattttaatatgaaaaatgctaaaatacaatactggtataactaaatgcatcacttataaaaagtactggcacccaataacaatgctcttttaatattctcggtaaccctttttccattattttaatacaataactattccatgttgaaaataaaaggaagaccgttcaattttttttattaattattatacaatttaaatattttctattctatttttattcgtgtttttatagttctcattattattgggttttcattcttccaaactaaacatatataccataattatacatatatgcatacccatcaatcatattaaactaattaatttctgattcgtacacattgatatgtaatccaaatatatctaaacatataatatagaaattaataaggtaatattttatacaatgtagttaattagggttagagaaaattaatgaataaaatggagaatatatacatataaattaaatataaataatatatatacataccatcaccattgtcagttgcccttaaaacgatgaagacatacttaaccaaagtgcttaatgtgattgtataaaagataattgaaaaagcacccaaaatatcatcttcatgtttgatcccatttggaaatgtacttgcatacacatacaatggtgatgttccaatatcaccataaacaattccaatgctttgaaatgctaagtgtaatatcgttgaccatttcataacctaattcataatcatatccatcaaacaaaaataaattattatttttatttaatagtaaaatatcgaaataaaaagaagaagagaaaataattttaatgtaccttcgagctgccatggcttccgtgacctaaataggtacgagattcgatatcgaaagagtcgaatctctttatagttttatgtgaagaagattgttcttctgccattgttgtaacatttgctgttgtggaatcttgttcttcttcttcggccattattattactagggatctttttcgattactatactatctttctattttgttgtttttacatttcaaaataacaaacattacgtagttttttcttaaataaattttactaagtctttttatgtactagaatttgtgaataagaaaaaaatgaacaatttggttgttacacgtacgttattttttaaaaaaaaaatctctatacgcgttattactggaccaatattatagcttggcttgtaacaaactttcctataaaaacctatatttatat

SEQ ID NO: 71150 - DNA, 1151 bp, Cannabis sativa
tgaacaagaacctaaatctgtcaaggctgcccttgctaatcctaaatggaaacatgctatggacaatgaagttgatgccctcaagaaaaacaagacttggattcttgtccctccaacatcagaaatgactattgttgacaataaatgggtatatagaattaaacttaatgcagatggtactgttgaaagattgaaagcaagattggttgccaaggggttccaacaaattcctggtgttgatttttttgagacttacagcccggtcattaaaccttgcacaattagaattatttttacattggctgtcacaaatggatgggaaattcaacaaatagatgtcaacaatgccttcttacatggggaattacaagaagatgtatacatgagacaaccacaaggctacattagtcaagaatatcctaatcatgtgtgcaaacttcaaaaagcaatttatgggctaaaacaagccccaagagcttggtttgataagctaaaaacatctcttttacagtggggattcaccagtagcaagtctgatacaagcctatttttgaggaaatttgaaggcaaactcactctcctactcatatatgtcgatgacattctcatcactggtgaagacccaatgcaagttcactccatcatcaccaacctgcaaactcagtatgctttaaaagtccttggtcctgtcagctactttctcgggtttgaagtaactagagatggcccgaacttgcatcttactcagcaaaaatacacaaaagatcttctcaactcgactcaaatgctggattccaagtttcaaacaacaccaatgtgttctaccacaaaattctcacagcattcaggaacaccaatgaccaaccccactcaatatcgaagtgtgcttggtgctctccaatacctcaccatgactagacccgatatagcttttgccgtgaacaaattaagtcagtatcaacaagctcctactacagatcattggagtgcctgcaaaagaattttgaggtacttatcgggtacccttgacactggtttaacatttaaaccatgcaccagattcgacatacaaggttacacagatgctgattgggcagggtgttatgatgaccgcaaatcaacctcaggttactgcatcttctttggtggaa

SEQ ID NO: 71151 - DNA, 2344 bp, Cannabis sativa
tctttcaaaaatttaaataattgtactaaagacacactaagcatatgtttttttttttttttttgatgagtaacagtatccattgaaattaaataaaaaatacaggatacaatcacaaaactagagtagagcttgtccatagagcttcctggtcaaggcctagagctttcttacctagagaatgggccatttcatttgcctctcttggaatgtagctaatgaaagcattaggaaaatatgacaacaagctgttgataggagttacaaaattgttgagatgaatattacgtgtgcttttgctacaaatataattaactaacactttgcaatctgagactatgctatccggagcaagggaatgactatggcaccaagaaagagcatattgcaaggcatgcgcttccataagcaaaggctggtgtaatccggtccaaggcttggccaaagtgaggagtgtctctccttgatttgattgaagagccataccaaagcccattttattggctcgcacatcttgggttgcatctgtagatagccgaagtcaataggaaagagtgtgtggctcattggtagcagtcagcagaggtatgtcttgtgttgaactaagagtagaacaccttgtgttgcaactttggtattgatctaaatagtcctcaacccaatgcagaacctgtgtaaactccgtttctttaaaatttattattcatactctacatttataaattattattcattgctctaaatatattttattaattattttgtattttaataattatttttgtatggatatatatattatatatttgaaatgaataaaatatattaatttttttttaaaaaaagtaggattttggtgatgtattttaaagaagttgatatgtggtgtaatttaaagttatgctgtaaaataaaaaaaaaaaaatagaattttagtgatgtattttaaaaaatagagtagagaagctgttgggaatgctctaaagtgtatttagacacgtgaggaatatttatattttaagcatctctctaataaaattttattagtagaccccttaaatggtcgttcgttctagtagacccatcttttttggcatcaagaatatttttaaataatttgtggcataaatacttaagtttaattacgagttactgataaatacttaagttaaatttttgacggtaataatatgtaaattatatttctgaaacttccgtaagtatctaaccgtcaagtgtcaagtcaatagctacgtgacagcccctgattgattctggtcatcaaactgttatttttatttaacaattaatttaaatatactaataaaaaaaatgacacatggataatgacttcacacttaatgatcaagtacatacgaaagttatagaaatatgatttaggtattattaccgtcaaaaatttaactaaggtatttatccgtaaccgataattaaacttaggtttaaacaattagtctaattttttttatgatcgcgtacgttgtagctctttatgaccacttgtaaattttttagaaaattctaaatagtttacaatgctaaaaataaaatttaaataattacttaccggacgtaaaaaaaataatcatgaaacaaaacaaataacaatgttattaagagtagataataaatctttccattcacaaattaagaagttacataatattttatgtttcacaaattaaagggaaaaatactattacacttccatcaagagaggactctgaattacttgatcaataaccaaattatcagtttcaaccaccacattacttcaaatcttcctctttgtccaatttagaacttctttcatgcctattacttcaaaataaaaggttcagcacactccaaattatgcatagtaaaagtctcaaataaaaggcaattcgactcccgagccactagaccggccccataagaattcttagctttgaaaatagctccatcaatattaatcttgattgcattatcctattttgttttctacaagttataagaataataataaaagaaaagattattgagaaattcaaatctacccaaaaataattgtattatcctattttgttttcagctagttataagaataaatacttattttgctttttgaattttgtcactaataatgttgtgtatccttagtagccatgttttttttgacgtgttactagtcatgttaaatattttcctttttgtttgaatgaaaatattgtaatttattaataagataagtcatttataattaggggtgtgcagaaagtcatccaatccaattccaaccgaccgatccaatcccaaccgatccaatagaatcggatatcca

SEQ ID NO: 71152 - DNA, 2156 bp, Cannabis sativa
atgttccaaatgtcatgttaggccgaccgaccctatatgatttaaaggttgttacatcaatcttccatttgtgtgtaaagttcccaaaaaaaataaggtaggatgtctcaaaggagaccaacaaatttcacgagaaatctacaacattgctctaaccaaggtcaagaaggaaaatacatccaaccagaattcagataaagggaaaagcattgcccaataggaagttgcccaaggcgggaacgaagacatggatcctcgacttagggacacaaacataaaagttgggccaattgaagaacttcaagaagtggaaagcgacccaaaaatcccatctaggatactcaaaattgtaagcgtttgttgctcgaaaaaaaattagctttaataaaatttctaagagtaaaccttgatgttttttcctggtggcatgagaacatggttggtattgattcaactgtaatgtctcacgctctgaacattgacccaaacttttatcccgtccagcaaaaaagaagactactcaataaagaacgggctcaagcactgaaagaagaggtagagagactgcacgagaacaagttcatcattgaagctttctaccgagctttggtagctatccccttactagtacccaagccaaacaaaaaatggcgagtatgtttggatttcaacgactttaacaaggcttctcccaaggactgttttccacttctgagaatggatcagctcatggatgcaacagccggacaagaaatcctcatcttcatcgatgcctattcagggtataatgaaatcaaaatgcctccaccaaaccaagaacatacaagttttcaaacagatatgtgtttgtactgttacattgtaatgtcgtgtggtctgaagaatgctggagctacctacaagagactagtaaacaaaatgttgaaagaccagattggaaaaaatatggaggtatatgtggatgatatgctcatcaagtcaaagaaggctagggggcacatagaagatctagatgaatgcttcaaaatcctcaaaaaatacaacatgaaacttaatttcgtaaagtgtttcttcaaggtcagcttaagtaatttacttggttttattgtaaatgctcggggtatagaggataatccagagaaaatacaagccctcctggatatgaaattaccaacaaagacaaaagaagtccagagcttgactggtcggatagccgcactcagcagattcatttcaaaatcaacagacaagtgtgttcctttcttcaatatcctctgaggttataaaaagttttaatggacagaggaatgcgagaacgctttgcaggaattaaaaagaaaactcgcaaagcttcctatactctcaaaaaccctgaacggagaagaattaggaatatattaggatgtcaccgaatatggtataagcgtcgtgctgataagagagaaaaccacatctagcatccagtctactatattagcaaaagagtcgttgaggctgaaggttgatatcctttaatagaaaacctcacctactgccttatcttagcatcaaggaagttaatgccctatttccaagcttaccctgttcaggtatacaccgagcaaccattgcgccaagtgttagagaagcttgatgcctataggcaagtacataaatcggcaatagagttgggtcagtacgaaatatctttcaacttcgtacaccagtcaaaggacacgtcttggtagactttgtagttgagtgtacaggaaaagaagaaagcaacaaaagggacaaaccaaagccaatgaaagagcccctaccagaaaagagtgaagattgacctacctggaaattgcatgtggaaggatcaactacagaccaactttcttgtgcaggaatcgcccttggcacacctggggggcagcacttgcacagagcaatcaaatttgcagaatatgaaacactcatagctggactagagtttgctcaggaggtacacgtcgaatacattgagatttgtagtgatacacaacttgtaataaatcatgtttcaagagaatacatgacccatggagagaaaattatggcctattttcgtaagatacaagatctactcgcacagctcaagggttacagtcttagacagattccaagtgttggatattattttacca

SEQ ID NO: 71153 - DNA, 1210 bp, Cannabis sativa
actgtacagagtatttttttaaaaaaaaaaattttcgccccaaatataaaagtaaaaaagttagatgtaattatccctaattaaaaagtactacaaaatttaaaaattattatttttatgagtaattactaattattttaaggtgaattcttatatcctattaaagtaaaattattacaaaaatataatgggctagcctattaaatttttatacagctcaaatatattttattactaaaatatttcttgctcacaaaacttagtcgcactaaggatacgaacctatgcaataataattctaattctacaacgacgcaacaactccagcttcaataatactccattaattctagtgatacaacctgaaaaaactaataacccaaattgaaaaatcaaccaaaaggttgagcgtttaattaaaaaaaattgtagaaaaaatagtttgaaacattaaattgaaccatgaagattaattcaaattatgataaattaattattctaaattaaatttagagattgctaagatgtagatctggaaggaggtgatctgaagtttcccgaccaatcaaaataaggcattatataatcgtcatattctaattgtttatgtgaagaaataaaaatatccactagttctagaagttatgagctgtcataatcgaatggtgtggtcccaatgcataacaattcttgttagaatatttcttaatgtaataattattttgtaattgtgtaaaagggtctaggtcattattttatacagaggataaatcaatataaatacaatcatttagccaatgtttttgttgagttgagatttcattcctttcttcttcatttcttttgctctttgtttttctctagttttcaaacttggtatcaaagttattgtcaacactagtggtgtatctatttgagtgaaatggctgaacaaactcctgtgcatggcgaacaaggctcgacatcaagacgcatgcccagtggcatttctcaaatctcaactccagcaacaagtgtcattgaacctcatgtaggtagtactctaatgcaatcctttgctttgaaattggacaggatcaacttacgctatggaaaataatagtttcaacgatagttcgtggtcatcaattggatgggtatcttaatggtgcaagggtgaagccaatcaatttcttgcccttaaatgtatcttcaggtgaagatgcagtgg

SEQ ID NO: 71154 - DNA, 836 bp, Cannabis sativa
attaattttctatatttttaggtgtatttattggccaaagtttggagctaaaatggaaaaaatgtgaagaagtggagccaaatttcaaaattcaaaagtaaaatcagattcggcctcaaacgaagcccactcgcgtgagccacactctcctcatcccagccgtcctcgagcagacctagtgccccagcctggcgtgtgatgaccacctccaaactaagcgcatgacgcgcctcttcctcctgtccagccagctttttttccagcacatgagccccctctgacgcacttgtccccacgctagcctcctcatgcgtgccaagtgtccgcctctcgttttagccgctatttcagaagctctccatgtgcgccacttgtcagcttctccttccagctgccttttccaaatattttgaagctgccaagtgtctcaaatgcataaaatatgagattaaaatgccaattttgaaaatacactaccattttctattctctttcatttatttggctcatttttccatctcacactattttctcagccaataaattgcacattatttattttacctttttacccttcttgtatcccaccaacctcatttatgcaagaaatttctagaaaatattaaaataattattttaattcactcactttggctataaatagagggttttggagaccttttgaaaacaccacacaatcacaccttaaccaagcaaccaacactaaaccacccacaacctacatcctcttccattactcttctttcattttctctctttcttagaatgtattttctttgtaatatttattctaagaaagttatgagcttctaaac

SEQ ID NO: 71155 - DNA, 841 bp, Cannabis sativa
gatcgaggtttctctcttcattgttatatctctctatgaataaaaatcttgcccttgaatagtgaaatgagcccactatttatataggaattaattacaagagattagttccctaaattaataataaataaaataggaaactagtttatttttataattacgataaggtcaagtaggaaacttaagttggttgcctttcttctctaaagataagaatctatcccacgaatgtagaaggaaacttaggctggttgcttttcttctctaaagatatgaatctatcccacgaatgtaggaattatgttgtcaccatcaagcttgagaatataaaagatatttctgaaattgctaactcacatctcttggtcggtgcatgcgagctccctgcttgatggaagctggtctgatgtcaatatatgttttatgcgaacatcctctcttctatttatgaattcaagtatcatatctcattctacagctcatttgaagtaggattgcccgtcaaggtgatgaaatatcatccacgcctcacctaggtgaatgccacatcactatgtaaaaaattggataacatttacccccaagtctgcgcgcaatcttattggtcgcacgtagacatacttagtcacaaagttgatcagataggtgatgcatgtctagctatcatctttgatccgatgcgactaattgtatgcctttttgatgtttgagacatttaatacctatcttgaaagatgtacctcgaatcacgcactaacggttatatggtagaacatgcatgacatttatactgctgtaacgagtgctaacgttccaaattggggggaaactcaaaaaatta

SEQ ID NO: 71156 - DNA, 1812 bp, Cannabis sativa
atgagagaaaataatgtgggaaaatgatgagagaggaagtggtgagagagactgaggagagagagcgaggagagaaaaactaatgtgagaaaatgatgaaaggaaagtgattagagagataataatataagaaagtgatgagaaaaatgatgtgagatagagtggagaaaaaatgttgataaaaagtgaattattttttaaaaagaaaacaatattttgttgttagcaatattcttattttgtgtaactttattttctgaaattgtttttgaaaataaggctaaacatgtctaattattctcaaaaaataattttttatatattttttaaacaatttttaattatgatgcaaaaaatgtattatagttctccagactaccattaattactaacggtggaagaataattgcctaaaaattaaaattaagagatcaacttacgaaaaaaaaaaaaaatagagaccaacttatcataaacatacagtgaagggatgtgccatatataaataatcttattattatcatatcacattacatacctagctttataccatgcaatccgtaacaacgcgtataaatttagagaaatgttagtaaatagccttatttttctctctagtaaaagttaatgtctccttatttttagaataataaagcaaatattcttttttattttttgctaccttaaatacccttgactatacataaggtgttatcatattgtggtacatcagtttatttttcaattatagttggagtatgttatatactgtaatggatgtgtatatatattctattgaatgaatttggttgttcactttttatcaacaagtgttgatatacaataactacaaaactagttattgtatatatatgaatatgaattatatatttcatactaacttagagagagaaaagttatgatatatcaattattgtactaagataaaaaaaaattgatggaatattaatttttagtttgtggtatatacattttaattatagtatatacattttgtgtacaaaaatttaacattcagcaaaataaaataataaaatttagattgtataaaaatataccccaatcctaacctactataccactataaaaaaataatatactagcatagtaaaaaaaaaatagggatttttacattaggtttcatctttagctatttttttttacatttttaataccaatcgattttttaaacatttttacaaaacctttccttccttggatagttttgttgaagctgaagtcctaacccttgccttttcccaatatttatttcagccacgattcatctatcatttttaacctctctctttcctgtctgttatactcacgatcctctatttttgttcaaccgattgtattttccaactgtataaatagccacaatgaggtcatgttcgaactccccttcacctgctaaaaggtttcctaagaaaactaaaaaactcctcagaagagcaacaaagcttaggttcaagctaataccaaaatgaggttgaaaggtattggaaaaaagggaaggtcaattgaatgtgatgtaccagagggctctagttttagaaaaaaaggcatctaccatctaaggtagaggctcgaacgaccaaaatgatcaaatctttgaagaacgtcaagtatgtaagatttcgagtgtttttttttttttcctgctgtgtgtgtgtattttttttctgttgtgtgtgttttagttatttcaatgcccagttaaaaaaagttgttgaccgaggttttcggcaaccaataaaataatagtagattaaagagctgtaagaaatt

SEQ ID NO: 71157 - DNA, 1632 bp, Cannabis sativa
  modified_base (585)..(586): a, c, t, g, unknown or other
ttttaatagtattataaaaatagggctcaaaattgtcgaatacacgacctaaacagataaaatacgattgttgtaatatatgtttgtatgaaatatgtagaatcactactacaaattacactattcacgtcggtcaactctactattcttggcgttgaccgacgtgaatagtgcctagataattgggccgtctgtttttaaataacgctgataatatgtgaattgcgtcgtttctaaaatgatggtaaaataaaaattgacgaataaagtgaacaattgtaaaaatttgctttactacaacaaaaattagaattagtgacatttgattttgtaacatttgtagaaaaatgtcataataatagtaatttagcaacatttcatcaaaaatgccaccttagaaagaataaatgacattttaagttggtaacatttgttttgaagtgccagcaaatatatgttttattgacattttatttaaatgtcattaatttataaataattaatattaatagtatttagaaaatgttagtaaaatatataagtaataacatttgtaaaaatgttaccaaacattaaaattaatgnnattttcaaatgtcagtttttttttaaattttttttaataatataaaataaaaatattgcttttaattaatattactaaataaattaaatttttaagcaattttagggttacagtaattgagaaccaagcgatcccaggcgaacaacaacaacctggctctgcgtgtgatcatcatctcaccctcatccgacctctctgtcagtctctttatgtctctttcacaataaccttcggcgtttctccatcttgacagagtatgtgacataattcatattaatttttaagaaatataaatagaataattttggaagaaattagattgatagaaattataatgttatttcagtgattaaggagcaagattatttgcagatcatgtctcttttcttttacttaatctgtctttccttcccaaattcgcaaatgcagtttgatattttattatagaataaaagggcatcgagatccccacccttcaaaatctcatacccctatagtttcttcctccccaattataaccctattctctgtatcagaacttcaaagaactttgatgcttagaaaatctagaaagtatcgttgattgtaatccatttatttgtattgtataaagttctatgatcagggaatcaacaagatatatagatgctcaccataagcttttaatttttaccatatctagaattgtcaaaagttgttagttagttttcagttagttggttgtttgttgtagctgttatagcagttagagtttgttactgccagctgtaattgttagttgtcctctctttctgttattagcagctatataaagcttgctcttctgtattttcattcgtgagattaatcaaataaagcagctccattttctctctcttttctctcattttctctctatttcctctgtgttttctctgctggttttaccagctaatatgtaatcaaagctgaatctgtggtgattcttcttcttcttcttcttcttttttgttgcttccgcttcttgtttgttaatggcgagaggaggaggagttcgaactcgtgtt

SEQ ID NO: 71158 - DNA, 1017 bp, Cannabis sativa
caagggctagagatctaaacagaatgagtcataatatttcgctgtaatcaatgtaaggttttctaactcttatgtgtttaattttattgttttagagatattcatattaataatattaataaaacatacttattagtaaatctagatcctggtaaaataatcccaacacgtactacaatcaacataactcaggcttattctatatatatatactgctaacgacatcagataacaatcaatcatataacagttaaataatacttaatacccattagtcgagcttgtcttcaccgcaaatgtacatatccaaccagtcttcaggacctttaaaattgtggctgctctactctccgtgacttttctcactcgatttttatgccttgatgtaggaaaaacacgtttggccaagaatttccttcccctcttcttcagctgacctgtgccatctccttgtgtaaaaagatggcacaaatcgactagcttaggaactgacttggaaatggtttcttcgttgtgttatgcttcttgatgtttgaggaacacattttgacaagtttcctatgacacaattaaaagatggcacatgtttgccaagccatgaagaatgagtttctagtgcaatcttaactttatgttcatgtgttagtcttcttagccttaatgagtcaagtccttgctggttttcttctcaaattgaggtctctagaatgaaaactcttgcatgggtccatgaaaccctgagttgggcatccttgagtgtgggtcccggcaccaaatagttggctagtgtttttatgagttttctagatgtgtcatatgaccctctaataggatgtctcaacttcatttgacattcttaagtcttggtcatactcgtaagattgagttttatgatttttcgaaaatcgagtataacaaggtttaactcttgtgttgcacacacgactattttttctatagatgtagtgaataaatatttgcaatttatttttaatattataaactattcagaatttt

SEQ ID NO: 71159 - DNA, 1305 bp, Cannabis sativa
tctagcaagtcattaaattgccacttcattaatttttttagtacccattaatgggtattacccattaagaaattatccatatatatatatatattatctaagggggaattgatgtttgaaacaaatcatagtcaaacaaaagtaatctaaaacctagaaaagagaaagataggaaagttgttacctttgggtggaaggtataatccaaaccagcacgctttaaatttgcatatcatctatctaaaatcctaatggctaaaaaagaaacatgtcaaacagccaaaattgttagcaaataatcattaaaaggaaatatgctttacttattttcaggttttcaaagcaatataacaaagtttaaaaggctaaagtcaagcaggaatatcaaccccaactaggtgtaggccaacagctgatgctgcacatgttctggcgatgcagcctgtgtttccaggaatcaatcaaggacaatacaaatctcacaaccatccttgagaaattgaggttattggcatcctaaaagaaaaagaaaacatagcttttgattttctatatttgattacacaatacttctcattagacaacaaaataaattatacctccaaccaaaggtttgaatgcagatgcaccaaactctgcacacacaccaagcccatatacaacagcctgaaaaagacatcaaacaaattatatgaaaagctctataacgaaaatcaacaatgcagtggtgagaacatcaaacctgtctaacatccgaattttcatcatgatggagtatctgaccacatcaaaatataaccagatacgagttgggtcttatcacctgcgcaccagatacgagcttcaaacgtagttagctaggcaaacagaaaccatgtccatggtgggtcatatatgtaatgcagttctccaccttgttcgaccaagaacttttgacaaccccaattaaacaagtcaactctgctgcaacagaaccttaacccctcgttctagaggtgacctcgacggaccccaggcttcctgctcgtgctactacaaccgttcgaccaaccacgagagatcggtccaacaccattggagatggaaactcctacagcctttcaaaagagaaaaaaagaaaagtcctttcaattagactttagtttaatcattatttaaattataagattttactaacttcacctcagttcacagttcttgatgagattttcgatggtgaaattaatactgcaagaaaagaaaaaaaaaaaatagctccttcaatcctgttgtaatatgtaaagtccttttttggcaagttaggtg

SEQ ID NO: 71160 - DNA, 3255 bp, Cannabis sativa
catgttagtagactttgtaattttgcggcccataatgtggccaagtgggccttttcccatcagaggtttggaactttgtctccgacctcattgcccgacaatcttttctagtaatgaccgacaggtctaactgatttatgctaatatattgcacgcttttcttcaaaaaaaaaaaaaaaaactcgaaacattattgggctcactaactattaaaatattagttttatatatttattttattaacaaaactatgaagaaattctaaaattttgttaagttgagtaataaaaaaggaaaaaatataaaattgttatagaataataattatattattacataattactgttgatgttaaaaattaactcaataataagttgttattaagactactttgaattctttaccgcaagtttgatttattcgaattacatttcattagatttaagcaattttactctcaattctttcagtcgggtttgggttgtcttctctttgaattcaagtagaaatttgagagtgtattctgatagagtttcgcctagtctggtgtgatcaagaatccgtctgctatttgaattaggggatcatctatttattggcaagaaataatgtctacttctttctctctcgtctcctctgatttgtccacgtgtattaaatcttactcgttgctcattgcacttattctttttaagctctgtcttgcatcccctttattcagagctcaaatttttcgtctttgagatccccgctctaattctctttctttgatgaaattatttgtttctcaatataacctgcctaatagaaatattagttgattttacttttttttactttttgcatgcctacaaaaaaaaaaaaaagaaaaaaaaaaagaagtagattttaatttaaaacaattttaattagcccaaggggaaactttggttagaaaaaaacatatggtactcttgaagtttcttattcctcctccgtcagttgcatcctttctatcattagggtttctctaattaaactccttcccaatattgttcaaatattcattggccttgcttctgtctatactcttaaaagtacatcgttccttacttcagaatttttttactacttcaaaagaacatcttgtcctaactgttaacctgtgtgatatattatcagaaaatgccctaattatttccttcaacgacttccttcctcgaacaagagttcagattcctttgtttttgtgattggttgaaaaagatttcctaaggtcctcaatcttgatgtttttcctgccagtaaccatattgttgagtccatcttcgagcctacaagaaattcccttacaattgacaatacctcactttgtaaatttgggatagttcatagtaaaaaggattacacatactccattaatgatatcattacttattgaagaggtctccaaatgcctactacccttttctcttcatatgttgtggaacctttggatctcaaaatcaaagctcatttgttcgaaatggtacattggttgtcaaggaaattcctccttcttagattgcagcactaagagcaaaaattgatgcttatgatcaagagatttctcaaaaatttggtggtgaaagttttagctctacatttgaactacacagggaggaagtctttattttgcgagcagttgatgatctattaattgggtggacccagctcctcatccttcagactctacacccaacctaaggtctacatgtagatgagctctattgctgcttccactgttgtttgctcatattctctttccaaatcccaagcttaaatgtttacccatgttcacgttccttttgaagacaagggttctaagaacaggaaaaggagagttgttgcgtaaggttaagtttctcgagagaacaagggggctaagaattccatcctcagacatgtttgactcagaggtgaaaaaatcattaaactattgatgttgtagatcaaggtcttgctacccttgataatactttctttcctcgatggttgatcacccctttatctgagtttgattttctcttcccgcaccaggtcatcactaatcaaattgtatatattcaaaaatctatccaatcaaaaccaactgaatatatttcgtttattctgagtgtgaaatatagtgtggccaattatgagcttaaaattgttgcaatcgcttctgggttaaagttctctaaatgaaccttcaaaggggagtaagggattctcctcaatttctccctttaatattggatgacagccccacgaccaatttgatccgtaacatttttatctcctcttattcactaacatcttccattttcctaagcaatactaagattgtttgctcctcttatgatgtatccaatcctctttcaattgtaaatctgttaggttctattactgcttatgttgctctgatgcttcaaccttttcctataaaaccttcttaaccaatctcttttggtaatatcatttccctgatccctcaatttctcctcgggtttttgcttctaattcttaattgatgatgacttctgcctcaattttttctctttcattgtcatcggcattgacatgtttattggttctcatctagtctacaaaagttagacccttctatccttctatgcttaaaaaattcaaggcagagaccaagaaactttttgaaattgtagaacgcagtcttcatgatttactcaatgagaacttagcttctggtcaaaagctcttttcacttgttggcagtcctttatcagactttacaacttaacgtgaagctctcaacctaaagatttctcagctcacttataaacttgagttggctgaaaaataacttgctatgtgtttcagagactggtcactaatcttgatctgaaatttcaagagagtaatgagcatttagaggctactgagagaaaattgaaggagaaggatcacactctttatttagcagaagacaagcttcaaaagagtgatcaaaccataaaagagttagataattctttaataaaagagaaatgagaagtaaaaatattttaataaaactctctaatgatcaaagtgctaatatcacaaggacaatcttcttggtgaaactcacaagaaattgttggttgagcagctcttagttttccagtactaggggtcttaataaaaactaaaaaatcagaaccgaccatcaaactataaccagaccgtaaccgaatttttggttccacgtcatcaccgaatttggcggtcagttt

SEQ ID NO: 71161 - DNA, 1417 bp, Cannabis sativa
ataaaaatataatatataatccaatataatataatacaatacaatacaacctaatacggcattccaaacgagccctaaatatataaattaaaaactctagaataaactactaagtttgttgaccattttataaaagaaattgaaataatttctaactccacaaacaaagacttatattctttaataattaaatcaaataaaaaaaatagacttagtaaaacttgcaccactatcaaaacaataggtttccaatgtaacatgataacattcttgttgcttaattataatattgcttaaaacttctctaacactaattgctttagctagttttggccgaacaacactaataaagtatcgtgtgattccttccagcaaaaaattatcgtgtggttttaaattacatatttttttttttattaattttaaaaaacattatatattttttttcctgacttagagtccaaaaataatttttttatagcttactaaatttcaaaccaactctgaccataaccttaaatataaatgtaactaaatcgactgtaacattctttaattagttatgctttttaagaaagataaattagagaacaatttttttttctttcttcaaattcaaatttcagtttggattcttcaaagcaaatatatcaggcacgacttgacaactcttagatttgtcggttatccgttatttacccaatttaattatgaattggttaattaataaatacaacaaaagcatgtaaaaaataataataaattactttagataattttacaaccagttatattaaaatatgcatcaatatagaatgaaaaaatataacatacaaaataaaatgcaaacaaagatgataataaaagttattattatacgaggaaactttaatcggacgagtgagtcataaataagttaactaataaactataaggcaaatggaatcactttactttgcttttgtctcttatattcaataaataaataaataattattggttactgatcttaaaacaattgtttattttctagaaatcaggaagaaagcattattttttaaaaagaaaaaatacttattagctatataatataccttatgaaatacatatatttattttaattattataaaatagtaataatgatcaacatctttccctaatactccgtttagtgtacttatgaaataattcctttatacaatccgaccgggccgggcttactagacataattattggtccctcattaatgtaaataattatttacccttagctaataaaatatacatactttattgtatagatattatttaaaataaaataagcatactattatcttagcttaactacaaaattaagacccttcaatcataaagaaaagaaaaagtcaattatttctttcttttctctctctctct

SEQ ID NO: 71162 - DNA, 862 bp, Cannabis sativa
ttacttttaacctttttctaatgagtaatgatcgaacaagataagctttgtctaacgtcctttgcactcaaaaaaatcacttatataatcgtaaagcaccattacatgatttggctgtgtaaaatttatacttaattatagtataacttataaattaatactcgatatattcaattatattttatttggtacccacttaggataaatggtgtaaactaaattaacaatctggattcaattataattttgttccgttctaacatattgcagcaataaataattaataattgataataatgagtttttattgaatataaaccaacaataaataactttaaattgcatagggtcattaagggcgagaaatattaataaacattattattagtagtagtaagataagataaaagatattgtatatatattagtagtggcacatctgttaaataattttttttgcaagaaaataataaaaaaaaattacatgattttagtataggcaaaagtgaattgagccaattgatggggataataagacaaaagttgcataggaagttgatttaggaggtattttttatttagtattgagggttaatgaattatcactcgaatacaacacttttataatagcattataaaatattgatattcattactttaatatttatatgtatattttttttttttgtaaggattttaatttaatggaacgtaataagagacttaattattttattatagatatttgcggtaaaattctcataatatttataagagtaatttactgcaaaattccctaactatcaatttacttgcaaaaaaccatccaacctcatattttggtgggaaaaccctccaaagt

SEQ ID NO: 71163 - DNA, 1829 bp, Cannabis sativa
taaatgcagaaaatcacaccaaacgctagcaggttttagggatttcgagagagagtggaaagagagtgtctttttttcatatttttttctaattttgtaaaaaaaatgaataaaaggtttgttttatttattattatgagctgaaaaatcacttaaaaatctgactattaacccaatacaaaatccactaaaggacaaaacataaattggctaaaagaccattttgcccctcccactctaagtcataaaatgtcacttaagggtatttttgtcaactctaaattctcgactattctcgacatttccaatgtctaactatactgccccactatactaagagtactaggatgtgattctaataaccaaacaccgcgttccaatgttttcggacacaaaacatgcaaaattatgaaactacgtaaatgacatataaaatacattttgaattcaaataaatcatcataattaaataattcaagaccaataaataagtttcataattaaaccctaattatctactaatttccaaattaaagctaagaggtctttacacatgcttaaaccagctcaaacaactccaaaccaacctcagaaaacataactaaactcaaataattcctacagttacctaactcagaaattgcatgaaattctaacctcaaaaactagaaaattcaaagaaaaagaaggaaaactagcttaccaagagttgttgccttcaatccttatgagttccagcaaaaaaccctctgaattgctaagaaattgtatgaaaaactcaagcttctatgattctaggtgtggccaacccaagagagagagaaaaaaagtttaaaattctaattttttttctaatttccttcctaataaaataatggaaataatttctttttaatcagcttaaataaaataaaaactaaggaatattactaatcaaaaatcttactagagacaaaacaagggtaaattaccaatttaccctctttcttcaccttgaagtaactttgccatttagggatattttggtcaaatctaataatcatgaaaaattctgacataccatatgtctatctataatgcctcgctatttctaaagtactaaaccataataaagtgactctgtaggccatacgttgcattccactgttaccaggcataaaatatgaaaattatgaaatttcacatagaacataattaacaggcctagaattctaatatatctctataattacgcaaataataattaaaagtctaattttgaattaaaccttaattatctattaattcttaaattaaagctaagcggtcattacaattatcccatcgttaaaaggatttagtccttgaaatctaacctgaacaactctaaatattgagctcttataccagactctgattcccaggtggcttcctccaccctactatttctctacagtaccttgaccaaagctgtggtcttgttgtgaaggactttatcttttctatcaaggatctgtactggttgctcctcatatgacaaatctggcttaagctctaggttttctgtcttgttcttccttattccttttagtttgaaaagagagagagaaaagatagtatttatttgcttaactcttttcttccaatgacttaattattaaaacttaatcttatcttaataataataatctaataataaccaataaaagaaaatctataatcaagggcaaaattccataaccgcccctttacttctaatttaagtagtctataggtttaggggtaaaatggtctaaaaccataaccctgcctaaatacaatattccaaatttcacttatatttgtcccac

SEQ ID NO: 71164 - DNA, 716 bp, Cannabis sativa
acaacataccacttacttgtattgtcgaactttaatctaatgtttggaagaataagaaaaacatagaagattttgattttaggaaggagagagtatattggaaccaaattcaattatactattgtttaatttaaacaacacatatttgttttaaggtgtttcctcttatcttttctttttctccgccaagcaaatataatctactaactatttcattctcttccatttgtcctcatccaattgaaattccatcttcttaattctagtgtaaaaaattgcatatataattgtgatgactacagtcactacacagctggtttgcgcactagctacctagaaatggtttgtagtatagatagactaaaaagatatgattttgacttttgcataggctacccaaatgttcttagtaccatatgctttcattcatttgtacagacacagagtagaatattgtttattctaatagatatttatatatacacaagagccacacacacacacaacacaggaaaaagtagattttataaatatgactatatagattgtgtttttttgttcttttagaaaaatgcatgtataaatagaagatagaatgtttatgatacaattaccaaaggtatcgaattgcactcttcgagtcagtgccaaactccaataggaataattctaattttctcttatttcattcattgatccccatttgtgtaatagta

SEQ ID NO: 71165 - DNA, 1325 bp, Cannabis sativa
tctagaagggaagcaaagcccctttaacaaatcagccataaattcccagtttacagtatcataagccttgctgagatctatcttcataagacaccgagccgagatattcttcctggtatagcttttaagcaagtcttggaataattttgtggccttttgtttttataaaatatgataaatatataattttatgcaccataattttatttattacctactgttactttatgcacttaacaatttaatagttcttctaattttttatgattcatttgttcaaaaaaaaaaatacttcattattcatataataactaatatatactgaaaaatataatagtcaagttgttaaattgattgtaatttgttcgttttggttttaatttctttcttgataaaaaatagctaaaattataatctttacatccttgaacttttttttatcatttcttaatttggtatagaaaaaaaaatatataattatagcaagaaaactgaaaatataaaatattttttaaaaaatatgaaattcaattcttgaaagattactaaaataaaatttatgattgttttataaaataatataaaatagataagaaaaaaaaaagaagaagaagatgaagagagaaagagaaactgaatgagaatttctcagttgtttatttcaatgcgatgaatctctatttatacaaaaatatgactaaaagaatggaaaactaaatcaatgtaagaaaggaaaatacagcaaagcattaatggtgatgattaatttagtaatttggacatccgtaaataatatttcataacactctccattggatgtccataaagactgtctcattaaaaacttgatcaaaagaaaaggagtgcactgtaaactaactccccctcatttacgcattcgtggagatcttttaatccatgaattcgaatcttgtatgtcgtcttctcaaacgttgatgttggtaatgactatgtgaataagtttgcaagattgacacttgattgaatttgttgaacatctatatagtcattctccttaagatcacgagttaagaagaatttggtaaaaatgcctttagctctatcttcttcattatagctttagttgagcaatacatttcgcgttatctttgtagagaactacttgtgttgatccttctttattgagtgtaatccttatgttttcccgaatatgttatgttaacatgatttaaagttgactcgttataaacctttgttaggaaaaccactgggacaaaacctgagctaagagaaaaaaaaattgcaacatgaatatgtctcccccctcatgcacatatgatcca

SEQ ID NO: 71166 - DNA, 911 bp, Cannabis sativa
tagttggtgatggctctacaacaagtgcacacgcacatatttatatatgggattcattcactttcttcaaaaacattatttgtactgctgatgtgatagtgtaataaatgatagagtagtaatttcacatcttttaaaagaggaaattaattatgagctggcataagtgacggtagaagaaaaaattagttatttttcattatattactgcttaaaaaaataactaagaaactatttcataataatcttttcagaaaaaaaaaaaaagaaaaaaaaaacaattttcattaaaattgattccaatcgtttctttttcttttttctagtctaaaatagaaggtgtaggttttatagtataaaacttttttttgttgagcaagttcgaaattggtggtattattacatgttatgttgacctatcttttttttttaaaagtcaagaaaactcaaaatattattcaatctagttttagattcttattatttgttttttatttattgtgtttaaattttttatttactcttataaatatgtttttattctttttttctttttgagagtacataaattttcaactaccatatttatatgtaatgctaatttaactgtcaatttaaacggaaagactatttatattttaggaagtatttttaactaggcttatatattaatgcttgcttatagaataagaagtacaataatataatatgataaataaagggagtaaaaaaattaattattctatattttatatgtttataggaagaaaacctatatcgatttacgcgtggtggccactggcctacgatttggcatcccgagtaaaacaatgaattcaaacaatcatgatatatataccatgggattcggaagccatcaaataaattatcatatgagagcattattggag

SEQ ID NO: 71167 - DNA, 887 bp, Cannabis sativa
tgtgaaaagggcaaaatggttattttgctaagttaggttttgtctttttgtggattttagttaaaacctattaatatgatttttttagttattttggctagaattaatttgataaaaccatttcatttcattccttttacaaaaatagaaaaaaaagatcaaaatcacatatctctctctttcaacctctctctctccttcgaacccccctagactagctagggttcttgattttcttcttcaattccgtgatttccagcagctctaagtgtttcccaacccaaggtaaagtctctagcaaccttctctctagtttcttgatttttaagaaaatgaatttttgcatgaagtgatgttttagttgctgttcttactgttgttgtttgttcttgttttcaaaggttagtatatgtttagatagctttatttgagcatcttttagtggctgttaataggtttaatcaagtgagttttagaactcaaacttggagcttaaatggtgattttagattttgagctagggtaattgttttgttgcttggaaaatgttcattggggtatattatgtaggtatggaaagtttggttgagcttgtaatcgatttggtgaagcattgaatttttttgggttttttggggaaaaccgggtaaccggtttttgcagctaggattcctgaaaaatttaacttgttgattcgcgttagttttaggtgtttagttggttaactccctgctagtttagggtatttccatattaagttgcagtaattagggttttggtttaaacctaagtcccagttgtgatttagcgtgtcacttattcgtgttgttatcgatgtgatttaggagcccataattcggaattgaggtaagattactatacatgtt

SEQ ID NO: 71168 - DNA, 1259 bp, Cannabis sativa
gggcgctcggtgataatcacggggttcctagagatatggttccagttctttgtcattttttctataaaattctttcggttgaaagacttgaccgtgtgcactctagcaactagaaagagtgggggttgttgtatctcggtttcaggggtgtttgcaggagtgagttcatgaagtgtttgaaccgtacattcggtttctgtgaggttgagagcaacagaaagagagtttgttagatcctccatagagcaaaaaactgaagagcaataagtatcacaactcaagtaagaaccaggccgtgttttagtgagggggagagactgagtgggaatttgagaatacaagaattttgaatgggttataaaaagaagatgattaggagggtgattgatagcaaggttgaacagggaagtggatattatgtaaaagagaaccacggcagcaagagataaccccagagtaacccaaagagcaattccaaaagtaacacaaccaatcgaaaccaaactgacccaaaaacaaaacttacgagatattgacgtatgataggaaaatatgagtacaggagaacaagaggcagacggttgaaagctgaaactagaatgcacaggaacacatatgggtgaggacgcttgagtaaagctgtgaatggtgaagatggacgtgatagaaagggataaacaggtatttatatggcaaaaactaaatgacagaatgatatccagaaagaggaaagtatgtatagctaagtcacacggagcaaagcttctcctagtcttatctataaatagataaattctcacggtatatgggtaaagcagagcagtatcagtcgtatcaaaggcatttaatactaggaagttttgctgcacaaaggatttgaaataggcagtagacagaacacacatacagaacaaattaaatgtgggtttcgaatacagtctagcaaagggaattaaatcccttctgtcgacatacttaggagggttcccattacccccagatcttagcagagtacaatttccagagtgtaatttaataggcagaccaaaaatgtatttgaattgttcaataaaaaaccagttcttctggaacgattttgacaatgaatagggagatttgtaagagaaagtcagtacttgtaagagccgcattaaactcggtacggttcgacgggtttgggagaaggccggagtaaatggtgatgcgacgggggtggttgggcatctgctgagggagacggccgactcggcttgggcggg

SEQ ID NO: 71169 - DNA, 1479 bp, Cannabis sativa
ttaactaagcgggctttacaagtcataaggtgaggatggcgtatgtggggacgaagtgttgtgtgtgtgtttggaatatagaatggattggaggtgataaaaactttagctctaaagtgtgatcatagcggagcatggggggaacagaagacgaatcacatttggccaaaaaatcagcacaatgattcataatatggctcagtcgtctgcaataatggcaaaaatcaggaaaaatttcatatcaaaactcaagccaaataggggtagccgtattggtgaagtggaaaccggttccacgaggaaggggttgagtgacatagattcttattcgcacccgaagataagggccccatgtttctttaagagaggcagtgtccacttcgataaagcgaccgagaatctcactaagctttcacgctaaagcccatgaccgatgaagaaaagggatttcaaagacttgaatccaaaagggtgttgagctgagcatgtcgacaatgattgttgatccgattttaaggggtgtcataacaatgagtttgtagtcgaaatgccaaggctggctaataagaacacgcctataaccaccaaagcaactgaattctatagtgaagaaatttggttccttcaccagaacattaatggagggccacatttggtgaatgcattttttgaaagcatcttcattgaagtgacgattggcgagaagcttgattgcaaggaaagcagagggttcttcccctgcgtcttcttcaggctcttcaggtaattcagagagagaatggatcttagtttcagtgtcagtgagatttagagtggtgttgagagttagagagaggtcttccatggaaaattcagtcaaagaaggaaagaaaaactaagaaaaaggtgtatgatagttggggaaatgaggtattcgggttacagtgcagtgaggtacgatattggatgggcaagaagaaactgaataggatgaatatttacataatggtgttatatttatagtggagagtgtatcggttataatgaaggcacggatagtgcttcgagaatttggtggggatctatgacaaaaggaattattcaagcgccactgagaaaatattatcacaatatggaagaaattgaatgaaagtctctgcaaactaggggaagtagagctcgatggtgaatttctgtcagtgccccctaaaaatttccaaaggacgcctggaggggagggaggctttaatgaccgtagagcaatgatgagtaaccaggggattcagagatgtgatggtaaataaattctatttttggaaagaaggtgtcgagatgaaagggggaaattcggttagggttaaatttaggttgaaaacagatttggacaataacattaatggcagaagagacattgtgaaaagagttatggtggaagtgatgcatacctataagaatatttttatttaaagaaatatatttctatttaaagaaataaatttc

SEQ ID NO: 71170 - DNA, 1021 bp, Cannabis sativa
caaagctttgccggcgcagttaggttacttttgccggcgcaacaatgcgccggcaaaagatgattttcttgtagtgtatggacaggccccactacaagaaaaaaggtctgtaggcactacaaaaaccgtgcctcaaagctccatttatcgtgccaatcaatttttggacacgacatgtcgtgcctattctgtcgtgcctaaaaatttgagcctaaagagtatctaaaggcacgacatttaaatgtcgggccaaatagtaattttattaaaaaaaataataatacatattttgtattaaaaacagatatataatatttatatatataatattacgattaaacttataaataaaaattgtataaatagaattatataacctaataaattatttatatgaatctgaacaatacaataaatctgaacaattgatattattattttatttattcaacaacttatacaataaatattcaaagtgtaccaaaataaatttatatacaaatatctactaaaaagattaaaaatatcattacaaaaaattaaaaaaaaaatgagtatttgaaaatactttcaacctcaaaaacaagaaaacaaaagagaaaggccaagaatcagtggctcctgcccattaatgcttgcttggttaaagttagtgaagaagaaaagtaaatatagagagaagatttgagacttgggagctgtgtattgattaagtattcagcattaggatgttgggcaccacttattgtggtgccaaactttgcagtgcctataactctttattcttgtagtgccccaatctgcattagtaaaggcatggagttggaggagatctggtgttgcagcatggtagaataatccttgccctagagagtttttgaggtagttgacaactctgaatgcagcttgtaaatgaggttgtcaaagtgcttgaagatattggcttaatttgttgacatcataaatgatgttaggccgagtaattgtggtatatgagcttgcctataagacttctgtattg

SEQ ID NO: 71171 - DNA, 715 bp, Cannabis sativa
gagctctaccttaactagtaagcttttttcaggattatacatatatgatgattcataaattttatgatacataatttttcttttccactgctacgtactaattaatcaaaatattgatattttaattgatgtttttattgtattaactttttttttttctttttacagtattcatgaaatgacaatatatggtgcatatttttggaataataaaaaagaacagattatagcttcaaccaactaaagttgcaaggaagcacatttagtatttgtttaaataatgtatttgatgaaataataagaatatgcttaaatttatgtattgtacttgtgttgtaagcataattttttttttatttgaattgtaaacataaattttattcaaatgtaaatacattattattcttcttctacctcttcttcttattcttcttcttcttattattattattattaattctaaattacatagatacattcaaacaatgaatttatttaaaaaataatgattgatcaacattgataattaaaaaaaatataaagagacataactatatatataaaattaataattttataatagttatttataaacttgaattcgtgacactttttatgacaaatattactatatgtatttttcagttagtaacatatgacaacacttttataattagtgtggtcttttgttaatacttttggtaacactctagga

SEQ ID NO: 71172 - DNA, 2022 bp, Cannabis sativa
attaaaattgcataattcacatataattcaaataatattcctagagtttaataaaatctccagaattgagaaattataactctaatgcccatttctagcaaagggatccacaaaaaatttaaattcacaaataattatgtaaaaatatcaataattagtgctaattctctttactaatctatattaataaatgcagtcattacaagtattcacgatgatgctctagccatccaactacaaattgaagactatcttctaaacagaatcttagtagatgggggagtagcactgaaatattattttatgaggcaatgctcaacatggggcttgacgagaattgaataagagcttcaactatgtgagtactttcctttgataataaccaagtttacccaatgggagtagtcaaacttgataatacaactattgggagaactttgaaagtggatttcattgtgatcaaagtcgtgtgaagctataatacaatcatgggaagatgatggttacacatgatgcatggtgtagcatccaccctacacataatcctgagatgtccatccgctaatagagcacatatcattgacatcaaaagccagatacaaagtgttgaactctaacgaggaaagttaatttgttatttaggaaatcaaacccgaagaagaaaaataacaatcaaaagctccttaccaattgttatacccaaaattcggctatactccaaaaactaacacgtgtcctataaaaggaatatgaatcaactacgatgatagaataacgtgatatcattaatggcaaattaaataacttgttacaattaaataaaagtttgatagataattcaaactcgttgactgtgtagtcttaagcgagacaaggataataactattaaactgatattgacgagacatatgtctacctcgaaatatacacaagtaaatagataagaagaggatattcatccactcgagtagaataaatgtaataacacagaatagcctcgcattaaacatagcgagacgatcacctcgcaatactgattcaaatgaagggatgcaacgagatgaactacctcctaacacttagtatttttttcttatcaagatggacaagaaggataacttatgccagacgagacacaactttcctagttagcataaccgtctaatggataaaaataaaaagcggttgggtagttattagattttatcccatgtgtgaaaccataaaaaaatatttgtaccaacttatgtcactcctctaccttttctaagtagattataaaaattcaagaaagaggagcccatcaaggagattcctaaaactcttccaaaagttgaggtaaaaattccatgtcttgaggttatcgaagaagagcctcattgtgctaacattcttaaggagttgtgtgcaaaggagaaaaaattgaatgttggtgagaaagtgagtgtgggggagaatgtttctattgttcttcaaagaaagttgttgcctaagacaagtacaattcaatgcactattagtattgcatgatagatttaagagtaattataaatatgacgtcttatttcaattttaattctttaaatcttaatccattaagagaaactaatatttttattcaattaaataatcagactaattgttatccctcaaggatagttgaagatatttttgtgtaggctaatagacttgtcaatccaagtgattcttacataattgagatgggagatgagggtggtcccaatcctacatcagctctatttgagagacccttcttactcactgcaactaagaagttgaatacgaaagcatggatactcataatggaatttaatggtgaaacactcaaatttaatgtgttagattcagttgataggtacataaagaatgagtctttgtttgaagacccgacttgaagaccacatgagcacaacaagtagtcgagctaacgacgctaaacaaagcaaacttacgggagtttttcttaccattttctttttattttacattgattttatttg

SEQ ID NO: 71173 - DNA, 1287 bp, Cannabis sativa
aaagacatcttccaattctcatccttacacatttcatcctggctttgggtaattgcaccggctgaagaaccaggcctgcaacatatccttcccaaatgaacatcttcctggtgttacgacaattcatgaccgagtaacaatttttagttacaagcacaaaatacacactcaaaagtgaaaccagcaagagagtgacactgggatggggggatttacttacacgagtgttatcatagtcgtatcgaaccacaaaaacacactgacagctactttgatcatgttgtttcctatggatttcgacaacacgagcatcatggtagactgcatgaaagtctctttcctgtaataagccattaaataaaatattaggaagagtttggggcaagttaagactatggttggtgaattacaatcttgtaaatttctctaaagcacttaaattgtcattgtcatgcattcattggacaaaatctgaaagctaaaaaggtattacctggaagcagaggacaagatccccgaccttaaccttgtgacactcggaaggttccaaaggaatagatcgttcccgcactcttgttctcacgttcacccactcatcatcctccttctgataaccagaaaacctcactcgaacttcctgtgatacattttacataaaaacccttttgtcagtgttaataagtattcttcagtacattccaaaatactataacattgtagacatgaagttcatttgtggagccttctagcgtaaaactagtaattccaaataagcacagaaatgaaccctttatgcactcaattctatactggcagtgaaaataaacacacatatatataactaaaaaacaatgtctttttttcgccttatctatacagttaattgttttcccttaattaactaaaaagttgtcaaatcttcaaaattttcttccctagcttaagtaacaaaatcaaaaaataaattttggtaactgctgtcgtgcattgtcaatcctatcctaccaaatctaaatgcgggtttgggaagaagatatttgagctgatcaatgctataatgggatgaaaataaacagacatacatatatgcaatcaaaacaatgcctttcttttcttaattagtaaaacaaatagtcaaatctgcaacattttcttcactagcttatgtaacaaaattggaaagaaactttggtaacggccgtcatctattgtacatcctaccaaatctaaatgcgggttttgggagaagagagttgagcttaatgctagatagtaatagcttgaaat

SEQ ID NO: 71174 - DNA, 3275 bp, Cannabis sativa
  modified_base (2646)..(2664): a, c, t, g, unknown or other
agatcaaggttaatgttgatggcaccttatttgagcacgaaggcaggtttgggtggggttgtgtggctcgcgactgccatggcaatgtcgtggaggctttcaattggggtcattttaggagggttcaacctgaagttgtagatatggttggcatcaaagaagctttaagttggattgatcgacacaattggggacaagtgattttggaatcagacaacttggtatgcgtacaagctattcaaagtaaaatctttatgtcatcttcttttggtcttttagtgcatgatgttcgggcattgcttttatctttagaaaatattgatttgtattttgtcaaacaatctgcaaacaagctagctcactgcttagccagagactcttgtttctctccaagtcgtgtgtttcagttggaggattgttcttctgaaacacgttctattgttattaacgatttgattagttaataaagataccaattttattcaaaaaaaaatgcccaattttatatattaagtgggttaaaatttatttcaatccaccaaaattaatatattggacgagttaaaattgtaaaattatttataatttttaacccaattaaattaatttataattttaaaaattatatattacataaattatgttcaataactaaattatttttttatttaaaatttagactttgtgatattttatttgacatttagattttataatttttgatattaataaaatttaaaattaaaacttacaatttatgtcaagtaagagaaatggagaatggagagaatggagagttgatgaacgatgtagaaaaggagagagggagagtgaagtagcattccttttaagttgtttggtcgaaaggatagaatggtggaaggatagagagtatttatttttgaaattatcttattatccttatagataatatttttaataatatatttagatggtacaattgtaatttccaacaattaaagagtgagagtggatccttccattaatggaaggattataaattggaatttagaaaaaattgctctccatccaactatcccttccctcctctaatctcccatgccaaacaaaaagaattgttataaaatacttaattaaattcaatccgcaaagtgcagatatttgcacttatgcagatcggattggattgaaaaatccaaaatctgtatttgtgcggattgaatgttaattgacatgtaagagttgacatgtaagagtagctgatccaatccaattcatatatattaatatatatatttaaaaaaaattataaatacaattaatattctaatgtaaaaaaaatagtaatataaaatctaatacatatgatataaatatattttaaaacttaatagatgaaatgtatatttcaatcttatatataaataaaatataatttaaaataaaattaaatatttcttcctacatacaattttttttctttctttaaatttattattttatttattttaatatgttattggagacataaaataacaatattttattttattttcttgttagttgtgaaaaaaaaaattaataaatattagataatatttaaaagcaaccaatactgatgcaatcctcacttttgcaaattggattagatttgagctatggcacggattggattgaatctaaaatataaaattcgcacttagtgcatatcgaatgcactatgagtaaaatagtacggattggattagatgaacactccaattatctcctctcatctctctccttccacccacctctccctcctattagacaaaatgtttaattaatactttaatattagtctgattaatgttctaatttttaagtttttaaaaattattatttcagacaataatacttttaagcttaaaatataaataatatgcatttattaattttaaatctatatttaatttggacactaaaaactaataataatcaactcataatcattttataatcatttagataggttgaccagagtagatcgataaaattattagattggttacattttttctattcttaactaagtacgttacaattagatttttacaactcaattatattaatccacaaatttacaaaagttgtcaagtagtttataacttactaggcaacataaccgcacttagcacagtcattattctaattaataaaatttatttgggttaatttatgttttttttttaattattataatttatggtcactacattaagttatccataaatatctctttattgtattataaaaaatgtattaacttttgtgttaattatatagtaacgaacaatggttagtttagcaggatttaacaattttattaataattttaaatttcattttttatcataaatttattatgtgaaaatacaaaaaaaaaatgatctcctaagtacaaaaatattttatttattccctaatttcgactatttaaaaaacttagactaaatagacaaataaatttgtaaaaatagtgatattatattttttaaaattcaaataatgaagaaaaaaaacaacaaagattggaacataaaaaaaattaaagaatgctcaaatatagtatgacatatgataacctgtaagcctatactttctgttgactggatttttagccannnnnnnnnnnnnnnnnnnaaatgagatttaaaccaaaatcgtaacaataaatgtaattaatgataccagaaattgtaataaatgtaaagaaaaacatcataatttaaagaggttcgaccctaaatgtcggtaatagcctattccccttatatttttattgatcaaggatgcaaaagtcaagaacaagctcttgatttcaaagaataaaaaagtgtttgttttttactaagtgctcaaaattgcggatcccctttccatgtcatggatgaccattcatacaggggaagggtcggtgcttctcgcttcaagagacgcgaccaacgtggagctatctcaaccgttttccttgatttttggaggtggttgaagtctgatttttatgataatatctcgccattttggtagatttataactatctttgagcttcttgtgagatttaaatatttgaaatagtcactgacgatgagggtctcctaagggcgtgacacggttgttgaccaccttcggggatgaaagccaatacttgggggcgacaccctcgagacccaacttgaggagagtgacaatcgtcatctcggggtgaccccccgagaccccttgtacgttgttagtagtcatagtgttatgt

SEQ ID NO: 71175 - DNA, 1663 bp, Cannabis sativa
ttgattggatctttgctataagtctaaagtttacatgtgcctcatcgatgtatatatataaattctttcaaaagaaaaaagttggtgtacatatatacaaaaatcaatacttggtgggttaactattatcaatttgtgatctatactttattatatttcttttaaatgtgattacttattatttgatctcatctctcatttttcctttgatagtacgtaatttcattcttatttcaatgtcaaatcaaatttagatttttttgataatctaaaagaatcaatgagtttaattaaatatataatataatattagatcaaactcatcgatatcctttccatatacaatcggtaattaaccaattactcattaagctttattattattggaaatataatttatttacaaatataaatttttttggttgaaaacgagttgtgattattagttaatgaacaaaaagtagttgctatgtgtactttataaatccactattacaggataatattaattaattacattgtggctgtgagctttaaaaataaaagtctttggttgaaaagattatatattcagaattaagtatcaatcatttgagctggcatatttatcaggtgaggtagtaaaaaggaacacctaaaatttcaaatattaataaaacaatagatgctcaattgattcttgagcaacaataagatactaaaagtatatattctctctacattattaaaaatatgaaactaaaattttatatatattttttaaaattattaaaaatatttatattaaatttttacaaacataatatctgtattaaattaaataattagctagtttaaactctttacaaaaaaaataataattaatttaaattgttatttaatataaataatattttattatttaaatatttttattatatgaaactatgataaattattttattacgaatttaattataagtatcatatatatacacattgttatattattttttatttaataaatatataataaaaattaaaaagtgatacgtcatatattaatataagattaatatatattatgagttggagattatattatataatattatggtataataatacacataaaattaagttgtgatatatgaagagttacaaatttaaaaataaattataatataagaatcacatttgatatgtaattaagtaagttattacatatgaaaattatggaatcaatggaataagttttttgttgttaaacattacattaatactcatttatatcatttaaataagtgtaagaatgatggggaaagatttagctcggagagaagttacaaaaacttaaatttgggtttttttggaaacgactgctttatagttgatgacatgttgatttatggttatttttcgatcacctggaactagttttgaaaatatccataaacgtacataaattttttgagcacatttctaactcttttatccaatatttttatcccattaaacaccaagtaagtaatgacaacaacatatggtgaaaaaaatttgattttcaaatgtgatcctcaaacacgattgtttaccaagtttttttagaaaccagttataatttaaatagagcttaagaaataattacgtggttagggcgttaataagctttagtctacgagtc

SEQ ID NO: 71176 - DNA, 1839 bp, Cannabis sativa
ggatctggataggcctaaaaacatgtgatccaatgaacacccctatgttcacatgatatattataaatcctttagcttctatatagatatatatatttacaagatgaccatggccactactaataaattggaacatatatacattttatttttttaagggtaaccattgtaggttagagaaaatgatcctaaaaagtaaaggtgaagagttttcttccatccaaaagaacttcttctctatccaaaaattatgctaaaccaatccatctactgcaatattaatgttgcgacttacataagaaagatatgccctcagaaagctagacaacaaaactttaatatcagaaaaaaaatccattctgccccaccaacatatctactgttgagaattactcaaacttgatcaaagctcacaacactgattcaaaataaagaagtataaacaatttaaaatagagaaaaagaaaagtgtttcattattgaaagtgtgtcaaaatctgtacaagagttggttctatgtctttacaagattaatatttatagctataggccagaaccgatttttttaggtattggaaagttagttaacaattttaactaactcaactaacattaatagcttagactactaactcataacaattacttagcttaggtacagtaatagaaaaataaggaagagggagaaaggattaagggtcactcctttctacaaattctccacctcgaaccttaatcattgtacctttgatattcatgagccacgagtagttgaagagtagtcgtgattttctactaagagaagcttgagacagtggtagaacttgattgattgtagggtgttgtaagcatgtcaaatcggttatttgttgttgtaactctttctagctttactttaccatctgatatacatctcttataaagtgtaacctaacatcaatatgttttattttcccatggaacacttggtgtttgcttaggtgcaatgcactttggttgtcactaaacatagtgatagaactcaggtttatactctcctgttaaaccttttagccaaagtgcttctttgatggcttttgtaaaagtcatatattcagcctcagtggtggacaaaaccattgttgactgaagttttgctttccaacttatagtgcatgcaatctttgatttggaatagagaacctacttagacattagtatccaaatctcctacatagtccgagtgtacataccctaatacttctggttttttagtgttggcagaattagttcatacttccagaaatgcctaacatatatttgttggtatcttagtgcaactctacgtacaacttaccaataagctgatatgttaatttgatggcaactaaaacatgtacgctaaacatgtgaatatgtgcatgtgttatactaattttacctcaactccgcaatcaggtgtggcagccaacctgagtagaaatttttgctcgacgattagtggccctaagtcacaatcacataaaattggtaagtgtctcggtaaaacacttttggggacttaaactcaaaactagaactttcctatcgataaatagtgtggaaaactataaatatcaagaaaacatgaaattttgggtaataaaaaatcaccccaaccggttacttggatccccaaacggttcaccatttcttggggtcctgcctcaagaatcagtttagtgtttttacagaaatggtggaccgtttcatagaagaaaacaccaacttcaagttttcttctttaattctacctcaaactttaccaaactttctagaatacctaattaaggcataaaaaacataattcgaccaaacatc

SEQ ID NO: 71177 - DNA, 1126 bp, Cannabis sativa
tccttgtattgtatgtgcttacattatgagacatatttatgctattttctacttaccatcacaatgattatgatatggtagtctctttagtctcattctaatccctattactatgctatagctaaataatagtaaatgactgtggagaatattgaagaataatagatctctcccaacaggcccccttcacaattgtaaccagcttgaaattaaataagaacatgagcaattctaatactattatgatctgatttttttttattattattattaaatagtaaagttgagatggaaatagaaatatgatgacgataaataacagagggatattataatttaaaaaaaaataatggagaaagagcaatttgggcttgttagatatttttaggacaaggttatgtaaatgccatgtaaatttgaaaggatatcatcaaatgacagtggtgggcctaatactacagtaccctgcaagggtagttgagatacctcaccgtggcctctaattaaagattgaataaacaataacgatataatttccgtcctcttattaacagagagaattccatagaggggatttgcatcagtttttaacccaagttgtatctattaatgtgacgtttggtttgaatgaaggataatagaaattgaattgaattaaatttaaaatatataaaataaattgataaaaaaatttaataatttttttctatcttatattgaaatggtcattctatctattttaaagttgaatagttattctaccaaaataatagaaaagtcatcccattaaaatgatagtctaatattttaaaatgtaatcaaacaaaagaatagaagaaaaattatttcatttttattccgttctattttattacctccaactaaacgctacttaagtgtacttctataaaatcgatattgaattgattgacacatttgagcttatagcttatatagtgatgcttctaattattagcttgaacatgtaattactaatgctagatttaataaaaaatagacaatttattttgtttaatttattaaacgactttttttaggttgtctcgttctatacgcaactaacacaaacattggggttcatgtagttcgtaactaaggtacgttt

SEQ ID NO: 71178 - DNA, 1973 bp, Cannabis sativa
aataacaatgctagagttaaatggtaatagctaagataagatacaagttaaaaataaataaaaaattaaggccaaaatcaaaatagtacaaagatatatataaactaataaaaattcaaaatgcaatgatgatgaaaatccgagctgaattgatgatgtataaacaaagagattcaagtgcaccactaagcattaagcattgaatctcactagggttttggtcctaggaggaaggtgtagttgtgttgcactagtgttagaggttgttagtagatgtgtctagtaccatctcgagatggtgttttacgattgattaataatattcatttaaggtattgagcattgttataaggtatcaacagtgtctagtaccatctctaggtgatgctttacgattgattaataatattttataaaatttatgatattaaactatatgcgactcgatatttaattatagtaatagcgatatgacacgttaaagggtgctaggtaccaataccacttgtatcttttagtatttctcttttaatataataattattacgaaaaattattaactacttaagacattacctcgcagtagtgttgaacatgacagtacctaataacaatagagctctcttagacaagagcattgttattagataaaagtgatatctaacactattcttaaggccgacccaaatgatttaggggcttttggcgaaaaattaaaattaggttttttatttttttaaaacggtattactgaatatttcataagttcgttttttttttaaaaaaaaaatattcataaattctagaaaaggcaaaatttttaaaatcatgtgtattaggatcacaaatttttattaatttatttttgtaagtgtatatttgttgttatgaatatttattatgtatacattataaaaaaaatatctattatatatattatatatatataaagagataacaaaaacaagaaaatttttagtataagagatcttgtatagtagtccaaactgcctaatacttgagccaactatgaatgatattgtgattggttaataatttttttaataattaatattaaattatataaagcccaatacttaaaccatctcatttaatatttctctttacataataaataatctaatatatatataaattggataaatataattttagaacttgtttttataaaagttactaattgaactatctattttgttaaatgataaatcaattagtgtattttctaaaatgataaaaaataataccctgaactgattttttgtcaaaataaaaattcataataatctcatctagaggtgctataataagattgtttacatttttaagtttgttatgttaaaaataaattgttaaaattttaccattttataaaatacaaagtttactttatcatttaataaaacagaaaatctgaatcatcagtaacttttgcaaaaacatatactattttgtattaaccttctaaaagcactaagatgaggtagaagaggagggtgtggtggacaaattgacggccttatcataattgacattggctttttgaagacacactacaaaaggggattttggagcaccattctatgcttcccaacatcaatccaaaccaaaatataatcacattttgtctccttttgttttttcttttttgttggtatttttctaaattattattaaaaaatataataataataataaattgttattacctaactcatattattgaaactactactaatactaattaatttataataatagagtaggcaacaccacgcctttgctttcctttttgcttggcacaagttataataaatgtgtccccaaaccccattatcaatatcatcaataatatcagaacattgctataaagcaccagtggtgcctaacaccttctcgacatgtcgtgttgtgattggctagcgatactctctaaaaactattatattaaa

SEQ ID NO: 71179 - DNA, 1145 bp, Cannabis sativa
tttttccaaaaatttctttaggaaactattcatagcctcacatctttgtgttgttcgaattccagcaacgaacttaccgtggagaaacgtttcagcccacatttgcttcctgttgtattggttttggtaccactcattgtcttccatctcaatgaattctcgccatttactatcaaacacctcttctttgtagcatgtgtacatcaaattactgaaagcttttgtgaacttgggatcacccccacctgctctatttgcatttgtgttaagatgccaacaacatagttgatgtgtggattgtggcagatgtgtggttattgcatcatgcattgcatggtcaccatcggtgacaacaacttttggtttcacttgaccatggcattctagaaatgttgtagcatccacgagtagctcagctctttctcattcattaggagcacaaatttgaatacacatgttgtaaaatggtggttcacccctatgataatgcataaaggcttattgtacatgtttgtcatttgtgctgtgtcaaatgcaatgacatctccgaatgccttgtagtctcttcgcgctgccccatctgcccagaatatgttggcaaatcgattctcgtcatctggctggtggtagacatagaaatgcgaatctcgagcacaaatacaatctaagaaacccaaggctccttcagcatctgtttccaattctcttctttctttgcccgtgcaactttattgtaaacatctcttacttggcaaggtaacttatcatatccccctgattggagtgccaagtgggacattatttgcgaagtctttatacgcactgaattcattgaatgtacctgtgccagcaaaccatccgacacatgacgatttgatttctgcaattgtatctcatttagcgatactagatcgtggttatgttcaaggcaaaactctcttgcttcccatatgttattgtgtctcaaatgaaggattctaagagcagcatgacaacccactcgtgtgtttggtcttaatcgcttcttgcgattgttcatgttcaaactctttcctctcctatgaccttcgcaagaacacacccacattttgcctgaaacttgtttgtcaattcttctcttcagatcatctgctcttttgttaaaa

SEQ ID NO: 71180 - DNA, 2060 bp, Cannabis sativa
atattaatatactacaaaaatacaaacataaattataaaatattattagaaatataaaataaaatattaaattggtccctgtcgagagtggagagtgtgattcccgttctcgactcgtttaacattcggggacaaaaaataatatctgtccttaccatatttcctatttagacaaaaaatttccgttctattatctatggacgaaatgtattatattcctattagaaaattaaatctataaatttattacagtttttaagaaaaaatttgtccatttaaaaaaaaaaaggcaaatagagtacaaaatttgtaaaataatcacatgatgaatgaggttacatatggtattgaattctcactctttcaatataaactctctaacatatttcatgatttgtgtgactaaatgaaattattttactaataattttttttcttatatatttagtaggatttgtttggaaagtaatgtaaacttgatttcattgtttgctcatgtaatacaagactctaaagctttgctttcccttttgcaaagtgtttatgatgtttttgttaaattatcaattaatttgatagttcataattttattagagtttctattttatattctgattgtggtttcaaatttattacttattttactaaagttaataattaataaagtgtaattttttattaaaaaaatgtaaacttctaaaaggttacctaaagttgtgagtctataactagtataaacctaagtactgtaccagtaaaattaaaattttcgttcactctaaactcaaaagattcccttccctcaccctggcgtttggttggaggtaatgaaatggaatggaaaggaaagaaaacaatcttcattccattcttttatttggttgcatattaaagtgttggaatatcattccaatggaatgtcctttccaccattttagtggaataattattccattttaaaatggaaggaaagaccattccaatgcatgatgaaaaaaaaaatttaataattattttatcaattttttatatacattttaaattttatttcatttcattctcatttccatttctattattatgttttcattacttctaaccaaatccatttaaaatgtaactaaaacaactcccacatcaaacctctataaacaaccctttttcacatcacatttgaatcaaaagtgaaattcatttaataaataataaaaaaaaaacctaaattagttgttctagctcacagtcacaccaacaacaacagttgctgccattcccgttgcctaccgccggtaccgtcaccggtgggccacagtgatccttcaaaggaatatcttgtgaagacatcatcaattcatgatgaaagatttgattaaacaatcgctaaggtaagacaataacagctgtttcactttccaccattagattaagtttgatccgatggtcttaaaatactcctaccgtcttctaaatttcaactctttctttctttctttctcagttactcaaatctctaaagaggaattcagtttggttgtggggttggtgagcaaaggtgttgtcgaatttcactcataaacaatcattattaattcactactcacagtcacaggtatgaattttgaaacgaggatttatttttccctcttcataattttgtggtttattttatctccttcgaattctgttttgttgtatttatttgttgaattgtaatgaattatcaatctactgttctatcccagttattattatatgatattgcttcaatcaggaatatgctttgtattttgagtggtactatttatcttacttagtttgaatatgatgtattctgaatttcaaagactgtgtaatttatgttctgtgatcgagctttgctatgaggcacccaacccatggtgcctatcaccgcgatgaactatcgatttataatataaagtaagtgagactcgatattaagttacaccaataacgatattacacatcacaaggggtgataagattattattaagaataatgctatgttttgtggtatatacagatgtgttttttccactc

SEQ ID NO: 71181 - DNA, 1079 bp, Cannabis sativa
ttgtctcccaaatcctctctgaaaaagattagaagaatagaggacgctcgaaaggacttattgcatttcatccacgaaaaatgagcaatgtaacagtgctctaatccaaggtaagctttcgactccccctgttcttagatctggatctattgtacggagtttagagcaatctttgaagcaatctgaaggaactagaaagtttaagatcactctcaatgatattgaggaggaggttaatttttggaaaccatccatagtatgttatgtgttgggatcgaaccctctcttacacatattggaaggttttgctaacagaatctggaaggataaaattgacaaagtaataatgctaacatatggtatttttatcataaggtttaactctatggaattcagagatcgggtccttaatggtgagtatatttttttcaatagaaggtcagtaataatgaagccatgggatcgaaatacgaactttaaaaaggaagatgtcatgactatccccatctggattcagcttaaggatcttgacctcaaatattggggacatatcactctttaagatagtaaggtagcttggcaatcccataatggttgactctgttactagggacagggatcgacttaatttccccagagttttggtggaagtggtaatgaatgaggagttccctagtatgctggaatttgaagatgaatttggcttgaactctaaagttggtgtcaaatatgaatggaaactagtggtattcttacactgctttggtatggggcacatgacaaaggactgtaaaaagaaatcaggaaccaaacaggagtagatgatcgaagaagatagaaggaaggaaaaacccactacagatgaagatggttctaaagttgtatccaagggggaaaagatcaaagaacaaaagcaagcaataagtgagacaaaggttgttaatggcttccaggtattaacagaggtagctgatgagaatgtgtaaaatgaattggaggtgccagggactgcagaagtttataacacaagacagggggaggtccctctcttggctatggataagtttctagtttggaat

SEQ ID NO: 71182 - DNA, 777 bp, Cannabis sativa
tttatgcaatatttttgtgcaaaattatatggagtattaacttttataaacacctaaatatataatattttagtattttaaattaaaatttaatttaatattatataagaatatgttatgtaacccaatttaatataataccatacaattagacttacctaccaaacaagcccctcctaaatattattccacaaagcataacaaactcttcgcaagaaaacaaaaacaaaaagcaggaaaaagtacattaacattaaaaaaaaaatacatcaattgaaaaaatattaatacaagggatcgaggcagcatatatatgtaaccatggcaggtggtctatttctcattattattgtctaatattaaccttaatctctcatggtggaatacactaatcaactctcagaaaatatatatgtactggggaggggtgtggggtgattttgtgtggcacaattggtatagctctgataattaatttgatgttctaccgattcatttcaggactcgttcttggatcgagctgctgcatgtgtaaagaggccaaaatggttgaattttatttagtaaacaaaaaccatataaattaattaggttaaaaaggaaagaggtcatctttaatgtatataagtgtgtattattacctaacccaatagcctctgaacttttcatcagtctgatacgtttgcatgattctgtgaacattctgccatattgaaaagaaaaagaaaaattagacaatatgaaattatatgaaccttcattatttttatctagata

SEQ ID NO: 71183 - DNA, 1163 bp, Cannabis sativa
ttataaaacactagtaaaacacaacacagaacaactcaaaacaccagtagaacaactaaaaaataccagtaaaacaccagtgaaaacctacctgacaacatttttataaaaaaataacaaaaattaacataccatgtaaattttcctaaatattaaacacaccgatagccaacaacaacactctaaattttattagtaaagaaaaagaagttgtacgaaaatgtaggggtggggcccagcggaggatcgtgatatttggttaaagggaaataaccacgtagttgagtatgatgtctatacgcgtttccgcggataaactaccggctttgccttttccttgtttgttttataaaataatgtagagaggattgtaggcagttattaactgtcaagttatggatcaaccgtgtttttattttcttatttttaattttgatttctgtgacgttatgctcgaaagttgtcgcttatctatgtgacacgtaagcctctccaagtgttcttcacaagcaaacctgaaccttccaacttgtttctccaactatcaattacatcacttccacgtctctaattagtcttttggtgagggactggctttaactataatgctaatctttttcatggaattatttctactaaaaaactttcttataaaaatgtcttatcttttttattattcttacatttttattgttaatttgtattaaattttcaaaaatactaatttcaaaattataaaagtactgtattttaataaaatagaaaactaaaacaactaaaacaactaaaaaataattatagaacaacttaacaaacaacaaaaaaacaaatatcaaacaataaaaaaacaactataaagcaattgaaaaataaaaaaaacattgttctcattgcaatatgtaaaatattatcaactcctcatgtttttgtattaggtaattctttttttacttaattttgacagcttgatttatctttttgtagtactacattatttttttcatgaaatttattattacaacttcatattttcaacttttttttctcttcttttttaagttaatgacagttaaaataaaaatttattttttagaccttaaataaataattacattaataataaaaaataatataatcatatgattttaaaatagggtaatata

SEQ ID NO: 71184 - DNA, 1768 bp, Cannabis sativa
catgtactaaatcatgccccatgactattcaggccgttaaaaatctcctaaaaatattcaaatttttggatttaaagacttacctccaatttcatttgtgtgctaacaattccaatagttcgaaaaaaaaattagggcaaaaatcctaattattctgatttttgccagagtatttacatactaatgaaattatcattactcttaatgaaattttcattgcttcaaaaatgcaattgcaattgaataaagtaaattgcatcattgccaaaccaaattaaaagaacacaattcaccaccatttcagctgattgtaactacaaaaagcttctacttcaagacccatttcaagcaacaaaacatccaatctaacttcaatttcaaatttcaaatttagttgtgaaattcttcaaactaacaatgtgaaatactaaaatttgcgaaacccatgaagtccgcacagtgtaaatctatgatcgttttgcgccaccattaaatgttatttcgctaataaaaaaactcacttatgatcttgttcatggttttaccatttcagttgattgtaactgcaaaaagcttctagatttgaattcaaaacccaattcaagcaacaaaacatataatctaacttcaatttcaaatttcaatcactaaatttttgttcttgttcagaaaatcaatactatatgaatatatatatatatataaggttttacctaattccagatccagtagcaaagataagaacagtaggaaactccttcggaggttgaattcgatcaacatcgaatccatttcccataaccggtccaatctcaacaacatcacctctcttaagccgacaaagaagttccgccgtcgaaccctccacactcttcaccaaaaactcaaaaactcccttagccgaacccaaacccggcggcgaagcgatcgccagaaacgaaggcttatccgattcaggaaccctaagctgaaggtactgaccagctcgtgtatgagaagaagctaagtcaggcgaatcggagaggtcgatggtgacgtggaagagagattcagcagccgattcaacgacggagagaggcgctggtgtccaaactgtggtgtcttgacgtacagcagcggcgacggcgaggctagcgaagcggcgacggtggtggttgtggcgtagcgttaggtggcgcacgatagacatgggaggaaggaaggggttaaagtgcgcatgggtgcgtaggggaagcggagctggtgagaaagctattgacatttttcttttttttttaaatttatttatttatttatttgagttcggctcggctgaagcttcgaagttcgaacacgtaaatggcggcggcgaagggaataaggggatgaccggtaaagaggtttgtgtgtgtgtgtgagagaggggtattatggtcattttctattgattgagatccacgtggcaaattctgaaaggtgtcctggattggtggagagataagttgttgaattgtttttttagatagtgattaaaattagttatgaacaccatttaaaaaaaaaattagttatgaacatcttcgaactagtaacgtttattgttagggtgtctcatttacacttgaaaaagaaaaacaaaaccggtttcaaaaagggttaatttcacaacggtttacgaaattttaaatatttttacgattttttttattttattttcacgttacttttatgttgttttcgtgttattttttaaaaaaccgtaaaaataaaaaaaaaaacattctttgaa

SEQ ID NO: 71185 - DNA, 1114 bp, Cannabis sativa
ataaaattgacaataaaaaaatatatatgccagtaatttagtgaaattgtattttttttctttcttgtgccgtcaaaatattaattttgattattcagtttaatgaatagttaagtgttgatgcgatttttcattaatttaatataagaagataattaattagataataaattcaagaaattaagagatgaaaataataaatgaatacgagtttgtaattttgtagttaaaatttacacaatcaatatttatttttgagttttggttctatttcctccgatccccacctcaacaacatcccaacagtccaacattcctagtcgaccctagccaccccacccaagccccgatgttgtcaatcagccaccgaaaactcacccattttaaaacaattttttaaaaataaaattaaaaactaaaatagaaaaatcctaatttttaccagccgatactatctctttgccttgtctcgtacgacaccagcttaacatctctggcgacagtagtccaagcagaccaaaaattcagaaaccccaggtcccaaaatccaaaacctggttctccctcctgtcctcgatctctcaagctcacctctctctctctctctctctctctctctctcttcacgttgaacagccacggccaggctgacgccgaccattcttggtcctccaagctcgaaatggaccccataaaactcaaaacctaaaccccgaccttccaccctcgagttccttggatgttcatctttctccctctctccttctcggttgtgcatgacggtgccaaattcggtcatcataggccaaaatggaggccacagatggcctctctaggtcttgagatctcgtggtggtgctacagtggagctctcatgactgggtaaagaagacgaataaaaaaaaagaaaaaaaaataaaataattttttttatttgtaatttaattttatttttttaattaaaattataatttagaccaataaaaaaataataagcttacatattaagaagtaatagtattaatttttgagaaaatttttgggaagaattctccgttaataaaacaaaagggggttggggataaatggctgaaatgagtggtgatcttacatt

SEQ ID NO: 71186 - DNA, 1024 bp, Cannabis sativa
ctctctctctctctctcttcgttgaacatgtcccttcaacatcccaacccacagtgaaccaccccgtagacccccactgacccacgacgcaccccaaccaaatcggacacaatgtcaaaggtgaattcgtgttccgttttttagttttttattgattttgttttgtgattttagtgttaaagatatattttgttagatttagagatatatttaagttttagaatcttagatttgtgatctggacaaggtccgatggggtctgatggggttaatgaataatgaatttgtaagtttgcgaggtaggagacataggttcgatgggggtccgataggtccgatatatatggggtccaattgttccaattgtgtctgatgtgggggtccgattgtataaatggggtgatgtaaataggaggtttaaagatatcataaaagttgtcatatcctaaaaatattagttattatgaatttagggaaaaaaatttaagcacatgtaagcatagaaaatcaaatttccctagtctactttttttttttttggatttaacaatatctattttgccaaatttgagtgttattttttctaatggaattttttttacaaacaaaccggatatacttctacaacgaatcaacttagtaaaataaatatttaatgtcgcataatatatttagttatgttacttaattaaattagaataattcatatttttgtgttttggactttttacacctccttgttattatacctcttaaaatataacttttacaataaaattttatagtgaaatgagtaaagtggtagatgatcattaataaatggatacaaactaaataccttttactctttttcacgttgataaataataaaataaaatatattttttacaatagtttatattattagttttagtttttttatttgatttgtgtctatttattaacactactacaaaaacaccctttagaggcgatttttaagccctttcagcgtcggttttcgcgaaattcgctaccgacgctg

SEQ ID NO: 71187 - DNA, 818 bp, Cannabis sativa
atatatataaactgaatatgaatatgaatatgaatgagagtgaaaaggcgagggagtggaggagggttggttcaggcgactatgggagacgatgcggcggtggtcggcgtttgccggtgaggaattcagtcacagatttagagatatatgagagaaaaataatatcctctctttattgtttcatttaaatgattagctgtgtgcatatgcataatactactttgtatctactatttatcttctcttttcttgcaattgggtagaataatcaataattcaataccattacaattcacagtcaaatattaaatatctaattctaataatttgattggatattattttttaatatttaattggattgaatattgaatggacgtgcaaaaatccaatacattcaacatttaatcgattgaactaattagtatttttatttactttaaatgagtatttagattttatattatttataagtaaaatatatatgtataaaaattaatattaaacttttattttttttttcttggattctaatatatactggacttaaaatattaaatggatgtgatccgatctaaaaaaatactaaatctaaaatatttaataaactcaaactaaaccaataactataggtgaaatacatttaatagataaaaccgattcaatccaacatccaacggatattgaatcaattggattactaaaattgatttgatcaaatcaaatgataaaatctaatatccaatatataattaaatcagatctagatagacctacaaatattagatgtagtcaaggccggccctgacttttagtgg

SEQ ID NO: 71188 - DNA, 1687 bp, Cannabis sativa
ggcttcacaatagtacttatgtccaatttgttaattgtctcaaattaattaactgttttctacaacttctaatgattttgaacttatgtctctaaccccacctggttttcttatggggtactatattgttattattattattattttgagaattactaaaaactatatttcctcgatattatatagttattgatgaaataagtatcgggtttcatataacttagtaataagttttaaaaaatatcgttaactattcataggacattattactggtgtctaataataatgcattattattttcaaatcatgagtttggaagcaaagaaagagttattgaaactttttcttttcttttttccttactaattgttatagtttattttatgttttcttctgtctttacttaataaacagtttttttgttcaaagcataatgaactcatagctttattccaaaaccaagcaacgtgaatttgctagggggaaaagaacaaagccttgagtggtgacacggggaagactattgaaaaatgaaatgaactaaaaatgagattattttgttccattcttatttcatttgtacgattaaagaatcaaagattgtattcaacacaactgtctcgaaacattttctcttgggtggaaaaaagcaagcaatttttataagtttggaatcacattcaagaaaaaagcaaacctttttttcttttttcttttttttttttttttgagagggaaaggaagtgtaattcaatagaaaaagagcatatcccttaatgtatcgaattcctttgggagcgtggtttattaattttctctttcaattcattctgcatattcatctcgttgtcagtcatataatgtcactttatttaattttatgtttgttatttgttatataaaatcaatggaataactaatgagttgctatataacaagctactaaatgattttatttaatatactacagaataatttaaatatataatatacattttaattattcatttttttaaatttaaactaaaaatattttgatcaatggagaaaattcttaaggcctgtttagtacagaggattgggctggattagataagctaattttttcagtgtttagacatgttaaaaatttggataactaatctcattgggattatttataccatataggtgagattttttttaattgtttttttaattttaatttttgttggtcgagattttcgacagctaataattaaagttgtatgaagtaattaatgaatgttagaagaaaatatttttacataattaaggcattaatgagcttcaattcacgaattattgtatttatgagagtatttattatagagagtttttcgaccgatctctatttgttttacattattggggtatttatagactcgtaatagtgataaaaggccactattgtcgtgtttgtttgtacaattttctaaatttgattttgggtataattgtctactttatgatagatttgtatggtatactttttttattttgatgttgatttttgttaattgtttattatttttttatgttgtttggatgttattttttttattattttcatgtattttttgttttgttatttttgtattgtttttataagattaaaaatatattgagaaaaaacttttgaacgtaaaaaatattaaaaaaaaaaaa

SEQ ID NO: 71189 - DNA, 2059 bp, Cannabis sativa
tactctttgttgtaactagacctaaatcatcatattattcttactgaaactaggcacacaacttattatattcaacaactttatattgtaatattttttttaaaaatacatatatatatttatgtaaatatcacaagaaatattcaaaaaactttatatacatcatccttattttaaggggctcttttataaatacattttatatattttatttacatttttatgacctatatttttttttacaataatacaaatttaatttttttaaaaatttaaaaattttaaaagtatatatttctacaaaaaatacaaaatgtaagaaaataattaaaaataatgagaaatcaacttcacaagtcacaaaaactaaaaataataagaaataacagaaaattaatctcataacaactataaatcaactataaataaactataagataaccaaaaaaataatatcgaacaatttattatttttattgaagaaatgttaggctaattttagcctacttttgagtgttttaatctctattttttgtgaatacatgtttttgcaactgaattatgcttatttttcttatttcaggtttaaatgataaaattcataatatcaaataaaaatgggaagaaacatgttaaataagatgaatatgattaatttattatgaaatttggtgttataaataatgggtaaaaaaatctaaattttagacgcttaacacattgtgtttgtaattgaaaattatgtctgaagttttaggctaatttttaactatggtgcgttcacttttagggaaaatattgtgaatgaaaggttctagatctctctttcagcttttcaaattatcttgaattgttcgattatgagcactatcgataaagttatggttaaaataccatcaatcgtcgcagtaggatttcaagataaaaaataatatacactgttggaattagcaccatgacgcccaaatattgtgccacagcgccacctccatagtaaattgcaatattttcaactttttaagagtgttttagaaatttcaacaaaaataaacttagggtttcgttttttaaagaaaaaaattgtaaattttaaagggaggagacttcttaaaacttagaaaaccatgaagaaaaaaaaattggagatgaagctttagagcaattatgacaaacccaaatttaattattctcttctctttttataattttctagttttattatggtttttctgtgaaaacattttttttttttgtaattttgtttaaatttttggtatattatgtaaaaatattttttaatgtgaattaattaaatatgaatttagtgatactaatcatattatataatttatcagttatcacgacatgtgtaataatagcaagtgcaaggaggcactaaactttcgatttggtgtgtgtaatccctccaatatagcagcaaatggtacattatatatgtcgtgtggctacagtgcacaacatatatactgtggcattgacattctttttttttcattttgtaataattattattatttaatttatatttatagatattgatattattatttgtatttttaagattaaaaatgttacttctacaatgtatttctttgaaatagatccatcgatgcactcttatttgttgcatctgagaaaattttttagcttaatttttgtagagtcgtttacgctatagctatttaagacatctaataaaattttaaaaaatttaaaaaagtttaacgcgccgaaaataaggttcaaacagtctgttgcacgcaaaactcttttattttatacatgcgtgaaatagactgtttcaaccctgtacattatagttatttgagatatgttgtaaaatttcgaaaaaattcacaaatatatatatatatatatatgacaagccgaaataaaattcaaattgtatgttgcatgagtgactcttttatttaaaagggtgtattgtaaaaatactttttaaattattgtgtgtaaatttaaatgtgaatactataattattttaattttattacaaaattaatataataataagta

SEQ ID NO: 71190 - DNA, 1334 bp, Cannabis sativa
gcggcctatcagcagcgaattgctcgctatttcaatttaaaggtcaaagagcgaactctgtgagtaggagatttggttctatgaaaggtcatgccaaacacgaaaaacccagcacatggagtttttggcgacgattgggaaggaccataccttatcactgagaaaattggccatgcgacctatcggctggaagatttcgatggtactgcaatccgaagggcttggaatgacaaaagtctaaagtattattatcaatattacttggaatgtaattatagttagccaatgtagtttaataaatgtcctataagtataaggggtataacctacctttgtactattgattattataataaagattctcgatttttaaatttcttgtactttaaattttttgcaagtttagcatttgtaagtcgttacaccgagttgtaataacaaaaacattgcaaaagataaaagtagttataattatgcgagtaccccagtaccacttaaaaacaaaaggaaaaaaacctcgaaaggatgttttttgaaagaggaaaaaagctgaaatttgttccatgtacaaaacgcgagtacccatgtactacttaaaagagtttaatagctaaggaaataaaacttagataaattaagcgggtggagcaattggagcagttggagtagtggagctatccgcgaccttgctggcagctccatcagcgacttctttagtgtccgcagactcttcctccttggggaaaagatttcctctacacccctgcatctgggtaggtgacatagcacgaaaagcctccgccatctcacccgcctctgccctaaggatagagaagtcgaagtctggcaccttggataaagtcgtgtatatatagtcagaaacaacttgatcataccgtttctttccattttccttctcgaattccaagtcgcgagccaaatcttcgaccttcgactgagagagcttggcttgcagttctacctgctctttggacttctgaaggttctcgagatctttgtctttagaatttgcgtcgtgctttagcttcttgttgctcttttgaagctgagcaatttgctttttcagaagatcaacttctttggaacatgcgacgaacgccctcaagaaaacggtcataaactgcgtggccagctccgcccctcgcgacatcatttcctcagtaagaatcgcttccaccctcgacacgaactcgtaatttacgaacttgttctgcagagtcacaaagtcgcgggctctgacagccgggtcaatcatgaccttctttcccttgtcctgagaaggcttaacctgcttcttggacgagtcagcaaca

SEQ ID NO: 71191 - DNA, 1208 bp, Cannabis sativa
  modified_base (936)..(938): a, c, t, g, unknown or other
aagatagaattttttgttgctcgtgtgaaggcttttgtaaaaaagacaaacgatatgattatgtgaaatctcatcgtgttgaaacaaggtttgggtgtttagcgaggatgaagataaaatttcatccttcacgaaaatatcaagttgttgagttcaatccagagcatatacatataacagcaagtcctagtaagagccatttgcataggtcacaaagaagaataactcttgctcaagcatctgaaattgaattggcagaaaattcaggaatcgctcctaaagctagtatggaactaatgatgaggcgagttggtggacatgaaaatcttgaatttattttggatgattgtcgaaattatatacgcaccaaaagaacaattcaaatacacgcaagagatacaggtggtgttcttgaatatcttcaaaagattctaattttttttatgcaagcagacacagatgatatgttaacaatatattttgggcagatgcacgaatgaaagaatcatattacaacttcggtgatgttgttagctttgacacaacgtaccgaaaaaatcatgattgtcggcctttcgctatgttcgttggggtaaatcatcataaacaaactactatatttggagctgcattgttatatgatgaaactagtgaaacatttatgtggttatttgatccttttatatatagaagcaatgtcagggaaaaaaccaaaaacaattcttactgatcaaaatgcagcaatggcaaaagcaataaagtctcaatcgtcagaaacttatcatcgtttatgcatttggcatatgtatccgaatgcagcaacacacttgagtagtgtttttgaaagatttcgtgaatttgctactgattttggaaattgcatatatgaatatgatgaagaatctgaattcattgaggcttgggggaacatgcttnnnaaatataatcttgaaaataatgattggttggcacaacaattcaagatgaaggagaaatgggccttggtatatggaagagagactatttgtgctaatatgactaatactcaacgaagtgaaagtatgaataatgtacttaagaagtacgttagctatcaacacaccatgctgcgttttttttgaacattttgagaggttgattgatgatcgtcgttatgaagagttaaaagctgactttagagtaaatcaacgtaatttagcaccatccct

SEQ ID NO: 71192 - DNA, 1499 bp, Cannabis sativa
ggcaatgaaattaaagattggcttaggtgaaagtcaacaaatgttggcattcattcaactttgaaaaggatagatttgagctcacatatccaaatttcataaacaaaattttgggacagctttagaagcaatagtgtattaaatttggagaaatcgcaataaagcatactagctataaaaggtgcaagtaattgcaggtagtgctagttgcattaaaaaatttgtaaagagtagagttgctttttatcttttcatgaaattaaatagaatagatactgagattgttcctaaaaagtttcacaaaagtctttaataaaacttctgaacatgctcttgcagaagcaatgggagttagagttaaagaaatgtttagttggtaattaaagagtaaaagttggtagcaggtgtttgttgagacatattgtcttacggtggtacaagcaattcatagtcatgtaaaaaatatttttttatttggtattgttatttttaatcgtattttcagtttggggatgtcccaattaagttgtttccttatttggttactgaatttattggttaataaagatgattttccataacaaaaaatagagtagatacaaaagtggctctcttatttataaggaagtggatatgttgataggaagagttttagagaatcaaaatttcttaaaatgtatagagaagaaagaagtatatcagctcatgtggggtgctactagattgtaaagttttattttgtggaatatattacattgatgattgatataaaaaaaaaaaaacatataccctaccacccataggtaaagtttatctattagtttccaatcaatgaatattcgaaaaaagaaatgataaattttattttattagattttaatgaatcaaagattcaaaaatgacaagttttgtttggtgtctaaaattaaaaaagtgtgatgagttatgtttggccaaaaacaagattgataagtggaaagtccattgacttgcatgtggtacaagtttcaataggtaaaattttaatgttcaactgaattattgtaatttgtgtctcatcccaagtggaaatatatagaaaaaaacaagtaatcaaatgggaattaaaaattaagaaaaggactaaaaatggaagaggatatttatgatcacatgtgtttctttagggattattcaacaaattaattttttaaaaagagagtgtgttgtctatatgaacaatgatagcatgtgctcaatttgtacgaaggagaggccacagaccacttatcatgttttctcggattgcaggactttgtctacctatttaagtactctagggctgcacatcgggcaagtatgtcacattttaggtttttcgagtttgaatttttgaatttcgggtgttaaaaaatgtctactgaacccactgagttttcgagtttcaatcaaatttaaataattataaatttaaatctaatcaccacaaccctcactctcatcaaataataataataata

SEQ ID NO: 71193 - DNA, 1565 bp, Cannabis sativa
aaaataatttccaacatgttgttctcacgagaaggtttttgtggtatggcattatgattagtatcacagctttgggttgtttgtgacctagacctctcttggccatcgacagggtaacacatttaacgaaacccacgaggtcatccccttcttgccgtactaggatgcacgtgggttcctagtcgttgtggccttgtggccttttgggcaccatacctctcttaccactctctattgagtctgggagttttatctaggcgttggcacaataccttgttttctataaacacttcgtgaacattagtagttctttgtacaccatgggatggtgataacgaacttccaacatcttggacttgaccttcgtcatcagacacggattgtttgcatgggcatcaagaggtcccttcgctagtaggtttagctagttgatactcttcatggtgttccatggtgttttcttcattcatggggtcatcatggtcttcctcctcatagtttgtccttctcgtactcttcatgatggtaagtggtcattaacgcttgtgttcactgctcttaatgaaagcaccaaactgttgacgtggtttttcgtcaatggacctaagaagatcgtaaatgagcaagatgaacacaagtaatagttactcaatgtgaactggtttgtaaaagtaaattcaacaaagatgatcacgaggattttatagtggttcacccccttttggtggtaataggttggtcaacttggtaagttattaatcccaatgcttgagtagaattctccagagttatgttctccatgagttaaatcctcaagtgagttttacaatgagataacgggatttcaagtgtatgatttcgtgagtatcaaattcagggtccctttacaagtgatttcatccccttatataggttttcacctaggatttaaaatcccttaaccataggagcacccttccgtaactacagtcaggtaagatttcaaaatacaaaaatctcatttcaaaataaatgtctaaaaaatgataaaagatgtattgtcctccaagtcatgctgatgagtcataagaggcacgtgccactgagatgaggcccctctattgggccgagatgatgggagcatgagaaccctctattaggtcgagataatagaagcgtgaatcctcctttggtctgaggcaatggtagcgtgaggcctctctattgggctgagataatagaggcatgaggatcttcctttgggttaaggtgatggtgggtagaggcccatctattggttcgagatgatggaggcgtgaggatccacctcctttgtccaaggtgagatggtaccaaggagagtggtgaggagacttttctttttagtctgatgtgagggggtaccaagggcatgtgaggtgataccatgaggtggtaccaacgaggtgagaccccatttagaggactccattgagaggacactaatgggaggcccacattattggtgaactactatgacatttcccatatctaaagaaaaattaataccatcaatattttgagggataacaaagaaaacttctaag

SEQ ID NO: 71194 - DNA, 1214 bp, Cannabis sativa
tatatatcttattattggttagttatataataatgacagtagtactattagatgttattattatatatataatttccaatttgtgtgctctgcagctatagatatatggggttgcaaacgtactagcattatttgttaataatgctcaataattaaccaaatttcaagctaagtacataaaatgaaagaccatgcatataaactatatatacttaaaaacatttatataaggaaataattatttgcattaagacctagctctactcatctatctaataataagtaataaaagcccttagttactaagtatatatgcatcatgatcatctatcttagccctattataaatgtattgaatttttgttgattctgcatataataaactatgtctggttaacaaaaatttaatttttcttcaaaaataaataaatagatatatattacttctctttgtaagtacaaaatgattgatcccatgctcaattttggttgaattattaatttcttaaatgaactttttttttttctatttatttttcagaagctattatagatgcaccactcaaagatgcacagtaaagaaaagggtggaaaggtcattccaagatccgtcgatcgtgatcacgacatacgaaggacaacacaaccaccactgtccggcgaccctgcgtggcaacgcggccgccatgttatcgccttcttttttggcctcagctgggacattatcgcctaataacttgcctcatgacttcttcactcagtttcttccaatttaataataataataatattagtaacattcatcaacaccaacaacaacatcataatcttaataatcatgatcatattattcatcatcaaggtgaggctccaagtaataattccatgttatattcaaaccttaatactactcatcatcatcatcaatatcggcagcagcttcatcaggttcctgattttggcttattgcaagatttagttccatcatttaatcgtcatcacaacaagcaagatccttgatcaaaatattatatataaaatatgtattctacctccttattatatatacatatatacacattataattatatattaggatctatatatatatatatattaattgatatatattcccttcaaaatgttttatctcattattatttatatattattattattgcttttttcacacatctctgttgtgtgaaatttt

SEQ ID NO: 71195 - DNA, 786 bp, Cannabis sativa
ataataaaatcaaggagcttagcttcaaaatataggttcatggtccccaagtcacttctatacaacactgtataagagaatgttgaatttgatgaggaaatttcagtgagaattaatttctatgagaaatgatttttaagaaaaaaatattaatttgtggaaattattattttgagtaattataacaattatgaattatgtaattgaataatatataactatttaattttattttgagaaagaagatatgactttcaaaccaaacttcattaagatatataaaattatttagcactcatacatcaaataggatttttcatataaacacaaatttattaaaaaaatatatggaaattttatggtacactcctttgaaattttaataattttaatcttatgatagtatataacatagttgttatacccgaaattcggttgccatatcaacagaggacacgtgtcaagataataggagtgtggatagatgcaatgactttttatgggataactcattaattacgtaagtatcagagtatatttgtaacctgcttactgaaaggtcttaggcaaggagtcaatatacgaactggtactcagtatattaacgagaaatcatatgtcactgaatgtaaataccaaggtaccaagcaaagcaacacgtatcaatcatgaaagtccttagcgtacactatacaaactaagtgtaacaatcggatcagcttgagatcaagtaagcgaggtgcctctctggctatggaagacttcctatagcttcgtccagttagc

SEQ ID NO: 71196 - DNA, 713 bp, Cannabis sativa
acaatcaacttgggacattgccttcaattgcttaaatgccaaatttaatgcggccatttaatttgacatggtcacaaacgggggatgagatcccagcatcctcatgttcaaaagccttgaaagtttcaaaaacagaatctcgagagctcagtttaaagggcctaaagcctaggttaacaaatggtctggttcgttgggttctacttatacaaatctaatgccatttcgatcgtctatatagttttccataagtacaatgatctatgaagtcaaaaaaagtcaaattcacaacttcaatttttcagcaaaatgactcactcggaaattagaggtttcgagtgttttgtttctgcaaaacagcaacatctctgggaactgaagaccagccttaccaaaacatataaatggactaaatagtgtcaaaatataacttaggcatcttaaatgacaccccttggatgtttctacacttgtatagtgtctaggttgacgttatatatccacctcgacaatgggatgtgaacttggatgctaggacccgaattgccttcagtaaaacgaccataactcacttaatttttatgcgattgacacaagtaaacttgtgttttgaatctatttaagcagtctatcaagtcatgttacgagaataagcattgggtcacctgtagtgggacctgtcgggcaccaaaaattagctatcaccaccagaa

SEQ ID NO: 71197 - DNA, 1096 bp, Cannabis sativa
gaattttgcaacaatgaatttgacgtgttttacagagaaataggaatgcaaaggcacaggactgttagactaacaccacagcaagagggtatagttgaaagaatgaatcgaaccattctgaacaaggccaagtgtatgtcaatacaatttggttatcacatggtttttggggagaagatgttatgacatcttcttatcttataaatagacatctctttagtgatattgaatttaaaatacctgaggaaaggtggtctggtaaaccacctgacttgtctaatctaagagtgtttggctatagtgcttatatgcaccagagtattggcaaattagaacctaaagccataaaaggagtttttctagggtatcatgagggggtgaaagggtatagaattgggttaagggaaaaaggtaggtttaagactattattagtagagatgttatattcaaggaaaatgaatttcaatgtttacttaaaactaatcctacaggcacatcagatactaaccttgcagaataatacagtttgatcctattctatggagactagaggaccaagaagaacctgatgtcaatcaggtggaaccagctggaggggaaccctaaccagattaggttcaggtggaacacatagataatacaagcagggatgggactcaataaggtttttcaaacttattttagaaactacaattatcaataaatagaaatcaatcataggtttaatataaattcatacacatatttagaaatttgtaaacatttagcaagtaatgaagatatgagaaaatacaaaacaaacatatctcaaatattttctaaagttttcaagtaggtgatatacagtgtcccgtttaggcgagagtcaaagacatcatcagttgaatagagttatcggctcatctaaaatggacactattttagcagcattttattcgatcaaaataagaatctgatgttgttcagtttaggcgaaagtcaaagtcattcttattttatgagcttttatcaatgtttaaatatttgtaaaccatattctgaacagtcactatttgggtggtcattactaagaatataaaatttacaaaaaaaaaa

SEQ ID NO: 71198 - DNA, 3036 bp, Cannabis sativa
gagagagagagagaaaagagagataatggatttgggtttttgaagaattttttgtagatgaagaagattcttgggtaagagtgtgagatttgaaaaactttcagtgaactcaacagagaatctctctcgactttaatttacctgttcttgctttgctcaatcaataaagaatatttaatttagtggtgtttcaaaactggagtagaaccataaatcacatcgatatatcggacttaaaccaatatatatatatcttagtgttgatttcttattttctatatttattatttttggttttatgtactctatttacctttgtttttatctaattattgtctttcgtatcttcgctaattatttgattgtttaaagattcattgatttgataatgcactgttagccgtaattttcccataaattagagctcggtaatcgattaagaatgtagaatcaagattctttccactgcaattcctaaagaaactttgaatgtcatcaatggcgagattcaaattggagaatttcgatggaactggggacattgctctatggagagaaagtctgaaaggaatcctagtgcaccagaaagtctccaaggttcttagatgagaagttattgacagaaaagaaaccagagaaaaaagtagaaatggaggagatggcatactacacgatcatcatggttcttatatcaaacagtgttcaaagaaaataaatcgcagagaagacgacaaaagcattttggaacaagttagaagaactatacttaaaactatcaattgctagaaaggttatacggttttagaataattttttcactttgtttagatgataatatcgatagatataatgagattattgtaggattggttaatataaaccacaaagttgatgaagaaagctaggccatcatcttattgagatcgcttccaatttcatattaagaagtcaaggcaaccatcaagtattgcaaagacgtaattgcactggaggatgttcttgccgcactcaagtcgaaagattttaaattacagttggagaaggaatccaagaaagaagaagtgcatttggcaagaggaagataacccaaaaaagtaagttcgaagagtaaacaccatcactctcaatgaagatcgaagtacagagagaaggaaacaaagaagtgttactctgtacacagtctggacacttgtaaagattttgcaagaagtacaaggagcaacaaggcttcgacaaatcttacaatagagataagaaggataagctgcttcaccataggaaggattcaattgcagtcgcggaagatagtgacgactgctccatagatggagttcgaagttaaaagttatggacaaaacaaattcgagaaaattggaaatgctctctgcaagatttggccacggcgaccataagtttggttgcggcaattgggttcgaaaaacctaaaaatccaattttaaagttccgaaaaatgcacaaattaaattcaaacatcacctaagtcataaacaacaaaatttatgctaaactaatgtatttccaggcattaatacatcaaatcaacatgctcaacccaccaaaattacaacttcaaagagacaaatcgaagcactaaaatattagcaccaattcatgctttagaactcaacctaaccataaaatagtttttcatactcaaacataaagctacaccaacaacaacatacaaagaaatgatctgaaattaattttatattcaaaactactaagttcaaaactgaactactaaatcatagctttactaaccaaagctcttctcaaaaaattactcaaatcataacattcaaatcaactctaaaacaagcatttagaagtcaaacactcctaatttcaaagatcaaaaacaaggttaaagaagtgataactaccttaaatagtctttaagaaaatcaactaaagttccttgcataaaccaaccagaaaattcaattgaagagcttcaagtttgcataaaaagggtgagagagagagaagggggggtcagtggtgaggaggttctaatacaaaaataataagtcatttttcaacaataaaagacttaactcaatttctttgtaaaataggtcaattgaccattttgcccttaaggcatcaaatccacataaaaagaaactaaggaaaattctgacattttatttccataaaaaaattcagacatttttagtgaaatttttctatcacacaataaaataattttggaccccgaactcggttcgggccaaaatacttgattgtgatcaaatcgtgctaacttgtctaaaatacatgcagtagacaatataaacatactatataataatatattatattatcacaataaatattaaaattataattttacccttctaatgtcaaaattacgaaaatgcctataactaataaatggggtcttaaatataataattctcaaataatttcatataactaattatataatcatattttattattatagttaattcattttaattagagtttctaatctatttattcttgaatattatattcactactacaatttggccttttagtgacacaaaatatttaggagtaatttttagtgacccacataatttgactctaaattttcagtgttagtctcctataatgtgggtcactaaaaatttgaaatgtcattaaaagtaaaatccatatttttttattatttttctattaattaaaaaaaactaacctatagagtcacgccagaagagattggaaaagcatgtcccaacctgcatagcgcgtcactatatcatacctttaaatttattagaaataattaaaatttaaatattaaggatatagtgacgtgctatgagagtaggtacacatatactcagacacatttcgcgcgtcactataggaataaaaaattgtgctactaaaaacaagctaatttccataaaaataaatataaagaaatgattatattaaaaaaatagttaaaaaaagaaaattagatgagtataaattcatctcttccaaattaaaacc

SEQ ID NO: 71199 - DNA, 1551 bp, Cannabis sativa
cagggcggagactgcagctgttcgccatgagttgggtgaggccaacaagaagctttttgccgctgagaagaaggtcaccgtattgacaaaggacctcgaagctgctgatcgctttgaggaaaccatcgagaccttatctgctgacctggatgaatgtttcaaagtcccgagcatttgcatatgctcctttgcaaaaaaaaaatagaactacgatgagcttaatgttttatttgtactattttgaaaaatacaacttatgctcctttgtcccgagcttaatgtcttatttgtactattcgtccaagtcaccgggctcacctttgcatatgcttgccttttattccaattctaatgcttagtaagtaagtgtgttcttcattgtatcttcttacaatgaaattctctgttgtaccattccttgacgctcttagtgaccacttgcaatttttatccaaatagtcaatttgaaattctttagcgtaagattttatgaccttgtattgaaattattattttattgcaaagtagttgaggacactcttcaatatttctttatctttgtagatatgtactttttcaatttttagatgttgtttatctatgataaccaatgcttcatcattgatttcttcttgatcaattgtgtgtcttgttattttttccatcatttctacagtaaccatttgtgtatagtcaacaaagtcgaatgtttcattatcttctttgtgttttctgtgtattgatgtgtggttgttctccctgattgagtttcatattcaagcatgtggatttcttgccttgccattttgcccacctcggtaaaaaaggatatttatgttgttggatttgtgttggggaccatttttcatgcacaaaggatgctttatcatgtctttttctcttaattttaactgcaagtaaaaatcaaagctttcatcatccgtgatctttagtactgggtatccagattgtacctgaaactatatttgtaggtttgttgtgttcctgttgcaattatattttcgcaacagtttgtccaccaattctataaatttgtaattttgtgtaatgcaaatccagtagctttgaaacctatgtattaattgttctcactccaatgtccattactttgaactagaactagtaatgattctatttttctacaaatcaacaccataaaatatatgaaactcaatttaaattatattatagatgaataaaataaattaattacataaattaaactagcaaatcaacaataatcatatctatttttttacattattattatcaaaatttaattaccaatcaatggtaggcaataaaaaaaaccaattttgtaaaattaacaataaatcaacgttaaattgtttatttcatcaaaacaaattactacacatattaaatgaacaatcagcagtagacaattcaattcatcaaaagataattcacaatagtaggctatgaatgaaatcaattttgctaaaaattcacaataaatcaactttaactttaacttaagtatttgcatcatcaaaattaattttaata

SEQ ID NO: 71200 - DNA, 1601 bp, Cannabis sativa
aagcaaagatccaatcttagagaagtctgtctttctcctgatgattgaacaaatcattgatcctaggcaaagggtacttattgttcttgattgtcaacttgtttagttcccgatagttaatagacatgcgaagcaatccatctttcttattaacaaacaacaccagagcttgctagggtgacacactttgtcgggataaccctaagttaagcatcccctaaagttgtatctttaatttcgtatatagcataaataatacacctagaattcaaatgtactaccataattgcaaaaataatattttaaagcatttttttggtaataacccataattatctgctagttaccagataaagctaagcggtcattacattcatctataaaaataacttttaagcaactgtttaccgatacgaaacaatgaatgatattaattgcaacaatagttgttcatttgtaaactagtcattctgtattttatagtttgtatcaataatgtcaaaaaactattttaatcgttgaaaataacgtataaacaactataaactgacaaaaaaaatagtaaatgacattaaatgcatcaatagtttttcaattagaaactaattacatcaatttcttcaccatgtgaattatgattgatctaattgtcgaacactagaaaataacataattacgaaggaaaatactaaaaaatcaacagaattatgaagaaaatcactaaacatattgctaccttgtaatttttgtttgatttattttttgggtaagctttgatttctctctaattgtgttattttgaaattatatgcacaatataattaaaattattatttttaggttatttttttgtcttttcaaatcaatggaggtagaaatctttgttttcttcctttttttttttctatggtttaccttttgattttggattggttgggattagattaatttcttgttgagatctacattgtgtccgtagtattacacaacttggacgatttttgttggagctgaattcgttcctcaattgaaaagaacaaagaagattgtgagatggtctgattcaactaagaatgaagaaaggagaagaagttttggacatgttttttcaatatttttgaaaaaaaaattgatttctttttttgtttaatttccatttctagagtaaaaatgtcaaactgaagcctaaagttactactacaaatatgtctattttcgtcaattttaactgacatttaaacattttttgtcagtttcataaatcaacgtatatgtcgtagatgcaaataaatattatgttgcgtcattttttatctatcaggtattaaaaaatcccgtcattttggaaccgacataaatagagtaaaaattaaatttttaactatattcctgtctgttttgtaccgacacatactaaataataataaaaaaaatcaggtctagctccatttatcaaatccctccacacatcagaatattgaagatcaaaattatatataatttttacaaaataataaatcaaaatccactaaagatcctcatcgttgccaacgaaaaattatgcaaacactacggggctcctgccgtcaacatcgagccct

SEQ ID NO: 71201 - DNA, 1903 bp, Cannabis sativa
  modified_base (1315)..(1321): a, c, t, g, unknown or other
cgataaaatcctaacaaccaagtttaagagaaaaaaatcaaatattatcctaattctaccgaaatttcggcagcataacagctataattgaacattttcaaaaacattcaaacctatcaataaaaacatccgtggtggttggcagagagggtttggggtttctctaatttggggatttctgggttggctgatcgaatgaggaagacgaagggatgggctacggttataaacccttttggtgtcggttatttggaaataaccgacgccatagggggcacaccctagggcatcggttatttccaaataaccgacgccaaaagtggcgtcaaattcccttccaaaaaatttcaaccctatggcgtcggttattaattattattctaaaaaaagcgcctctaaaggcttgttttgtagtagtgcttgcttcagttttctcctcaagaaatctgatcaaacattatagaaaactcacagaagattagattaatacaactagataaatggagaaagaataaatatcaaacttaccctttatagcttattttccataaacagaaaggcttgataacttgttttctaaatataaattaataaattatataaaagtcaaatacacaaaatataaaaactaatataaatatctcagctgaaattaaataataaattataaaatatattttttaaattaaagatgcaaaaaaatgaaattaacatattattgattgttatttcacaacactagttttcttaaatttgtcaatcaatctctgaatggaggtgcatattttgtagttcaattttatttgagaattttgttttcattatctccacttattctcaccaagctctgtcaatctagcgaagcctattatgaatgagctcgtttagttacgaataaacgcaaaagataagtcaaactcttacgcatacaatattattcctataagtgtttaccatatttcaatacactgaatacagatgtccatgtctgcgtgaaatgtatattttattaattacatataaacaattgtttttgggactaaccatgtattttccacctatatatattgtgaataatacagtgttttgaaagaattgttgtgattaattcttaattatactaataaggtcgttagaaaaatattatttttatttggtcaagcgtgtagcgtgtttattatattccctgccgagcaattaagggattccttgatcaaatgtggccatatacttgaacatcaagttattagtttgccaccctatcaagttgaattcagatcgatacatcggcacaaacacacatatatatatatannnnnnnatatatatatatatttatattggagagtaattttgaagtgaacttttgattttttttattctatttgagatccgcgtacacacattatagaaatatttatatatatatatatatatatatatgttgcaaatagtttagataaagtagagctttataaatataagtggcactaccatgacataacaaaaatatatttaaactcgacaggacataaataaagataagcttaagtacaacacgaaatatatagaaaatgtacgttgtgctaatgtgccttcgatgattcacatctcagggtgaagtgctcatgaacacattgaactagggaaatttaaatggtatactaacttttgctatttttttacaaaaatattgtgagccggtattttttacattttactgtgtttttttataagtttcatactacagtatactgtgttaagttttcactatttttctactggtgttttttttttttttgttgttctactgttgttttgagttgttttgtttcgcgttctactggtgttttgtaaaaacacagtatttttgaaaaacaattcgtgtgacagtatttttgta

SEQ ID NO: 71202 - DNA, 1689 bp, Cannabis sativa
taattgatgatgatttgttacaggttgaagatatagtggattcaggaagaaccttagagtgtgtgattgaacacatgaaattgaaaggagcttcgtgtgtatcagtgtgcacatttcttgataaaccttctagaagaaagattcatcttcaacttgttggtcaggccaaattttactctggttttcaggttactcttctctgtctttttcactagctaatttattttcttcatttttttttaaaaaataaaataaattattttaacaatttattgattatgtttatattctcactctggagtgctgttagaattttttttataaatttagtgatttaacatattattttggattataaatcttctgtaaatggtttaatttcaatatattttgtttaagaaaatatatattttatattcttttacagaatagatagaatttttgcggtgttattttaattactaaaatgtgtttctttctcttctcttatggcatcttttattgattcccattctttactaaattctcccctcattttcatcataatgaatacattttcttttctttaattttctttatattaattatatttttattaattaaaaataaaaaaaataaatatgtcattcaaaaatatataaataaaaattaattatatgttctaacagttacaatttagtcaaattaagtcattccgattacttatcctgattatgtaaacaaaatgatactgatttcctttccggtcaattttgtaaacaacaaaataattgcaagttgtgttaggtatatatgctgtttgttaaatatatgttgtgtcaactgtcacgtgcaacaatttatttacaatatgtcatgaaatttaataaatgtgtcttatcttttatgaatttttatttatatataagatgattattattgatgaatacagttttgtttgtgtttaattacaattgtgtgcgtgggcagtgtcctgattattttgtggtgggatatggtatggactttgctgaatcatataggcatctcccttatgttggtgttttgaagcctcacttttacaaatgatcatattcctatgctcatcaactattcacattgcttctatttccccccatatttttgtaatcaaatattgctacaattggcgtaactagtttaatgctcgtcgagttcttagtgttcatttttaaccgaaatatggtagaaattcggataggttatcttggggatgagtacaactccattcactcttaatataaaaagaaacatgaattgtctgcagtgattagtttattattacagattttgtttgggtgtgtttgaaatgatgtacaaaagaggaacattagatgcttttgttggttgaataatatgttaatgcttcaaaattataaactaatttactgccatgaccgactgtaacattaggctccttcagaaagttctggtgtgctttttaggtgttataaaactcagatatgaaaataatttagtaggagttttttcttattttagttcttactatctatttatgggattatttcatgaggatgatgcatccaatatagatttttgaaagagggaggacatcgatgtgccgtgtcgacgggaaaattattgattctgcatgtaatcatggcgaataggcggccattgacatgaattgagagcatctttaatggtgct

SEQ ID NO: 71203 - DNA, 2635 bp, Cannabis sativa
aatttttctgatctaaatattattttttttaagatttactaaaaaaaatattaaaaatttctcatttatttttgagggggtacgattttatagctgccaaaatttaggggcgaattcgctaattgacaaagatgcgtcatcatttaaatggaatgatgggatggaacttaacagaatgactgaatttctgtaaatgtaatagttcatatgggattcttaacaagtcgtatattttaggagctaaaattaatattgtcgaaaactcaagggaaaaaatttctaattattctaaaaattatgaacacgtgatcttccgctcctttccccctaaaaaaaattaaaatgaaataatcttcttaataaagtgagatactgttagaatttagaagcgtggtagaaataagatttagaaactaggattaagtaagtgtaagatatggtgcatgggattcctgttagatattattatatgaaaagatgatgtatttacgatcaatttgcaaagcagaataataaacatattaaccgtatatgtgaactacgaaagagatcataatatcttcaatcatagatctttgaacttcaatcctagtgttgctttggattgggtaatcgggcttccaagatctgtctactctcttagatggaattttactgtttgcataaaaatgagtcaggagcttggggaccgagaccctatatataggcgagatattccattagtatttacgccacattaattgtcagaatattttgacaattaattcggtaaatcaaatcaagaaatgaatgattcgataaataaaaaactgaccatatttagaatattcatacttatcacatattgatttgtgataaaatatagtcagggagataatgcaaaattaatttgaacgattttgtgctaatattaaaaataagaaaatttgcggcataaatactcattttgttcattttgttgctaataaatacccaatttttaaaaattgcagcattaatactcaaaataacactttttaaactctgtcgttggtacccacttaacagagttactattaaggacacgtgtactatcctgataattcctccttttttctttttacctaattaattaagaaaatacataaaactaattaaaataaaaataaacaaatcaataatcatttaaaacatatatgataaaaaaaaaaacataaatcactaccctccaaattttaaccagctcatttctctaagacaacccacaagaaaagaaaacaaagacaaaaatataatagaaaaagaaaccatggtaagaacccataccgcagtaattgtcctcctccattgatggctctcccaaggtctttcgtgtggtgtgatagtgatgggcggttggaaggtgttcgcttggaaattgggtttaagaagaaagaacgtgtgaaacgcaattctgatctctcatgtggtggtgcgatggtgaaggagtgtgtgggtgggtggctaggttagtgcgtttagatttactaatttaggtttttttttatatataatatatgttttaaacgattattaatttgtttatttttattttaattaattttatgtatttacttaattaattaggtaaaaagaaaagaaagaattatcaggacagtacatgtgtccttaatagtaactctgttaagtgggtaccaacgacagagttttaaaagtatgattttgagtattcatgctgcaatttttaaaaattaggtacttattagcaacaaaatgaacaaaatgaatatttatgtcgcaaatttcccttaaaaatattctaatattcttccacttggttagtatttagatttatcacttaaacccaatgttcctctttatacaataaacatatgaatcatagcgataggtcctcattatatgacgagtattatcttccatgtattacgatatattcattacataacaatgtactttatgtggcaatgtacttaagcgaataaaccctacaccttatgtttgttcttgttaacgcagatttttgttaactaaattaaagcctattttgtgatggagttgcacaaaaataattgtagtaaaaggaaaagaaataactcaaagcttttttacgtggttttgcggttaaatttttgcatagtccacaagtctatcttattagatttctgatacaaaactagggctttttctctaaaggatttttcgtcgttttttcagtgtattccgcccctatttatagttacataggagggcagttaattacaatcagaatgatatcccacaacgataatcccctgaaattgtgggatttgattacgtcccacgtaaaataaatgcggtcgttatttgaaaatcacaaagctgtgattggtctgcttttaccaggtcaatgcatatgtgtattaaatacgtttcaaaatgtatcgtgctgggacatctcgctgggaacatagcaacaataaccctggtagggagttgaatcttttcccatgtctttccgaggttaattatgtaaatctcgttgtttttgcgattgaagacataaagctccatctgaccatcacatgttcttggtgacaagatgaacttcagcagtcaacatcatttgaatgtcagcttctatttgagagagctgact

SEQ ID NO: 71204 - DNA, 695 bp, Cannabis sativa
ttttatttcatcacacaaagtaaaattcttaaagaaagcaataatcacgagttatatacataagataccatttctcaactagttgatacaacaataatagaatattgaaaatcaacgttgccgtcagctacagatccattttgcataatttaaattatgtatatatatatttatagttaagatatcaacttatcaaatatcaagtatacctacactgtatctcaacagcaataataatccagtatagtagtgatgagtacgtaggtatgctgagagtgaataatagaataatctataataataatagtagtagtagtataaaagtgagagagagtagaaagaaagagaagaagagtacgtggtttaaggtaggccaaaagtgaaaaaaacacgtaatgagagtttgatagagcatagagaaaatggatataattagtaaatttgccttctcattggacaaacttggaaagcaatgagaaacaacaaaagggatccctccctgctttacccatctgcaccataatttgtcaacattcagatatttttggaaagcaacaacacaaaaaactacaaaaacccaatctccaaattacacgcaacataacacaaacacttattggttaaatcgaaacaaaatttactgttatcctttctctttaaaataataataataatttctcaaagaaaaaaaaaat

SEQ ID NO: 71205 - DNA, 1319 bp, Cannabis sativa
tctttcattctctaaagtatattggagtaaggaggtttggtctcatctcagcttgcttaaacattgctttatcctatggttagcaatgcatggaaggttgaagacaaatgatagactgattagaatgggaatgcagatggatgagggctgctgcttgtgccaggatgggaaagaaacaactcgacacctattttttgaatgtaaatatgcaagggaatgcctcaacagactcaaggagtggctgggatggagagtaagcagtgaaaacttgcctcacatcattaggtggatcgggaaatcgaaattaaacagaggtaaaaagcaaatttttgctgcttctgcagcatctctagtttaccacctttggacagcaagaaatgctctgatttggaaaggggaacaaccagtagcagggaggataaatgaagagatagaaaggaagttaaagatgagactcacaatgtatcaccctaagaaaataagcagccatgataaagaatggatacaatccttgtaataaggaaatcgacatagcagtaggggaatttcagttttgtacatagagtttgaaatttgaggcctctacttgaggtgcttttaggatgtagaagtgattgttttatggaatacaactcactgatttatcaaaaaaaaaaaataaataaatgttaccaatttaccaagttactattttttttaattaaagtttaaactaaaatattaccaatttaccaagttaacaattttttttaattaaagtctaaaataaaatgttaccaatttactaagttactaatttttttttagttaaagtataaactaagatgttatgctaccgaaaattcgacaacataacaacttaaaattgatcattcccaaatttttaatatctacaaaaaaaaaaaaaaagctacaaatacaataatatttgctatccatccaatcacaatatatttttcacagaacctatttcaatatagtgaatatataagatattcaaactttactaataggtattttcaggtaaattcatagcttggtatacttgcaaataaattgtataacaactttattctatggtgtatgagaaagtatacaaaagttatggatttgttttgaatatagtatttattttttttttattaacatattataaaaacatactaacctttaaatataatgaggagtgaattttttcaggcaacaagtaaagcgacactaaatatttatttaccaaaaaaaattaaaatataaaaaataatagttataattgtacaataatatacgtaatatatattatatacgtacacatatatata

SEQ ID NO: 71206 - DNA, 2036 bp, Cannabis sativa
  modified_base (443)..(446): a, c, t, g, unknown or other
attctatgtcacaatttctacatcattatatttttggaagataatttatataatgcttatatatatagtattacaatcgatttcttagtttaatgtttcgttgtcctcaaaaatacatagtagagtatttttttttatgatggcttttgtacgtacgtagttatgatatatttttttgataatttttttttaaaaaatataaataatttataataccgaaaaaataacataatatgtaaaaaaatattcaaatttgcatcaaattattaatgtgacaattgtgagataaaagagatctcaattcaatgccacaacacaacttacctactcaactctcataaaggcttgctcaaattaagcatgtgactatttctcattgtgaccaatctataattctataaaggttataggtaattaacttcattataataataataataatnnnnataataataataataattgaataaatcatgaaattttattaacaataattagttaaaataatagcatacaatttaattgaaacatttctcttgttagaatgtgaccaaaattaaaattaaaaaaaaaaaaaactaaataattagttgaacacttatattttatttcattcattcttcagaagacacaactgtaaaaattactttaacaagttcagcttcgtagcttgagcacttaactattatgtaaagtacgtaattgcactattaacaactcctttagtcgcaaaaatttattattcctaaccactaatagcgatataatggtgagttattgaagtacaaagaataactaacaacgaaacaaaataaaaccatgtcacatagacaagactaaaatacataaaactatgtaacacatacaagactaaaacactcaaaaccatatcacgcagacaaggctaaccgcaatagcaaaatacaaccccgatcaaaatatacctaagcctagagaaagatggcgggccaagtcggagaaaaaaataatattccatagctataaatttaggtagaaatttagattcttttatttatagtacttatatttttattattattattattattattattgtcaaagaaagaagaaaaattaaatagctaggtagaggtccacgtgtccaaagatgattcgttttcgttctattatatatatacataagaaatgttgagattattagggatcatatattataatatatggttgtttaattttactatataatatgtttgttaaattatagaagttttaattgttttaataattaagagatgaaagaagaagaagaagataatattaatggtagaatatgggactgtggtagtcctctatatgattcttatgaattggcttctatggctcatctttttcacaaccatactaacatcccatttttctcatcttcaacttctaatggccgccgtttgatcaacatggtacaacatcatcatcaacggaccagattcaatcttggatcatcaggtaataattgtaaaaggtataacaacaacaaccagaaagttgtagttgagaaaccaaaaaaatgtaaaggcttcaaatcatggttttgtttctcttaattaattgtattatattttccccttcaaaaaaattgtattatatttatttgatattagatcttttatattataatattataatgatcttgtatttatattttatatcttgattaattaacagaaaattttaatttaataatgtttttttatcttcgagaattctttattcgaagtgtgatatagttttgtattgtttcttcttcagcttcacttgcctttaatattttaaggcgccaaataacacattagataatgcaatataaatagcgatggatttttagtatcttttttgaaaagaaataaatttttagtattccttaataaaatatgcgagatttaaaattaaattataaaattatttgtagcataaatattatagtttaattctcggttataaataaatacttaagtttagtttttggcagtaattatagttataattatgtaactttt

SEQ ID NO: 71207 - DNA, 949 bp, Cannabis sativa
taaataaaataaaaaaaatcgttaaaatgtttaaaattctataaaaccatatttttgttgtttttttgttgttttgtgcatttatgaaattaacccaatatattttcaatataagttaggggagtacttggtgtatatatatatatcattcgtttggaatgtcgcattaggttgtattttattatattattattaaaatgaattatatatcatatttttatataatactatattaaattttaatttatcctagaatagttttacatacaaatattttaagaactcaattaataaagatacgctgtatggttgttgttaaatgaatcctttaaggaccaccactatgtttctaaaactccaagaactattttaagaacatgcatttaaatgagtgttctttaaaaagtgttctaaaaaaggcatatttagtagtagtgacactactgttacaacaaacttaaatttaatttttttttataggaatattatacgattttcaaaattgcccttttctttaataagttaactgtatacaagtatgaccaaataaggaatttttggcagctacataacattactatattatgatatttaaattaggagaaatgaatagtgctatatgaccattgattaaaaaaaaaacaattgtttttctcaaaagaagaatactaattcaaactccattatatacagtctactcaactgcatgttttacgtagactagtctacagaaaaccaaataatatcatgatcactttaattttcgatttcaaagcaaattattatatcctaattgcaaatagcacagaaaataataatatgttagaattattataagaagacttatatataagataggagtaggggtgttgataaaatagccgatccaattcaatccgcacaatccaatccaatccgcaaagtgcggatatccgcacttgtgcagatt

SEQ ID NO: 71208 - DNA, 1484 bp, Cannabis sativa
  modified_base (1083)..(1090): a, c, t, g, unknown or other
ccattaatttcagcgacttcacctcagaagacgacgagaatcaatcaaaacagggactgtttcaaattcatgaagaaaaaaaaagtgtagaacaactattacgaaactaaagtcaactagaaatccagtttaatttgcataaaactaatgtcctgacttcaattttcaaattcatgaaatgcatatctcaagattttgaattggagttcttaaacaatctaactcaagtataatccaaaaaaaaaattacatcaatactatagtaaaatatttatgatgggtgtatttttgttgttttctaaatttttattggagaatttgttcatattaaattatgaagagacatgtagatagagttatgtacgtaaaaatactgttttgatttttaatgtttcgtaattgcattacagttgcacaaacattttgctaacaattatttcgactgattgaaaccattctcttatgcaaccttcggccaaccacccaacaaccttcgtctgatgcaatcttcggccaatcacccagcaattatcgtctgattgagtaagtgatagtgtaaagaagtattttggtaattaaaagtacataaaagatataaatgttgtcaacaccttatgaaagtatttttgtaaataaaatgtcaatttgtattttctatgtaataatttctttattttgtattttaaacttttttttttaatgaacaaatttgattttctaaaaacccctatagataccaataaccatttcaaaaaaattaaagaaaaaaaaccgtataaatacatattttcaaacccttatgacacttcattctcactcactagaaacacggtgggtgactgcttttcctctctcgcaatttcaatatcctctggtttacaattacattacaataggctatctccatttccctccattaatgcacgctagccattgcctcagccctcaacgacaccatcttattcaaaagtcaagaggtttgttctgctgatttatatcaaatttatttttcttactaaaattttgaataaaaactgcagggtcatctagaatagaagtgtaccatatatatatatatatatnnnnnnnnatatatatatatatattttacactggattcatatttacgtttctgtagcatgagtttgaaaatatttatttagaaaaaatatattacaactttaattagataactgagtgcatattgcctcagaaagctttgacacattcgtaatgtctctctgttttaataatctattgagtgttattattattattattattattactttttcttttgattaggtttttttttgtttgcattttgaagttttggaagcttttaaagaagcttaatcagatatcaatagtaagttcattttattttatgattgtcactgaaatcatctcatttggtaaactgttcattatttcaattttaggtttaattgaactgagctgaaccgctaacaatggaaacccta

SEQ ID NO: 71209 - DNA, 1036 bp, Cannabis sativa
ttcagcattccttgaatccaaacactctcctttatggcctcagtagctatcataaattcaacttccatctagtagaaagagcagccacgggttgtaactgcatttttcaattaacacagttgccacatactaaaaattgatatgcagatattgatctttgagtatacttatctcctgtataattaatctgaatcactgaatctttcaatagtgatttctctatcttgatgtttgtacaccggtccctaatttgttgttcctaccaaatatctcattaaccatttcattgcttgccaataatcatttcttggatttgccatatatctactagtgcggttgatactatgagccaaaacaggtcttaaacataccatcaaatatatgattgatcctactgcaatagcatagggtatcttctccatctctttcttttctttcatagtttcagaactctgttagcttgtgacttggtactatgttgtcataggctacttggttggtttagagcctttcataacaaacttttcaatgatcttgttggtgtagcctctctaattgattgccaaagttccttttcttctgttcctctttagttttattcctaaaatcctttttgcacatctcaggtccttcatgtcaaattctgcacagggtatctccttgagattttcatgtcaaattctgtcaaattcttaagtgagcaaatacaagaaacattaaaattattctaaattacatttaattcaaattacataaaaaagtacatttatcggtaatcgaaactcaacaagataggaatattataagataaatgctaaggaatattttatggtgtcaaatatcaaatgaagttacatataattattggtacaaatcaatatcgagttatatacattttaatttaataaatactataattcatcgctaattacttgtaatacgccacatcgatatcgtattaatcttattggacactataaaatactcaataataatactcaaattataataatgtggacgccataaattaggattt

SEQ ID NO: 71210 - DNA, 742 bp, Cannabis sativa
  modified_base (694)..(717): a, c, t, g, unknown or other
tttttttttttttgagaaatttgtcttagagaacactacctatgagcatagcactcaaaggatttgagagctaaaggattcattgataattggcatctgccaaaataaagttttgaatacataatgagtaatcaggccatgatattgtactaatagtagctttcaaagcagaattagcaagctaatcaaccactacattagtagatctagggcaaaaatttacaactcagaagaataaacttggtacataaatgtctaatatcatcaagaattaaccttagagatgaatctgaagttaaagaacaattgagtttacgaaccaagcattgataatcagatctaaactaagaattgagaataccgaaggagatgcattgagtcatagctttttggattgctagtgcttctgctcgttctagaattgtgtttttttgttcttcaattatgtttatttgtcttgatatatctaatataaattagacttcaaagaaacctttagccctgtagtcaaacccgtcaccattcgagtggttctcactgttgctgtatttagaggttgggatataaagcagctggatgttaacaatgcatttctcaatggtgatttgcacgaggaagtgtgcatgcaacaacccctgggtttgttcttccaaatgcacctcaccttgtgtgcaaactgttgggttttatgccnnnnnnnnnnnnnnnnnnnnnnnntcagatttacttattaataaatatc

SEQ ID NO: 71211 - DNA, 2048 bp, Cannabis sativa
  modified_base (365)..(369): a, c, t, g, unknown or other
  modified_base (1334)..(1336): a, c, t, g, unknown or other
ttatggactatattattatatggtatgcatgttttgtcctttttcaggtgtgttctgacaagtcggcacggtatagtcaaaactaggtattttgggtcgaaccgggttcggggccgaaatacaattctgggataaattgttggcattttatttaagtgttaataatctgaaatttatttgagtatatttatgatgagaatgaccattttgtcctcgaatgcttttaggtgtgttatatggccctaggggcattatagtattttggcatatttgtaatatttgtagtaaatgggattatttgcaaaataagggatgaattttctagttttcttgcacctcaaacccgacccctctctctctctctnnnnntctctctctctctctcaaaacctatctctaagtttgtgattttacttgagaaattcttggaattcaagattggattttggtggtgcttaggtgtaatctttgcttgaagcttgaggtagctcttacaactttgattcttgattttaagtgctcaaattgaagttgaatgttgtgattttgagctttagatgttcttgatatgcatgtatgatgatattgggttaatcttggtacctcatgtgtgattgtgttaaaaaatcaatgttggatgcttgggtaatgttttgagatgattttagggactttattatgtttgtatttgattatgcagttgggaattttgatgaagtatttaagttcttgaagttgggttcttggtgaatcatgctttagttgaagcttatgttttatgttgttaatctgaattttgagggtttatattgttgggttttaatgcatgaatttgtgttttaactctttgattaattagtgaaaaacctatttgatagtttgagagtttggttaggtttttaggcttgaattggtgtgattttgcatgtgaattcgaagctgaaattgagattttctgggttcagtttggaacccaagggccgcggcccgcctctgttgtgtggcttgggaattgaacccaagtgtcgcggtcccatgtgggagtgttgtggcccgccctcttgtttatgggcagagtcaaatgcaatctttgaatattcataactttgtgatacggactccgtttctggagttctatatatcgttggaaagctcgtttcgagccctatttgattatttgtattttgaatgccaagtttatattttttgaaagtggatttagggattaaacctatatttgtgaatcctggaagtgtgactaggattaccggcacttggtcaggagcacccggggatttggaatctccacacttgcgggacatcaggtaagacannngttagcacgtagagttatgcacggcggtgcttatattagaaatgatatatatgagtaattagaaactgggattagggttattaccctaatataagcggtttaatggcctagggttattaccgtaatgattgataatgtgtagatgccatgccatgttaattatatgtgtatattgaaatttagggttatgcgttcaaggcataatcaggttggactcggtgactagaaccaatatgaaccattctaaggccttattgtatatagacgcgtgagcgcaacacgtaagtctatgccacatagacataaataagcatgtgagcgtaacatgcatgtctgtgtcatacaagcaaatgtgaatggcattaatgtttatataatgtgataattatgattagcgatattttatagtgtcttgttgggcttggctcacgggtgctttactgtgaaggaaagggtaaatctgtctctgatcaactatgagtacaagagctggatgatgtatgtacatgttcgggccacactagaacaagcgggttggggtctaccagtgatgaatttttgtaactctgttttaccgcttaggtcgggtattgggaaaaagacttgttgtaacgccctaaataattaggcacgctacccaaaatgattatgaaatcctaatcccctaaccgggattactaattaaaaacagcgcagaatttaaacttttata

SEQ ID NO: 71212 - DNA, 1615 bp, Cannabis sativa
tcttcactatgagtcctatattatgaattcattatgaattcttcattatgagtacttttttcaaaaatgaatagtgcaatgataaaactttggcctctctttcctttaatgccaccctcttggcctgacaatcatctattagaagcctcagctcaatacatgaggttctaaaagcttaaacaattatcaccattgataggaaaattgtattttgttttagatcactttcctaaattgttttctcagaaaattttctagcttttatcaaatcattttgcaaatctacaataatagaggctgcaacttcagtgatgttctcaaaatgcttacacagaacttcagcctttctggtagcaagcaacatcatctctgctactttaccatacttactgcccaaccagttttttaaatcacactaaaagaatatgtctcagttttttttcaatgtcaggaggaatactaagctccaataaattgtcactcaccttgaactgtagttcatttgtagcatctgtacaaacaaataataaactcttcaaatcatattctaacaaagcaacttcaataccttgttcttgtttatacatctccaaacctcttagtttctgttttaaagactcaatgtgttcaattacaaccatgatttcattagttatttgttattacacattcaataaagactataatgacataaattccgtgaaaacatatatttttacatgaagttttcatatacttatagttgtcctcttaaccactctgtttgatatttcaattgatcttcttttaatcaatataatcagttctattaattgttaaacactacacttacacatgacaatgttcgtaaactatattttaatatcaatgtcctaatataggaaattaacatagaaggtgtgtatatatatattttataatatataaaaaaaagttattctaaccgaagggaatagtcccttcggttccaattattttttccacttttattattacatcctcttaacaatatttaataacaattataacatatgagattttatttttttggttattacgattaaaattatgttttctacaattttttattaatacaaaattttcttgttttcttcttttacaggaaatttttaagttttgcaagcagaatgtatggcaattgtggtcgctgtggattggattatttcttcaagattagaaattaacattgttgaatcttattgtttagcagttgtttctgctttttataatagccatgtttatctaaatgacttcggttccttattagaggatgttgcaattttgttctccagatttccaagagtgtccctaatccatgtacatcgaacggtcaatatggctgcacatggattagctatgcatgctcttcagatggatgagcaaattgtttggctagaggactatccttcctttgtaacttttgtttagtcttttagcctgtacaacattttttggattttcaatgatattgatccaaaaaaaaaaaaaaagattacaagaaaactaaaatctagttgaacaatttaggtttttacaaagaaacactcttctcacaaaactaagatatgaaaatatgagactagaaaagataaaa

SEQ ID NO: 71213 - DNA, 1035 bp, Cannabis sativa
tttttttttattttaacaaaagtcaagggtaaaatgggtaattaaaaattgaaaagtaaagacacaaactttcaaaattaaaaaaaaaaaatgttgtaaatcaaaatatagatcccgctcaaactcatactaacccaactcaaaaaatcattttcagaacagagaagagaagagaagacgacaataaatcattttttagggtttttgaaagttcaaacttcagtctttgatgatttggtatgcaattttaacttaaagttttcacctttactctttgattgttctaattaagactcgaattttattttattttattgatgtgattataaccctaatctcttcttctctgtttcagactgagaccaccacctccggccaagaagatctggaaatttagagattggaccattctaacgggttcgaattatttgttttactctttgaataatatatacaggtttgcattaacctttcgattgttctgttaaaaactagttagttcataagaagaagatgattaagttttcttaaatttaaacaatggtttttgctgagtatgattttttgctttatttgtattgtttgggattatatgctaatgtctttgatgatttggtatggtgttttaacttgaaagtatttgcctttactgattgattgttctttttcgacttgaatttattttaaattttttatttttttgctgatttcttcaggcagtgagctatttggagttggtttttgaaattatttcatgtccgccgcctcttctcgccgtattaaagaccggtccggcggtactgccggacccaaaattgctgcaactggtaagtcctttaaggcaattactccgattcccatttctgacagtaggttttctactggaaaggagaatgggtctgggatcacttccaaggttcagaaacctgctatccgacctgtgacacgtgtagataaggcttttgtgtctgggggagtgactggaggcgatgctcggactcggtggtccacttcgtcgtctgggccgagaggtcg

SEQ ID NO: 71214 - DNA, 977 bp, Cannabis sativa
ccgttaaaaattattaggggcgtgcgcgacatgtcaccccctaaaaaaattgactacaattattagggttgagatgagaaagttgcttctagtaacaggttattacagagataaaatgtcactcctaaaacatatttttcttgtagtgagtttagaaagtcgatgcactttgcgttggaaaataagaagaatttcagagagaatattaacttgtgtaatttgtgacttagtataaaatgatgggattacatctctatttataggactctatggactaatctagaaatattattaattggctagtttttacattattctacataattctctctactaacacaagtgaaagataattttagaaaatttaagaatactcaaagaaataagaaaattctaaacactttagtaatgataagaatagtttaaaaacttttggtagcaacaagaaaattttagaaattaattatattaaatcaagaatatatttcaaggtatctagtgtaccaactttggcactctaggaatgaaactttttggttgcaaaagctggcactctcggaattaaagaaagtgtcaaaaaataatagaactatctattgttggccaaattatcttagtgatgtggatagaaattgagttgattcattatagcttttttgtataggtgaattgggggtatggtttcttttaatattttgttatttttggccttttaaaatctttctattagaaaaaatgttgaagataattcagtgacgtagttcaaattatgcttagtgacatcactctcttacttttagtttggtaaagatacaatttaatatttatgatgatgtccaatacgtactatataggaaaattttatataatggaattcctaaatggggtgcatccgatacatttttatctgttttaatatctgaaataatattttagttaaattttttcttataattatgtaaattatagttatttaa

SEQ ID NO: 71215 - DNA, 1302 bp, Cannabis sativa
atattttcaatgtagaaaagtattagtttagggaaaaaatattaagtatatgtaagtatagaaaatcaaattttccttcgtaattgacctaaaactacctaatgggcagtaggatgagaatttcattcaggctaactttaatatggatgatgctaatcttattttgcaactcccaatatacagattgggaattagaggataaagttatgttgcattatagtaaaagcgaagagtattcgattataaacaagtggttgcttggtggaaatttttgtggcggttgaaagtctcccaaaggtgaaatattttgtgtggaagcttgctcactcatcgctcccaactaatgtaggtctgtcatcttgaggtattaacactgatccgtcttgtctgaggtgttcgggagaggctcaggaaaatatttttcatgccctgcggagttgcaatttggttagacatgtgtggaaactttgtgaatatacaaaacagatgtgaagacttggaaacgaggatgttttggaaacgagcatcagtcgttacatgtgtgtaattgctagccatacatgctcgtttgcaaatgggaatccaacaaaaatttcgaaggtttcgtattgagtccaatcatcttgaagctattcaattaatccaatgtaaggaagatagttgcaaagatgttgatagggttctttgtcatatacgaaacatgttattatttgattttgttcttgggacttcatttgtacatcgtgaaattaatggggtagcttatactttaaccaattaaactttgttgcacaaaactagcgttacgtgaattggagttaatactttttgtacaaatctggctttatagcgagatttgccaaatcctttataatctttctttgaatgaatagattgggttaaaaaaaataataatgtaacatttaataatgatgtaatgtatattgataaattaataacaatcaagtcatttaactcctaaacttttttttttaaaaaaaaacatttaagtcctaagttttttatttatttattttttgattaaaaatatgtaagttacattagtattgattatcttagctaattacagaaaccaaaatgatagaatattaaaagtcaaatttgttagaatattgttattgcacatcttccttttctattatagaaaaagtgaaacatctcactattatttacattaaacattacataagtttattaaaattcacttccaattaatcaaaagaaaaatcacataacgtgattaatgttgaaatcttttcttataattgcaattgtgctaat

SEQ ID NO: 71216 - DNA, 2382 bp, Cannabis sativa
caacactatatgtgctgtttgaggatgttataattttattgtctaaattcttgggggtatttttgtcccatgtggctcactataagaattctgcagctcatggtttggcaaagtatgcccttcgattagacggtgagctatcttgattcgaggaggtgtcgccgccaattgtggattgttgcatcattaatcatgtgtgattttgatcaccacgtaaaaaaaaaagaacagctaaaattaggggtccttacatagatatggaaaaaaataaaaatagtttacataaatatggtaagaaaacttaataggaaaaaatatgacatttaaaataaaaacttaacatatatggaatatgccactttgaattaccataaaaaatattaaaattctctttacgtatttatttctaataaaaataaataaaactacagtgatcacaccgaagttgtcactgggtccgaaaagtcgtaagagtagctgctggtgtcagaaaagtcgtcggagttgctgccaacaccaaaaaagtcgtcagaatcagaattgtcactggaaaaataccaagaaactggtttcttcatctcttgatgaagaaaccaatttcttggtgatttttctggcgacaataccaatttcgacgacttttccagagtttactgttggtgccgaaaaagttgttagagtagctgccagtgtcagaaaagtcactgaagtttcatcaagaaactagtttcttggtgatttttttgataatttttctagcgacaatgccaattccgacgactttttcaaagtttgctgtcggtggtggaaaagtttcttggtattttttcggtgattttttttgcaacaatgccaatttagacaaattttttggtgttggcagcaactccatttacttttctgacaccaacagcttttctggcatcgacaacaaactctgataacttttccggtaccagtgataaataaaattgcctaaaaacaaataaaacattaaatataggctttgaaaacctaatttacatatatatggcatatcaaataccataaaaatacttaataacaaaaaaatgtcatataaattggtcaaacctaaaagtatcatatttaagtaaacaacttttaaattgcgtcagacacccaaagcacagtaaatgaggcccacgaatcaagttttgcagaaatgacatgtcttgcgcatggctttcctgggctgcttctcattcatgggcttttgataattttatttttcattttgggcttcattttttttataaagagagttagttaatattttataaaagttagagtattaagcgtgtctaacactattatgagacgacattttaaaaattgctaatgttttatattaaattatataaaatgtgatacttaattataccaataacaatataatatgttagaagatattaaacaccactaatatcttttagcatttctcatttataaattcaattaataaatataactataagtaaatttatatcaacatacttagtaaaaatatattaagtctattatatttcaaaacatataaatagtagtagattatagtgtgtattacctctggagttagtgctgtaaatatgggtcgtgcattttgacaagacacgaaaccgacacaagtacgactaagtatgaaaaaatataaaccgacacaagtctagtaagtttattatcaatgtattttcttctgccgatgaagtatttagacaaataaaaaaataaattctatgactacctataaatatgacaatgaggtcacatgtaaaggagttcttctctttctctctctcattggtattaagccaaattactgctaaattttagatagagtacttcatcttatttatttctgactcatgaactaaagttcattaacgtcctaactacgtaaaattcctagtctccatgttctcttttcttttctagctctaaatcttcatttatttaattagttatcgaaaaccttcggtcaacaattatcatttaacaatatagataaatagattggtaatttttacaaaaccgaaaataatattgactgtttttaaattttaattcatattttaaaaataaaaaataaaacaattttattacacattttttcaaattatttatcactcttttaataaaaaaaataaactactaatatttgttgcacaaacacatacaaagttttgttattatcattttaaaaaagctttgaatcaaaattattttcaccttgctgaaaaaattaattttatcaaaaaaaaaattataaggaacacatacatacataggtccaatatctacattgctccaagcacctaaaagtgacaaataaaagaatatatataatatatatatgggtgacta

SEQ ID NO: 71217 - DNA, 1091 bp, Cannabis sativa
aaaaaagtgaagctttattagcaaatattctttatgattgcataaaaaaaattaggagagaaatcttcactcttaaaaacacgatcagcaaccaaatatttagttctagctagaaaataaaaaatgctatttgcagactgtttaacaaataaaatagacacatcattaacacaattcaacaatatcttacaatcatcaattacggtttcaaaataggacaccatccaaattaaacttcttaatgcttgaaccacggtatgataatctgtttcgataatcactcgactctatcttttctttttgatccaacttaacgcttcctgtacacccatagcctcttcgatttcaagcgatacaaagccttctctgcagcatgtaacaggctaacatcctcaaaaaaccagccctgtagaagtctgtgcgacaccaacaaaactgtaagtgttagccgcagagaagagcgtctcatcaacgttaatcttgatcacatctccatgtgatttaatgtttaatatctcatatctttaaaataaaagtattttcttagttagttcaagaatttgtattacaaaaacggtagatgagagaaggtcttctattttctctctagagtcaaccgcccttctcttcttcctgagtctccttcttcctgagtcagcctgtttttgcttgcctaccttcgtgtcatccctgtccccttttcttctgagttttgtttcgttgcttttgctttttctttcaggagtttttgtgtgtccctttggctactgtgtgcgtgtgtggtcttgagtgttagttttaagttttcccttgataagttgcctctaggagtttgttattttctgttaagtgttaggtaagtttgggttggtgagtgtccatttgttcctgttgcagttcatttattgctctgtttcttggaccttttgtcccctgtctgctgatcattatggagtcttttactgtcgccagctctcctctcaagggtaagaatttttcatgccttgaaacatctatcaaactctctccgtgtccctcctcggttcgagctttagctgcttcttcgctgtatgggaaagttattgctccca

SEQ ID NO: 71218 - DNA, 857 bp, Cannabis sativa
acaaacaatacaatatcaataaataagatataaataacaccaacagatcaaataaatatcaacgtatcaaagcttcagaagattatatacagcaaattaataatagccattatatgtatgcttcataaactcgtaccaaggtacaataaacaaaatactataagacataccgtgatcgacgtgagcaataacggacatgttacggatgttttctttaagatccatgatcctacgcaactcttctgctgtaaacttcacctgcaaataccaaaattattgtctgttaatattcaaatcacaagagccaaagcaccatttaaaaccatttaagtaaagcttttttcacagggcacttaccattttgactagttttcagttacccagatacaaatatacctgtccaataaaagcaatggatattagatcaataaaaatgattaacaaacagaaatacaattatcatgaacattatttagtgaacagcctaaacattctcacataccaaaaacagcaaaaaaaaaaaaaacataaaaacaaaccaatgaaattctccttccaacaaactaagaactaaaataaaaagataaaccaaactcagtctaaaacccacacaaaaacataactcaatcactataaacaattcatatgataaatcaatatacaaaaccctagctaacaattgtcaacgaaaaaagaaatccgattgcaaatcaactaaagggttagctaaaaaaacaaaataaatggagctatgctgcaataaaactaaactaatactaatcagactctaatttcaaacagatccaaaaaagagagaaacaaaatccagatcttaaactaaatcgatcgaaaacatg

SEQ ID NO: 71219 - DNA, 1808 bp, Cannabis sativa
aaattttaatgttaatttttataactacatagatattttacgtataacaatataaaatctaattactcatccaaattaactgaaaataataattagtttgattggatgttggatgtattagatttttggataccccatccaacatccgatccgatccaattggatattcaaaaataacatctaatccgatcagatcacaattggatatccaatgtttagcggtcgattgtaattggatcggtcaattatcattggattgaatgatttacgcacacccctatgtcctaatagaaaaagtggcgccatcctgtctagacaaaggtgacttccccaaattatttgatattaaatttaataatatttactataaaataaataattattatttctcccttgaaaaataaattctccttttttttttttaattttgtgacattcatgtctttggtgtagaggccactcatgaaccattgacctataattctaagctccaataaattaaattatttattaaacttgtaaatacaatatttttattcattagtttcattaataattactccagtataaatatgatatcgcactactctttgttattatataattatatttactaaatttattaacatcactccgttgatataattaatagttataattggtcaaaattatcgtttgacccttctaattataatctctttatccttagtactattaattcactagtgaaagtttttatatctaatctaaatttctcacaacttttagttccataacactaaaaaggaaattaatattcgatctattaggaaagtctagattttatcctataaatcatgttctcagtcatacatattattgaatttccaaaacaaaagtgtaagtttcatttactacaacaaatatgaatattaggtgtgagaaaagttgcccctaaaaccatacaaattttcccctattagttcgcgcctgaaagtactattgggggtgccaaaaaagttgcccctaaaaataatgcacgaattttttatgtttacttttaggagatattagttttatggtactaaatatcaggtacacaacgcggaagaattagtaaatctgattatcattgtaccatagactaatggatctccggatgtataaacattaaaccagaaacataaattacaagaaaggaatatatacctcttgatgactactagggtatcctcgaaaattcttgtaagttgtatctatttggttgattaaaaaactcacaccgtagtcttccaaatcgatccaccacacacatggaataatgtgggttattaggataaagtgtataatttgttcttgattaattctcaacacatgagcaagagctatttgagagagaaagctattttccttttctccttggtattttaaaaatatcagtgaaaaaatcctcttctgatttctgaaattaggcttctatttataagatttaattttccattaattaaatcatatttaattatttaaataaatagctataaccgaattcgattactgatacttcagatgactttgagggaatatctcaaccaacttaaaatatctttaaccacttttttaaattcaaatatttatctaattgaattaattaagtatttaattaatccaaaaatataaaactaaaatggacaccctactaccttgtcttaattaagacaaggatgttgtcttttttcctgaaaacttttgtctaaacaattattgtcttaaaaacttttgttgttttcctatttaattaatttgaaaatttatttatttattacaaaaat

SEQ ID NO: 71220 - DNA, 1078 bp, Cannabis sativa
cgacaccaaaagtgcaatttgtagtagtgaaatcacactaaaattttgcataaattatacattttacctctcccagctcctacaagtaaagcaccttagtgatgagacgtttttcttgaggaagcatgcaacgaagttcgggaacaatcaacgagtaagtaaagttttttgcttatttttgttgttcgttcttatatttagtttagagtgttgtttggatgtttgagctatgggttgttgttgtgttttgctaatttttgtgtggaattggttattgttcgagaattctgcatattttttagtttctaggctttttttgcctattctgatgtaggcccagcacttggctaaggcaagctaggcccgtacttagagctcactctaacccagggtccaaaaattttatatagtatatttttttatattgaaaaaaatggtatttttgaaaaaatttgtaaaaagaaggccaataatactcacattttacttaagataaaatacacacttaaaaaatttctttgacccattattactcaaggttggccctagtctgatggggtccaatagtggcacaatagtagtttgatagtttgctcagatccaaggtcaaaaatgatttcttgatggggtccaattgtgtgcctgatggtgtgcaatggttgttcatttttaatgtctatttaaaggacccgattaggtccgatatatgtttcatggtagttcaattttgagatcagtgtggaggacctgatgtagttccgatataggaccgatagtgtgtccgatggttattcaattttgtggtatgtttgaaggacatgattgtgtcgaatatacgtcaggtaagggtccaattgggttccaaaattactcatgttcatgaattatttgttctggctaatgattttttcttcttaatactattttttatatctgtgaaagagaggttcaactatttttgcattcatcacgtataatagtatttaggaacttgagggtaaagattgagtttttagcagagcttcatgataggtccactttattcttagatttaattttgtgcatcaacaacttatag

SEQ ID NO: 71221 - DNA, 1950 bp, Cannabis sativa
tccctacctaataggaggcgtagggtttaggtgagataagcccttatccttccttgattgatgtgatagtacattatgaagtcatcaattacatcattgattagcgtgcaattgctgaagaatgagtttaatgcgtttgacatgactttttgcgttcgtccttagacatttcctccatactgcattaaatgctaattgatagtacatctcctgtaccctaagtccagaggagctggaggctacccagctcccggaggtgaacaaaagatggattcctctagatttaatcacaactctaggaggaactgttgggttatcttaggggatcctgcccatgtaacattttcctttgtttatctctgggtccttaagcctaatctccaaatgtcgtgtcgtgggattgccacttatattaggagaaatctggagctacaattaccccccatgtcttattcaatattttataaatgagactttgtatattgcttctgttctcagggagtgatgtggcaaacaccttacgcgtgcgtgggccatttaatattcataatgattttgcctcatttttggcaggcaatgtttcgattctcacctgtttgatagaccccttcattaatgcagatgtcagagaggtactcaaacgctttaatcgcctttttctcttcatctcgtgattttaccctggtcgttggatccatagaatttaaatcggtttgaaccctcaccatatgatggcactcgatcaatgttggctcttaccctgaagggcctataaaaacatgtacctcttgtggttggtctgcttacacactacatttcaatttataggctttacaaccctctcgacaaaattctagacttctcgacttccttttactcttcctccgcccttgccaggcaaactactactatcgtacggtgacttctacctctacattgcctctatcgtgtaagttcttctttctttttacttttttgtatagtagagcaaagtgtgacagatattgattcattcttttaaaggaaattgtatgcatgtttttcctgggtaagccatggcgattatccctggaatatcttttctcagaatgtctaatgatatttttgtctttttcttctctctcttttttttgaggggagcaaagggcaagaaacccttcgtcccacattttcttcatgtgaatatttcatatatttagggtttttagcaaattgaactatcttcacacattcccactcttttctcttgatttctctatattgcttggacgttttcgcacccgatgtttaccactaagaatcattagattccttttgtcattcatccagagggggtctcttcccaatggttagaggaccctcattcccctttttgacctagggtttgatttgggggcttactgctggatttcttttctttcagagtgaagttctctaggaccttcacaaacatggtttctttggattcgacaaaaaaattcttgagcaccattagcccaactccatgtcaaactctaatgtgtccaacaccagatcctccacaaaggtgaccaaggaacttgccacactagaagagcttttgtaaggccttattgcctacaagaaatactcttgtcgctctaatggttgtgaggctgatgaactctattagaccttgacttgtgtccatcaacaagagaagatagtggttgtaagtgtgattaaaccatccagttctagagtttaccaccgtctccctagggatgaagagataccgaaccataattataatggttttggcgccttgagccagacccatctcatgtttagagccaactacccctacatgactacttcattaactttttagtgcttgttggactcgcaccatacaaattgatcccaagcctttcgcctaatttcagccctttttattttgtatgctgctaggggttgggccgctcccagccc

SEQ ID NO: 71222 - DNA, 3136 bp, Cannabis sativa
ataaaacccaacaagaattacatgaaagattcaatgagaagaatgctccaaggattttcgaggcaaagaaaacgatgcaaagtgtaactcagggatcgtgcacagtgacaacttattttactcgactcaagtcattgtgggatcaaatcagggaatatagaccacaacctgtttgtagttgtgatgctatgaagattattcaagaatataaagataaaaacaggctgttagagtttcttgttggtctgaatgactcttacagcttggctagatcacaaattcttatgcgtgatcctttgtcgagtgttaatgaagcctatgctattgttgttcaagaagaaaggcaaagaggcttaactaatagtgttagttcctgtactgaaatagagaaaagcaattcgaacactgagggccaatttgctggaattgttcagccatttcgacctaagttttcttgtactaattgtggtatgtctgatcataccatagaaagatgttttcgaatcattggttatccatcaggccacaaattacatgggaagtttcctaataggaattctaaaggctcgccaatgaaatcagcttcagcaaatttctcaggaggagatgagcagaagcctgagagagagttctaatggagaaaaagacttggtttctggattgtcaagttcacaatgtcaaaaattgatggcaatgctggctcaaaaggttgctgacaatgctgctacaccagaatcttcatcagatcagccaattgtatctcatttttctggtatgaaatcgattacctctttttctaattggattatagatactggagctatgcatcatgtatgtttcaatctttctttatttcagaatattcataccaattccaatcttaaatatgtccttttacctactggtatgcatgctaaagtggacagcataggaacagttattttgggacctgatctggttctgaaaaatgttctttatgttcccacttttagatgcaatttattatctgtcaatgctttaacagccactactaattgcacatttttttttctcatgaaaaatgtgtaatttaagacactatgaagagcaaggtgattgggatgggtaaaaagtgtggtgatctttatttgttgaattgtaatctgtcgaataatgagcagtctggttttgtatcttcttctatttcagattctaccatttctaatgaaaatgtatggcactacaggttaggccacccatcatgtgtaaaattttatcctttaaataaagtcttgaatttccattctcactataattctccttttcattgctctatttgccaccatgctaaacaaaaaaggttgccttttgtatctaatcataatattactgagaattgttttgatcttattcatattgacatatggggaccttttaatactttgacaactgagggttttaagtatttcaataccattgttgatgattgttcaagatacacttggatacatctcatcaaacataaatgtgaagcccaaattgttatccctcaattcattaggctggttcaaaattagtttaataagactattaaaggggtaagatctgataatgcaaaagaactacagttcaaaactttgtttggtgagcttgggattatgcattatcattcttgtgttcaaagaccccaacaaaattcagttgttgaaagaaaacatcagcatttactcaatgtggctagagcatttctttttcaatcctatgttcctttagtttattagggaaagtgtgtgtcaactgctgcataccttattaattggacaccaacacccaattaaagaacaaatctccttttcatatacttcattccaaaccacctgcatatgaacatctaaaagcctttggttgtctagcttatgcctctactttgagtcaatctaggtctaaatttactcatagataagctccttgcatttttcttgattttctacatggagacctaaaagaagatgtttgcatggctttgcctcaaggatataagccaaagggggagctaccacccaatcctgtttgcaagttgcaaaagtcattatatggcttaaagtaagcttctaggcaatggtttgccaacttttctagtgctttggtggatgagggatttcaccattcagcaaccgatcactctcttttcatcaaacattttaatggaaatttcatattcctattagtgtatgttgatgatataattcttgcaagcaacaatcttgaggaacttcaagccttgaaaattaggctaaatgacaaatttcagctcaaggacttgggaaatctaaagtattttcttggcttggaagttgctcgatctgagtaaggagtctttgtctctcaaaggcattatgccttacagttgcttgaggatttggggcacttaggctgcaagcccatgaacacacctatggaacctaacctcaagcttggataggatgaaaaagagaaacttgcagacccgactctctttagaagaatagttggaaaattgcagtatttgacaatcactaggcctaacatttcattctcagttaaaaaactgagtcaatttcttgcaacacctcaggtaacacaccttcatgcagctgaaagggtgctgcaatatatcaaaagcagtcctggtcaagggttgttttttgcagccaaaactgaggtaaagttgcatgcctataccaattttgattgggcatcttgtccagacacaagtaggtctaccaccgattttgtattgtgacaacaaatctacacaacacatagctgcaaatcctatgtttcatgagaggacaaaacacattgagattgattgccatttagtaagggaaaaagtctaagaagggattgtgaaaacagtaaatgtttcatctaaagaccagctcaccgatattttaaccaaacctttgtttccttctcagttcaagggattcaaagacaagatgggacttagagatatctatggtccatcttgagggggagtatcaagaagtttttagtagttagtttgtaatgatcgcgttagtaatttgggttagtaaaggcaattagcactaatttctgttattttataattatttatgaatttatttaattgtgtaccccaatatttagaaat

SEQ ID NO: 71223 - DNA, 812 bp, Cannabis sativa
tatttattttgaaaagcagattataatcggaaaagatatcgagatgatgatcgtcgttatgagagctccaagagacactccgacaatgactcacggaagaacactgatcacgaaccccgaccggtaatttctagtgacacctttcacctttatttcctcaacaaagtttggaagctcatcatgtttagtgtttatttgttaaaactaagatggtaaactacatttacccacatataattaatataccaaatatgttaatcttcactgttgaaaacggtttcaaggctgaaaaagccttttaaaacatgtttgacatagatgacagtgttcaaaagaaatgtctggttaaaaccttctatcatatgattatctatatgattggccgcaggttgcacttatctttcttttttcttcttttgagatgtgttttccattcttggttcgtttaccttaaatttatttggttccgcaggagaaaaatccgaggtttcgcgagagcggtgactccgatgatgaagaggaagatgatggaaagcggcgaaactagcaagattcattgtcatcttaccaacaacttcaaaacattaaatttttgttaatttttatagcttagtttgtgcatttggtcgtgttacagtaagcaggcgattaactgagactatcaattatgtcttaacacagtgattttatgccaaatgaaccaaatccttttgtttccagattattgctgttcagttataagtactcgagtcacagaaatccaagcactttgtagtagaaatctcctcatttttctattaaagtcacttgta

SEQ ID NO: 71224 - DNA, 2519 bp, Cannabis sativa
ggtaaaataatttccaacaagggccatacgccaagcaaggtgcaatgctgttgttgcatcctaatctcaatgaaataacaaattattatcacatctgcctgacccaacttactcccaaaagcataaagtatctttatgccttgtttgtgttgtacgtttcccaaggatggggttagtcgtccactcacgacactaattggttgtttgacttgaagtccaaccctaaatagaatagatctgggtacttttactttttttagatcaaacataagtggttttccagtaccccagacacagacatgtccaaaaattggtggatttgtagaagactacaattttgtcaaggacatgggcaccaaccatactaacttttaatacattctatcttactgccgaccttatttcaccctggaacttatgaaaagagcccaaaaaatactctaacttcctaaagaggctcaaaatatctcactcttggccactaaggccaattatattaagtacgggctccatccatcatatgaagtctaggaggtcgagcatgtgattgaggaggtttcacccaagcaagaagcttcaaaaaagaaaaataagaaggctcccttctgagtacctattgagcgacccattagaatcagagatgatcctgaagaggctgctcatcctttcgtccaggtggaaggaaagggaaaggttgttgtggtcgatgaagaagaagaggactcttctaatgaggatgctccttcattacttattcgagagggtgctcctgttcacgtgcagggtagattatttttacttcagatgcttgttgtccttacttgattatgttttctaacaagtgttctttctttttatgcagtcatgtcgtagagtattgcatgctcttaataagaggtctagtgatgcctctggtcaaaaatctttgaacaaatgcccgaaggtagacgattctttgccaaatattatcaccctgagcactaaaactcctcagattaccactaagagacccctagctattgtctcttcgaatgttcccgaggtggtggtctctgattctatttttttgcccaagaagaattccaagtctcaagcttctactgctccagccaaaggctctaaaggggcaagcacagaggagctcgagctgccaaagccattggctactctatccgtactccatctaaagaccaagaaggataaggagatgctcactttctatcaggattgagtgatgtctgaggtgaatgagcaacttgctggggtggagaagatgtcaacggagctgctattgggaaaatgttgaaggaggcccccgtgtaagcacttttccttccattattatgtacaggttttatgtcgtgcatgttttaaccctattttatcgtgtagcttaattttaagatggcatacacttattcctgagctaaatttactgctctaaaagtcataacaaccaccatcacattgaagacaacattggaagatgccaaaaaggaggttgagcacaagactttttagctgggagaagcaaacaagaagattgttgcctcggagaagctcatcaaggatcttaagcaatagattgaggatatgccatccacaaccaagcttgaggaagacttgtatgtaatgaccaaggaagtgaacactttgaaggaagaaagggaaaacctccgtattctccttcaaaataaagaaggcaaagccaatgagcttaccaaagagaagaagactctgcaggagactcttaactgagactcttgactctaaacagaaaacctttagtgctgatcgtgcagctttcgatgctgaatgggaggcacttcgaaaggaggttgagagctttgaattagctgccttggatgtttttttatgagtttgtaaggcaactctagaggctaactttgattatctcaatgacaagaaggatgcttatcttagcttctatgaggcacaaaaagccgatgaagaagctaagatggttgacaacaactcttctaccgtccaagagcatgaaattcctgtcgctgaagacttatccgattagtataaagagcctaggactcctgctgtttgatatgttaaaacttttttcctctgttttgacctacgagcctaccttttagcacaagatggttgaccaggcaacttttaaacttggaaaatattttcattctattcaagacaactggctagccaggtagtttttaatcccgaacttatcttgctttgttatctcaatataaatattttcttttaagtctaatgttttgttttttactttttgctttgagcttattttttacctatgcttgtacaggtatagttgtcccccaagtgaccgagcaaaatttagactctgggtcacttgtttttcacaagttttattttgtctttccagttattaggtttaggcaaaccctttatactcactttaggtaattaaataacttactataatttgcaaaaaagatataaaattggcacaatttgaatgataattaatatcgttattc

SEQ ID NO: 71225 - DNA, 1576 bp, Cannabis sativa
catcaatctatgggatcatcacttcaactaaacttacctgttacctcttcggaagattacggcaacttcttaggctttgcgttatgcattgttgttgagtttgatcccaccattttgagaggtgatgaagatgtgttggacttaaaatgtgaatacaatctgaaaatcaagaatggtcagaattttcaattctcttcaattctacaaagccaaaaagctgctcatcattttgatgatgatgattctaatttagactcgtcctcaaatcatcaagtgttcgtatggtgtatatacaacaaagacatttgtaagaaaaggtgtttacctgatgatgatgatgaggaagataacgccatctatgatgattttctaaatgaggtagagagtggcatatttgagtttgacattagcaaaggaagaataaaacaatgtggagttcggttggtacatcgccaatattcagattaatcatatatatatatatatccatgtgagtactactaatcctaattcctattcattaaggtaatttattactatataaacttctctattttctttctacctttattagctgttattttcattatcatcaacacgtctaattaatatcactttatattgatcacaatcttattatgaaatagttacaatacatcatgttataattttatatttatttattgaactgcattttccttaaaaaaaaaactcataattttctttaacaagaactaaagtgttattatctatctattgtctttatttaatttcagattaatttctcacatttccagggttgatatggttgcgtctacggcttttgaagattttatatagtggatctcatgttgtacttttcttaaagcgttgtactctttttcctcttttgaggttttatccactcatgtggttttactctttaggggttttgacgaggctttgctatacatcataattaatttaataattttgtttttggacaagttttattcatattaatttgtaatccaataaattgtattctgtattagttctcaatatatataataattggatagtttggcagagaatggctttaataagattgggtgccgacctagtcggaatgcttttttattagcctgactatgcatctttattctcatttcctctcaaaatattatttgtaattttttaaaaattagtaatatatttctcctatgagaacttagaagaagtttttcatgtggtaagtacatcattgctttggcattcatcacaattatacattatatatactactaaaaactaaaagagtgttacatatgctattttggaattatacatgtattatatattgattcccaacacagcccaaaatccattccctattgaaaatccgattccataataaatgagagaccaatttccatacaatatttccagctgcaaacttcagcagttttccaagttccatcttcagtgagtagcttgtctatggtgactccttcgggaagagaggctttagattggagagagaagggagtacctctagggaaccaagggtctgcattaattctaatagaagagccat

SEQ ID NO: 71226 - DNA, 1043 bp, Cannabis sativa
  modified_base (587)..(591): a, c, t, g, unknown or other
aataataataataaaaagatccctttagcatatatataatatactaatgaatctcctatggtgaattgtttgctctccatatgaaattatgaatggaagagagagagagagtgatgagtgagtgaggttatcacactacacgtagtactgtagaattcatttttattttcatttattaactacatatttgtgtgactaagaggaccacaaatgatcatatcatgcatatatagacaaatttctccgacaatttggtgaaataatttgtcaaaaattaaaagtttgataatattaggtttggatcactacatctaccactatttatttaacaagtggcatatatatatatatatatatatatttatatgaaacatcttcttctttatttctttctgatattttgtatttgtatgtatcgacctaattattattattacattattaatgatattattaaaatgttacgtacccttttggctacaccaaaagtcaagtcatgaccaaaaatatcgagtatatgcatatatacaaatttgtggaagcttcctcgaattgcaaatctcatatatatatataatatataaatnnnnntatatatatatatatatgaggtcccctctaatatatattgaatcatctgttactatctctaaaattggcttaagtaaaaaacatatatatttggctcggtttgccacatgcataataatgtttattaaagactattatataaaaaacaaatgttaatgaaatccaccatgtgaaaccactattaatattatttgtcaatatatatacgacctatatatgataggtgcattaatttttcatcacttatatcgtcacttgctcttttcaattatatattaagaaaaatactttttttaatatatatatatatatatttgtaattttaatatttatatttatatttaagcatttatatataaaaaattatatgggattattaagaatataagtgttctaataaaataatgagaatgttaattatatattatagaaaattaaccttatattatctt

SEQ ID NO: 71227 - DNA, 1203 bp, Cannabis sativa
ctaatgataaattatcattcttacgttgtgattaaaaagttcatgactaaaaatattagcaacaaaaattacaatttgttgtgactaaacgtatttttaatcacgatatttattgtaattaagactaaattagtgacaatttgtatttaaatacaatatttaatcataagtaacttttttgttgtgattaaaagattatgagtaaaagttgtgtttttttttttttttttgtagtgtatgtactttatttatttgtttcttactatatattgacaaatttaagcacttacttgctacacaaaaaatagtattaattctgataaattgatgcatgcataataatcatcataatataaccctcttaattcaacatttacattcataacattttttttttttttggatatataattaatattaggtacctgcctcagcatgctgtccaaaccacctttgcttagcagcttggatgtgtttcatgggaacaatacaatcagcaataattgcattctttttagagaaagattattcagagtcttggaagttcactactgctttggaatttggctcttgttttttctcagtaagttaattattaatctattatatacaataatcaatatcttatagtttgataattataattataattggtgtaattattatatatatatctcagggagtatttggatctggggtctcattctttgttcaagcatgggtcatatctcaaaggggtccactcttctctgctatattcaatcctttatgtactattatagtcaccattttggctgctatatttctacatgagaagatttatactggagggtatgagtatatatatattttttttacatgtataattaaatatagtgattaattctttgttatatgttaatttcattcttttttttcttggacagattggttggcgcaattggtgtaataattggtttatatattttgttatggggtaaagccaaggacataaagaatgttattaaagaagaaattcatgatcccaatctacacaaaaatactgttcatgaacagaggaaacaacataatattgatgatgactatatggagaagggaagtcaccaagttgatttggaagaaccccttttatctgaccatgccaaccaatcatttcttacatgattataatttatactatataacatataatgttaacattaa

SEQ ID NO: 71228 - DNA, 645 bp, Cannabis sativa
cccccaaaaaaaaaaaaaaagggccacgtcatcactttcttcattagctttcgagatatatatttgaattttcattaaacatttttccacaactccaaacaccacgtgtcagattctaattggcttaagattttacagtacacacgttaacgtgacgcttatatttcctcaaatatcaagatcacccaatcacgaccgtagattttcgatttagattaatctcttaccgtaaaaaaaaaaaaaataataaccagataaataacacaaaagagagagagaatgagtatttaattttaattaaaaaaaaaaccatgattttcatgatattttacgataatctttgaaggtccatcatacgagagaaatcctcgaagcagacgaacccatctccattcttatcaacaccgtctatcatgcgcctacaatcgtctaacgtgcaccgttcatcgccgatagtaacaaagaagctcaaaagctcctccgccgagatcttaccatcacgatccgtatcgaagaaattaaacacctcttgaagctccgactccggctcacaagccacaggaccgactcggctcatcaaagcctcaacgctaatagaaccatcaccatcgcaatcgacttcgctaagcatcgtagcaacaactt

SEQ ID NO: 71229 - DNA, 1192 bp, Cannabis sativa
aaaaaaaaaaaaaaacctttggtgatatatatatattattttaacatttttttaaaaaattaaaattggcttagttcttaaatttttaattaatttagtaagtttttaattatttttgaatttatttcacataaaaaattaaataattttttttttcaaaatttaatctttaagcaaaatattgacccacccaacaagaaagaattaaacacaaagcttaagatcgaaagattcataattttataaactaaaattaaactcaatcaagggtattatcatagggaaaaaggatatcaccaaagattttttttcgagggcataaatatacatatagaaaatatatatttttattttacaagaaaaataataataattttttttaataaataaaaatatataatataactactttaggatccaaacaacatatattttagtaaaaaatactctacaatttttaagcaaatgaaggaataaccataggatcactcagggttggattactctagcctaataatggttaattgtaggtaacctgattaatggagagtttgtaattggtgcctagcacaaaggtgtctaacaccattatgaggtggcgccttataaatgattagcgattttctataactttattaaagtaaaataaatgggacctgatattttattgcatttaattagtagccttagagctattaaataagcccttgtactgcagttatacttgttacttttagcgatataagtaattaatttatttaaaagatgatgaaaatataactgaagggagatatttgcaacgatttgtatagttcgcatggaattttcggaatagggaaaaatttaggaggcaaaactttaccaggttcatagttcaagacaaaaatcctatttattcaattagtaaattgtacccaacataacacaataataatttctatataatagtattccattctattaacgataaaggatacataatgatataaagttacacccatatataagatggatataacatacttaaacaaacatacatacaggcatgtatgcatattaagtacatgtataacattattattattcattactaactacttaaaagattgactttattaataatatttcatatatatatttatatataaaaatgtcaatccatagataattaaactacgtagtttattttgga

SEQ ID NO: 71230 - DNA, 1379 bp, Cannabis sativa
atgggacttaagagtattcaatgtccaagggttcccaagtccttggacattccaaaatatggccatcatggtgctcggcgacctagattacctaggttctccgctttcaaattgtcgtcaaggttcaaatccaaatccttagaaattccccttgaaagagtactcccttcattcatagccatctgcactataaagttctctgtctgaacaccttttcctttgatctttggtcttcttggagtcacttttctcctctttaatggtccgtcttccttgtttaacctctcaatcccaacatcataacttattggaatttccactaatttattgtaatcaacctcgttacccgttctgttcttcctcaagccttccgaatcaaatacactctccatgtccatagcagcaaggccctttaaggattcatgatcattcctccaagaaccattcctcttgcaattgacttgactactttcccccttttccatcattggcaccttgttatcctgctgtcgtgacaagtttgcaaaggaattcccattcgaatcaacaataaacaaccctgaattcaccgcttccaaattgccaggaggattaataatagcaccagggacttcagctcccagcatagtattctgcatattgctcgaagagtcttcatacatcaccggcctttgaacatgctgctgaagtaattcattggtcgctgcctttgagacagtttgggcttctcgtttgtcatcagctttgagccatggtccatatgttttttttttccaattgcccaatccatcttcaaacatcttgggagtgcctgtacaaacctgagtatcatgccctaaaaaaccacaattaaagcacataaatggaagacgttcgtacctgaacgggagccatttctttcccccaatcgaaggaaataaaaggccagggaatagaggtttggtgatatcacaccagactttgaatgtaaagaaatccttggttacaattcgtggaatatccgccatttgaacgtcaattacctcccctgctagacttgccaagcgagttagattactttgagttattgaacgggaaggaagatggtaaacccgtccacagattgggaatcgcagaagttctttttcctaatcttgtggcaaagatgtcatacgttcaagaatcagagttccataattgaggaaccaaggatttttgcccaagatcctgttcagatcttgtgctgatttgaatgtaaacaccaagaaacttgattgtttattgctgtgtttaatttccacaccccagttattatcagcaattcctcataccctacctaaaatcgtcttcagaagaggacgactcatcggtttattggaacagaatcggcccttcgcgca

SEQ ID NO: 71231 - DNA, 1187 bp, Cannabis sativa
  modified_base (56)..(57): a, c, t, g, unknown or other
  modified_base (160)..(161): a, c, t, g, unknown or other
ttgtcatttaacaaaacacagggtccaattgataacttttgtaaaacagagggtcnnaaatagtatttacccttattattattagtagtaaaattgttatatgaaagtgactcgttatataagatattagggtccttttcaaaaatatatatatatatanntatatatatatatataagatattagggatgtgtttaaccaattatcaagaaagctatattggcaaacttgttctgaattgaatttgttaatcgaaataaaaatgttatctatatccaagttacttcgggccatatgtatttatttatttttgttggtgcatcttaacacttttttttttaatttcattttaaccccccaatgtgcacatatatccatgtatttttcttatatttaaattcaattcatattttaattattttaaataaaatatctacattaatttagaataaaaaaggctcgaatttcaagtttcggttggaactcgacttaaaagtagtccaaattccgaagcatgatgatctctcagtctttctctctgctccaacttgtttgggaaacccaaacaaaatcaaaccacacacactctcaaacaattatatccacttccacattacggccgcccaaacttcccacctccataccattcaattattattcaatatatatatatatagatttgattttgtcccgttgtactttcacagattgtaattcgtgacgtacggtaatcatcagatgagagagttattgatctgacggtgagactgatttaagagtaattagggttaaaaagtagaaacgtaccctgatactcatttaatgtaccctgagacccatctaatgtatcacagaatacattccatgaaaatacatcgtagataaaatcatatccctatatatatatataaaattaaaatgttaaaatgtgtcattttatcgcgtttgtatcacattttatgtgatttgtttttatatttcgtattaaaaataattttctcaactttaatctgacggtaaaaaattgtattatatttatgttgacccgttttgacctattttattattatacaataatattattatttattttttattttaatttatttaaaaagttgtattaaacaagtcgtgtcgtgtcgatccgcgtttaatttcttaaccttaacccataaaattcatattgt

SEQ ID NO: 71232 - DNA, 859 bp, Cannabis sativa
  modified_base (819)..(832): a, c, t, g, unknown or other
aaggattatactattccaactgatatattttagggggtatttttaactacacttataaattaaggggcatcatagtatagtgtcataagtacagggactaaaaaaagttaattattctaataaatatgtatttgttaatgataaatgagtgaaaataataataacatttaaatataataatattgtaatttaataattaaaactattaaaaaaatacaaaagtaaaactatatattaatttatttgtagtgtgataacaatttgagttttataaataaatattcaaattttcataattgtaatatttttttatatgcattgtcaataaaatattgttaaaaaattatataaatataattaagattataaaatatacttataaaaaaattatgaaaaagtaatgaacggaataaaaaaataagttgtcttatttaagaaaaacaggtcgatacaagcaaaacagtgcacaatatgaaaatattgagcctacattttaaaaatattatcatgacacgacacgatccttattttaaaaattatggaaaaatagaaaaatattagtcgagccaacacgacacacataaatttacagcactactcttaactactgaatggtttttcctttttatttctcctataaatatgtaatttttcattaatatttatgtatgaaatagattatttgaatattattttttatattgtaaattatttaaaatttattaaaatttaataaaatatcttaaataacttgcacgagactattaaaaaaattacattaagggctcgtttggtacgccgtattaggtcgtattgtannnnnnnnnnnnnnattatattgaattgtattttatgcaat

SEQ ID NO: 71233 - DNA, 1149 bp, Cannabis sativa
gcccttgttagtttgaaaacttgtgtgttcctcgtcagatgtatgcattttgatctgattatacccaaagtaggaatccatgaaggtgagaaatttgtacccaactgtggcatctactgtttgatcgattcgcgcgagcaggttacaatctttcgggtaggccttttttaggtttgtaaagtctatgcacatcttccacgtgccattgggttttgggactaaaacagggtttgcaagccaagctcgatacaatgattcctagaggaagtcattacatgtaacttgttgacttctgctttcaccgcatcttctctaacaggatctaaaggtctccttttctgacggactgaagttgcattcccatggatattcaaagcatggaaaatggtatttaaattgatcctgatcctagtcttgttagagttactccaggccaacacatcttgattttcactaatgctaataattacatcctctcttacggttggagggaggttctttcccaccttgagagttcttgtgggattttcttcgttgatgctcacttcttctatcgcttccattggctcaaaattcttttcaagtccgactcttggacttaactcatcttcgtatcccttttgaacaacattcgtatcaattaggtcgtgtagtttgaatgcctcgggcgcttcttccctaatcatgtatacaacttgggtcgatacattatagtagtttcttgtgctctgctgatctcctttaatggtgttgatacactcattctcacatgggaacttcaaggacaagtagctaatggaagtcactacaccaaagtccactgcagtccgtcaactcagtataggatagtcaactaccacaaaggttgagtgtttgaatgaactcgcctcgttatcccccttaagggtgatcagtaattagattttaccgatgggcattagggtgttgctattaaagccttgcaactggactgggcatagagttaaatctgcttcagtttgtccaatcgcttagaaggcaaacttgcacaaaatattaacaaaacttccattgtaacgccctaacaattaagcacgttacccaaggtgattaagaaaccttaatcccctaaacgggattactagaaagataaacacaggtaatttaaac

SEQ ID NO: 71234 - DNA, 844 bp, Cannabis sativa
  modified_base (772)..(786): a, c, t, g, unknown or other
ttttgttttaacgctgaggcttagttttctgcagctacttgaatcactgaattcggactttattagtgaaagttatgactcaattgacataagaaacagtgagacatttaattaggtgataatccttgggtatttgcatgattccttttgcctggattagtctgggttttcaatgagttttgcagggatggtaatccagtggtacttaattaaagcgccttttaatgttgtcaaacttggcatgatgatgtgcttcaggtttcattttgttatatgcttagtgtatcgaaaatcaagttcgggttgataaacgtagttattactgatagatgtctaagttgggattgacattttgtcaaggaaattgttttgataggcattccataaatattattgaacgggatattctttttttttttcctctttgtttgaatatgaaaagactgatctagtacatttgagtagctaagatacttaacttccatgttcaatgcaggtgacaagaaatctgattttgaacaacaaactattgttatcattgatagtgacgatgaaaatgctcctcctacaagcttgtactgtctccgaaaaagatcttgttccctaattgtgggagcaagatgaagcttgttggtaaccgaaaatctccataaagacatcttcaagttgaatgtgaagtgaagacaagagagaacaaaagctctccaactactcttatcatctctcttttaaagtaccacttctcctagatcttaggatactgtctttcctnnnnnnnnnnnnnnncgtctttttattggatttatcacagatgtttcacatttacctattcattgttatttga

SEQ ID NO: 71235 - DNA, 919 bp, Cannabis sativa
ggaagtgaatagaattgaagttttcatattttcacctgtgttctttatttatttattttttatttactactgtacgagaataattttttaaatcaactatttctgtataggtttcatgtttctaactagaaaaatgaagatgaagttgaagtaattatatttaagatggttgatggttctagcttgcatatgcctttagctgctccatatttgatatgagtcccagtttccagcttgagtatttcttttatgcttgctaacttgatctggttctaggattattactatgtgcaaagacaaagattgccaagactaagcttgcgacatattttgctgatggaacatcccatcttggtggcatcaggtcagggaaatgagttggctatttcttcttttctttttttttttcaattttatgttacaattgaaattttggaattaaattttcactaagagatattgaatacagtaaagccaattcggagcttggtacatcgaggaaaatcttaaagatttatcgggccctggtaactgggatagtttgtgatgacaaggtaatgaacgatgcagcagcacatcttccctccactgcactctctgttctgtatttctttttagaaacaaaaccttatacttgtattgaacataataatagtgagtggaaacacccactaaaagctgaaaaaactaagaaacattagacattacaagtcgttataaactgacaatcagggaatgagacatttttgaaatactgacattatttaaccataggctatccaatgtatgatcttttcacaaatgcagtctaaacatttctttctatatgttcaaagattctatttttcttccatccatagagcctagaaaatagcttttcctgtctagtttttccttctttcaagtaaaggaacacttg

SEQ ID NO: 71236 - DNA, 1135 bp, Cannabis sativa
aaaaaaacaaacaaacaaaaaattacatcattacaaatataatactaataattatctcctaattaattatttttggccccttatctaaataaaatcacacccaatcagcatttgaataagattccttcacaagaaaattggcactctacaatctttgaaaaagatgataaactttgcaaaatttagtcttccctccctttatgtgatgcaatcaaattaaaaaacaagaaaaaatcacatcattacaaatactaataattatcccttaatcaactatttttggctctcattctatgcattgccctatctgatattaaattatgagcattatgaggcactaaagtgcctagtatagctatgaggagatgtcttgtaattagttagtagttctctataattttattaaattaaaatatataagacccaatatacaactacactgataatgatattatcatttacaaaagtactacacattattggtacctttaattttaacatattgatgacagttagaatttgggataagatgaatgtggttccatctcaaaaccaattggcgggaggaatagcccattcatcttatatattacaatttatttctacacattaacaatgtgggactaactcttaatagtagtgtctaataacctataaaaagaagacaatacaatcgtactcatcaatggaaaattttcattcaactaagcttatatattgtcaagccaaagtacgtagcatatttatttctttaaaaaataatgttcctcatgagatatagatgcactaaaaacttagacaaagctcttataagaagaccaatgtttatttggtaccttaacttaaggtgtttaacatcacatgagatatggtgcctcattattaattagcgattttaaatattatttattaaatcaaaatatatgagacctgatattagaatgcaacaataacaatttgttaccttttgtagtgtttggtaggggtgggcaacatccaatccaagctattgaatcgaatcgatctaatcctataaaaactcgatcaaagcctccttttttaaaaaaacaaaaataataataataaataaaataaaataaagagagccaagtccctcctctctctctctctctct

SEQ ID NO: 71237 - DNA, 1538 bp, Cannabis sativa
aagagagcttaaatggattgattggtaccacctatatcaataaagtgcatattgtttttggtagcccacctcgaaagaacgctacagttaagcatacttgatctgggaataattttaggatggatgacttcttgagaagtttttctaaaaaatgtgggagtgaggacaaaacacgctggaaacacttgtgttggtctgtagggtcagtcgtcagtctaggttgcagccagagttacatactcgtatataagagtcataaatttgtagaaaaaaatctaatagaaatttaaagcgagacattacacaatctttattgagtctaaagaaacaacttttaaggtttgcatttgcaatacaagctaaaagtagaaacacatgaaaatatcatcatgattggtatatcctaattgtttttgatagcaaaacgagtgcaattattatcaataataatctataattaggaaaatcctaagaaagtatatagaaatgatgaaacaaaatccatgatatttaattaaattgaattacaaacttttgtcctctctttctcacctaacgaaaatccaaacaccacaaataaatcttaaattgctaattaaattaaaataaactaaatatttctcaaaatttaatggtggtaaattattttcgagattttgaaatatcaagtctattatttgatgtgttctaagttctaacattagttaaggttcaatgtttgagaccttaagtcctaatcacttttagtgtttcaaaactaattatgtgatatataaatgtatagatacacttatatatagattttagttggaataaattttaacatcatatataaccaagttggtagtagtactcaaaatttcaactctacactacactatatttttacactcttacataatattatatattattattatttattaagatatggtaattttctaggaaaccatatgtatttttccataggaagacaaaagtctgtattttttccactttattgtaaatttcaattacaccaacatctagacttttaacatcaccatgtaaaatgaaaataagcaaataaataaaattttatagaaaaagtactactctttccattttctctatcaacaacaagctaacacaatttgataatttagatatcattcttgtatcataaatattaaattgtaccaataatattcttaatagtacttaactttgaattaatgctaattataatcttctacaacaactttttttttcaaactctacctgttataattaaaattataacagtattcattatagttatagcatttttataatttgtttaaaaaattaaactagaatactgtaaaaaaatttaaatttaaaaataaaattactaatattatactgtaattttaacaaacactatcataaaagaaaaattgaaaaaatattctattttcaaatacaaaagttgaaaagaaaattttaattaccactcctctaaatttaatatttaacacgaatagagatggaaattataccgcggggatgggtaaccg

SEQ ID NO: 71238 - DNA, 1171 bp, Cannabis sativa
ttcaagaattttaaatcgtagtataaatatatatgtgcacccaaaggactcattttaagtcttctatgtgtgcacttatatcatatttggattcccaatttaatagcttccattctatgggacacattgatcccgtttgaacttctagcctttatattatcaagaatgatcgaagttccaagtatacccaatcttatacgccacatcactatagcaattaattattcaaaaattagtgggtgaaagacaaaaacttctcttgatagttctgttaaaactagaaaccatcaccaacaataacaaataatgtccatctttcaaaaagatttacatgtgaataggagcacgacgttttacctcgatagcaagggatcacttccattttctgcatcagataatggatttatatcttggtcatgcaaattctgtttagcacactaccaaatttaaataattcaaaccatgtgtatatatagttggcccttgcgaacagcttgatgcactatctcccttcaaccctttgagcgaaatgcagcaaaagaaaggaaaatccatggaccgaccagtgcattaaagcatacaaggctactcattgtttagaccaaacttccatttctccaaactctagctctaacaaatgattgggggcaatacccgaaaaggcttttaactctaaatactttcagaaggataggtagattttccggatttcattatatgctgcgacaccttcatctcactacaaataccactaaaaactgaacagttcaagctcatctcactacaaacaatcttgtggtgttttccattactaccaatccaactctcctagcccaattccagctgaaattcattctaaatgaaaataaaattagggatccaccaccaaaatttaaaatgattcaaaccatgtgtatatatagcactgcatggacaagtcttatagcacacatggctactcattgtttaggccaaacttccaattctccaaagtctagctctcacaaagatacaattgggagaaatacccgagggctttcaactctaaggtggcatttggttgggaggaacgaaaacataggaataggaatgggaatgagaataggaataagaatggaataaaatttaaaatgtataaaaaaaaaattgataaatttttttttttttttat

SEQ ID NO: 71239 - DNA, 801 bp, Cannabis sativa
aacaagttaaaccaaaaaagaaaagaacgattcaaataagttcatgataatagaatttccgttaagtagactaattaccactagacagaatttaagttgctactatatttccctcctcatcaacactcacagttactgagtccccttctttaatgtctcctctcagaatcctctcagccaaacaatcttctaagagactcacaattgctcttttcaatggccttgccccataggttggagcagtcccctctttcgccaacttctctttgaactcagatgttacctccaagaaaatgttctttctttcaagtctttcaataacatcttccagcataatatccattatctgtttcagctgaatatcatcaagttgcttaaataccaccacatcatcaagcctgttcaagaactcaagcctgaatttttccctaagttcctttgcaactgccaccttcacttgtccaaaatcaaactggtcccctttaacaatcacattgttgccaatgtttgaggtcattatgataaaggtatttttaaaatccacagtttgacctttaccatcagtgagcctgccatcttccaaaatctgaagaagagtgttaaaaatgtctgggtgagccttttcgatctcatcaaagaggatcagagagtgtggcctgcgcagaacagcttctgtcagctgtccaccttcatcatggcctaaatagccaggaggtgatccaataaatcttgtataattatgctttgacatgtactcactcatgtcaagccttataatggactctttggagccaaaatact

SEQ ID NO: 71240 - DNA, 1181 bp, Cannabis sativa
  modified_base (1156)..(1156): a, c, t, g, unknown or other
aaatcaacattctcattacaaataaaataattaataccaataccaaagatttaatggaggcaactacctaatggtaagatgtcccttccaagtttccaaattaagagtttggtgcactcataaagatgaacttttaaagattcttccaacatgaaaataaactacatattgtgtcattttgcattgatatttatagtcatttgagtataaattacattagtcatccgaatataagtctaggaccaggaccgcaatcctgcgtcccggcttcggagtctagggttgagtcaaggtcgaggtctaagatctagatccaagtccaaattccaagtccataggcgcgtttaagattcggttccaaagtcaagtttgaagtaagaattcaaaattagtgtcagaggttaaaatatgccaattttctttgaaaaaaatagttaaaagttgattttttttaaaaggttaaaagttgaatttagagcatactcattaacttaataaaaaacaattaagataagtatccttcataatttaaggataatatacctacaagtttttttttctttttctttggaaaaaggattatttttaaaaatatgagaaaaattattaaagttatgataaatatggcataaaaagtaaatgtaactaaatatgacattacaaaaaaaaaaatcctaattaaattaccataaaaaatattaaaatttctttcatattattttttttaaaaaaatataacaaataaacctatagtgatcgccggagttgttactagtgtcgaaaaagtcaccggagtttgctgtcggcaccagaaaagtcgtcggagtagctgctggtgccggaaaagtcgctaaagttgctgtcggcgccgaaaaagtcgtcagaattagcattattgcggaaaaatcataagaaaaatcactaagaaactagtttcttgatgaaaaaactgatttcttgatgaagaaaccggtttctcggtgatttttccggtaattttaccggtgacaatactaattccgacgattattctaaagtttgatgtcggtgccgaaaaagttgtcggagtagttgccggtgtctaaacaatcgctggagttattgccggcataaaaaaatcgtcagaattgatattgtcgccagcaaaatcactagnaaaatcaccaagaaagtggtttctt

SEQ ID NO: 71241 - DNA, 1175 bp, Cannabis sativa
  modified_base (50)..(69): a, c, t, g, unknown or other
ataaattatttaaatagctataaagaattttcataattaatcataattannnnnnnnnnnnnnnnnnnnactaagcggtctttacatatactctcgaacattacgtatttttccttataaatagtggagtcatttttatagaattcttttttcgactttctaaaagctagtacactgctaaaatatttgtaagctttctcgagaatattaagaaactcacttggtcgaaccttgtgatcttaataattttctaagtaagacaactaaaagggaagtagactattactattatcacgaggccaaacctttttagattcttggtgtccttattgctttactttattattattattttattaattgataattcaattaaatcgctttaatgacttagcgtcgttgggtaaaagtgaagtcaacattgtagtacttttattgggaggaaaggaacacagtatcatccttgttttgacttcttgacaatggtccttataaggaggtctcaatccaccgagttgcacgatccaatggcgacgaaccctaaagtcaaaactcccacaaacttaggagttgagaactccaatggatgacggccacctcggggcaacctacctaagacacctgccaatgttaacccaaggactaccgggattacaacccccctcattggagtcacgcccagtgttaaagaaacttgaaataccaaccaggcgtatgttggagagactgggtcgggcaccaaataaccatctatggacaaccttgagttgatttggggaaaaactttaatctaaagatcctgagagaagcgacaaaacatgtccagaatcacaccaatgtcctccaccataatcaggaaaaaacatgtactacaatgaaccatttgttcgaacaaaagaggtgtgcattctaagagtggatggacaaacaagttgaatacatgcgtgcacaacaagtggagattaactgctggttaagggaggctaccaacctgattaggcagttgcatcaacaaactaggggtgggtattaaaaaaaacccttatctagaagagatctgtaatatcctaataagcttaataattaataattagggtttatatttatattatgagttaaccaggtaatgagtgggattatgatcctactaatctagttcaacataaaattttaaa

SEQ ID NO: 71242 - DNA, 928 bp, Cannabis sativa
  modified_base (33)..(35): a, c, t, g, unknown or other
aaaaaaatgtcatatataacaaattatgttaannntaagtttagggaaaaaattataagcatattaattcaaatttcccttatcaaaatcaccggaggtcttagaccaacgccaccacttggtgattgaatacgctaaaccgttacataatctttcaacaaaaacaaaattatacacaaaaaatttcttagaaattttagaaatctgaagaaggatagagacaagaagaaactcaaccgccattttacaatttgacaaaatcagcaccttatgtgttgaaattacacaaaaaaatcagcacatggaaggctatttttactctttttttttgtatatatattttaaaaaataagttataatagctcaaatttaaccgagtactttgatatatgtcgccatatttgggtgatgttgtcatttttactgttagtgttctatactatgaatatttggatctatatgttgtgtaatgggcgtctttagttttctttttgtaaaggtaaaagaaccattttatgtggcccaaaaccacaaccccaaacccaatacgactaaaactggcttgagcatcactctgaaacttggtaatcaaacctgcaataggtctgaacaactttgaacgagtttcaatacccatttccacaactcaatcaccaaaatatacaatctaaaaattcaaaattctcaaatcaaacacgtgtgcatcactagttttagtcatgcatttaaaccattattgtgatgcaagagtgagtctcaatataaacctcatttctttctttttttttttttttttgcaatgaccatataaacctcgtattatttgaaatgaaactaataaatcacattgtcaaaaatattctcaacgttataaaatgtattttctaaaatatgaatttttcctataagttttagtaaaactctttca

SEQ ID NO: 71243 - DNA, 964 bp, Cannabis sativa
atcttggtatctcaagaaatatgtgaatttaaaacgcatataaactttgcccttcttgaggcaattgttggcaccaaatcaaaagcaaatttagccaatctatcaaattttaaagtgtcctcagatatgctcatatcatatcttagaataattttacaaactcttccacttttgcagtacaaactatatcattatagtacttttcattagaaatatcacaaaactcttcccaaatcatagtttcaacgtctcgagttaggaacaaaacctcctaccaaataggagcatcctcctatatcatgaatatcacaaatatcactcaaccattacccttgactctttataaaattaaagattaaggcaatcgagtttattcattattctaccttaagtggatcagggtttcactcaaagatagaagggattctacttatggaatcgttcataatcgttttcccattgaggttgcactactagaggtgtctatgccaaaaggatatcacatacgaaattggaaggtagggcttgttgccataattgcctaatctcttcactctacctatggatagtagcttgcatttctacaaacattcactcttagtctggaggagcaaacagagggttaacattttcattttcatcaccgaccttaacaatcttccaacagagtctacctaatttcttagaaagcatttttcctaaatactcctctaatcaataactcgcatcgattacaccatggtaatgtcgggttttatgccctaaataaaactcaattttaatatttttttatttaccatcaaaaatgatcaaaaagcatatctttaccttggcatgtgcttttttcacatatttattttattattataagtttaatatataagttctattaaatcttaaatatatagttattcacaattatgataatgtcattacagttgaagataattgtgattattcaaac

SEQ ID NO: 71244 - DNA, 1130 bp, Cannabis sativa
taatgaactttttaattattgctgctcactactactgttgttggagcttaaaatgttacgttttcctttttctttcttcataatgtcttcatttggtggtacactttatctatctgtattaaactgtatctgacatttcatttaaaatttaggatatgggtactgagtaccttgtgcggccagtggggcgtgcagaggatgaagaagatgcaagtgactttgaaccagaagagaatggagaagaagaaggtgaggaggaagttgaggaggaagatgaagacgatgatggtggtagcgggaaagtggaggcaccaccaaagagaaagagatcggacaaagatgattccgacgatgatgacgacaatgatgatggcggagaggatgatgagagaccatcgaagcgatagtggttggcctcttattggtatgaggataggactgaccgttgataaataggtcactctctcattctctctctctctctctctctctctcactcacttttctctccattatgtctctatcttaaactggtctcctctttgtagaaagaaggataggtaggaagggtgctgcctaaaaatctgtttatctttttttaaaacctcaaatcaaatcatgtactaccatgaagcaatataattaggattataagttttttttttctttttaatcttctaatgaatctagtcatttgggtggtggtggtgggggttgattatcccatttgaagagggttgttttaggattttgtgcaagtttaaacaagttagaaaagtctagtctgttggatattatttatttcaagttctttaggtagatgatcctttttatgtcctttttttttttttgttttttgtttttttggctggttgaaactatcaatggttaattggatgtcatgattttgtataataatgatggtcatttataattatcatctttaattttcaattattgtcatttttctcatgtctacgttaagattatgtactccaaatagtactgaattacataataatgttacttgcagaagatactgaaattgaccttggtttaccaactattaaaattggaattgaattgattgcatcttgcgtggcttgtagtagttgataggttcaaaagaa

SEQ ID NO: 71245 - DNA, 1330 bp, Cannabis sativa
cataggggttttgttttagagaagggagaagcaagttctttcatcaagaaaatcccatctactagtttggtctataaatatcaaaacttcatgtaacattgtatgatacacgtcctttataagttaaatcttaatgtataattatctttttagtttagaattatcttcttctttttattcttttattttttttactaaaaaaaaaatcaatatttttttttttttatgttaatttaatatggccaatacatgtgttagaatattctttaaaccactaagttactgataatgagagtatatgctaatcctttgacgagaatattttgaaaaaatatatattttttattgaggatattttgtgagtagaggtaaatttcttcttattggttaaggctgcttaaataaaatactgtttgtttgcgcatgcaaataaatgaataatcaattaactttatatgtttatagatttaactttgtatgggtggcagagcaagtgttttattttattaattattttatattttatttttaagggaccaggaaaaatgatttaaatgggaaagggatttgtgtaacaaagtttaaaaagtctcaaagagagctgaacttatattccatgcccaattaggccgattccacattattaaataaacaatccaactattaatattcttttatttatcaaaataataataaagctaaccgcccaatttgataacatcttcgtgattgaaatgtttatctactgtatttttaataaagatttgtacttaattattttttttaaatgtatgattaagaaccttttcagtgattagttattgagtttactttattacaaaaacaaaaatgggaacactaaatgctgacttggacgtattgatccagcaacgcatcgcccataacgaataactcgctctttagtgctaagggcaatataaatttcaataataaaaatattgaaaaaaagtttggtacaaattttttcattaaataaaacaaaataaacccttaatgccattagatacagaatcagttgagctaaagttgcttttaaaaaatgaaatttaattttgaataatccatatcatatgagaagtaggtgaagaagaagaaatgaatttaatggaaaattttagattggaatggtttgtcacaattggaattggtcccgcaatttatagcgtcgctcagaaataattgattgctaatgctggtgaagttcttttttacggttcattctagagaaataacaggaaaaataataatggacacaacaaagcaaataaaatgaaatattaaccagtagattgacatggaaaatcatcgt

SEQ ID NO: 71246 - DNA, 671 bp, Cannabis sativa
gcaaaattgcgcaattttaattttgggaggtgtttgtgtaagttgggtgttaacgcaaactactaatttgtgttaagtttggagatgacgtaaaacatgttagagatttgtgttaattgagagttgacacgaacatccaagatttaacctaacatgtttacgttagtgtctaattgttaacatatttacaccattaatgatacgaacgcaaacactgtatttttgtgttagtgctcaacttggactaacacaaattgacgcgttataacgcctttttgatatttggctgaaattaaaactctagaatatgtgaatttacttttttacctcatgatcacggataatgttattagtttatctcttaaaacagtttttagaaaatattaactaaatacgttttttattttaaaaattacaaaaattattttttattcttatttctaaaacacaattttaaagagaaatttaaatttacatgtatatatttggggtatattaaatttttgaacacaaacttactaaaattaaaaaaataggcacactttatattcatatccattatacccttctctcttcttttctcttataacttcaccatccatactccgtattcccatctatactgatggtggtccgatggggtccgatgctaccttttttttttttttttt

SEQ ID NO: 71247 - DNA, 2462 bp, Cannabis sativa
  modified_base (1814)..(1818): a, c, t, g, unknown or other
  modified_base (2013)..(2013): a, c, t, g, unknown or other
ggaagaccctggtgtgaactcttctacaagttcttttggattggatgtttgattgtgtaatacgacaagatagtgaggaaactctgatagacaataagaggtagaaatctctaacttaatagttaagtttatgttatgtataattgtgttgagatccaagattttggttcatatcaagttcaacaattttttcttaaaatttaattttattctcttcccctgtgactctaatatgaaccctaaaaaatcaacaaatggtaccagagtcatactccacaattttataatgcaaacactgtgttgggtatcattgccttgctttttttccaatatacgtggcaactttatgattggccatgtggcagttaaggcttaagattcagaagtgtttaagaatatcttgagtaaatttatgggttgagcggatgtgttcgaagggtccctcttggagttatgattggaaccagagggaccaacgtttttgctcttctccaggagttaggcaaagtcttctcgattgggctcagggttttggagatgaactattcaaaggcattaaatgcgacatggaggaaacgtctatggacgaatataaaaagacatgttagatgcattgaacctattcttcagtgattacacttaaatagaggagattagtgatgactacataatgagctgtcacgtcaatcaaggaaggataagggcttgtctcacttaaaccctatgtaacctactatgtagacatgcataccctatccaaattttagaacttgtgcaaacctaaggcgaacacttgagataatagaagcctttttcttctctgaagaaggctataaatacccccaaccacatttgaaaggggggttggaaaaatggagtagaatattctctgtaaagaaacaccttcatattaaatatcagtgactcgcggactaagactcattaatgccccaaccacgtaaaaatattgacatttactcatttactatcttttaatcattttcacaacttttataaattatttgtcaaaactctcagtcaatattttagtgctttcattgagagctttggaagactttacatataaataacaacaaaagaagattcacactacgatggtggagactagaaaccatacacgtcaacctcgtccatttcaaggtcccaaaggaccaggtgatgaagaagtagcttcgtggatagacatggaggtagaagaacaagacgaaatgaatgatgtagagtatgaagaaaaccaagaagagtatgacgcctatgatgatggcagttacacagaactaatggccttgaggcagaaagctactgatcatgaagccgagttagcagaacaaaaggaacaaaacaagaagatgcaagaaataaaggtcgccatgcaaaaagctacgaaaatagtaggaattcacgtgcatccaaaggccatgccccttggaccagacaaaacaagagaagatcttcaccaagcactcgaaaacatagaagtcgagagccaagccctatttaatagccctcagaaggctcgccaaagatgaatcccacatctttcctcgaaagaaataagaaggctcaggattcgcaaaaagtttgctccaatttcccaaaggaaggaccgaaagagcgtatccgtacatcaggagccaggggagagagtgttgggattttatgccttaaataaaacgtatttcaatataatcttatttgttatcaataatagattagaagtcatttatgtttacatgtatttttcatgcttatggtttgacatacaatttttattaaatccagaacatatagtnnnnnacaattatagtgatgtcaacacaatggaaggtaattgtaattatatgcttcaaaagtttatgtcccatgattcatcagtgcattggatttacattgatgtgatagtcagtgataaagtttacttacaccttggataagtgttatgtcatttccagggcattggtaaagtaagttagtatcggatgtatggagtanacattggactggaccgatattgatcttggtaaagatattataaacttacgatgatatctttctaagtcaatatcactggttgatcttagataaaaaaatcttaattctgatatagttaggtttgatctcaagagtgttatttatgtttttagagttgttctattttttaaatttcttttatttccatactaatgtattatatcatttattattttttgtcttcttcttatctttgaaatcttttttattggtaatttattttgttattagtatttcattttttttaatgtaatttttattgatttacctaatatattatattatagatctatttttgctcactttttctttttctttttagagttttattttgtttctttcctcctattttgtaaattaattataattataaatttagaaaaagataaagatttctaaatatttcaaat

SEQ ID NO: 71248 - DNA, 1398 bp, Cannabis sativa
gaatctattcatgattttgtgacttattagttcttttaatagctcaataatgattcattattacatactacattaattattcaatccaaaacagattatagatgacagttatttatttagattagaaactattctgtaattatataatttcgaattagaggtgagatacacatgtttattattctggctagtatatgataacatatacgtgggtaacgacaaattcaatcatattattcatgaatcatgcgatcttaaggaagtggagtataagtgaactcttgccgactgtgtgagttgctgcctattgatttccatgaattgtgagaggaattgaaaagcccttcattatttattcgcttaaatattagcttgaaatgtgtaatattaataagaataactaatgaaattttgtttttatgattcctgaaagaattatttaaattaaataatttattattagaatgtaactgagatattttaactaatacagaaattgtttgaatagatatataaactcgtaaaactaaaaaaaaaacaaaagaaaaaagggtctcctctatattagctaaatatttttttcttcttcttttctttttccctttccccgacagtctatctctctctttaaattttcaaaggaatacaactataaccaccaccggtagtgctccaacgaggcttttttggctacaatctgaccacatgtgcctgaggattggactccccacctgccgatgatatgaaccacaaagcgacacctcttcattcgctaccgttaatgagaaatctcgagtcaaagtttggaggttcaaactttgaaagttttttccaatcaccttcagtgtttgtttcatgagccgtcttcaccactagactcaccatgtcgaggagaaccatctacactaagtcatttcgctcaactcgttacctttttccagtgatgtgtttttagctctgtcactttctgccaactttttggcgataccatgtatcatcttgacgaatggttggcatgggtatgatctacttgtcggggtagtccttttgatatatactacccctatttgtacctatttagtgaggttttagaactccaaactttaaatataatcatgcaatgtcattaggttcagtttttaatgtagaattgaatcaccataatatattgctcatttgatggtcgtaggagaaagtgatatctaggattggatctaacaattgagctcgagacttgagagcttataatcacctttttagacaaaattcaacgacttgagagaaatagggactcaacttgattattagacttgattgtatatgtgttgattaacattagacatatttcaatatttatgatttataaaatacttgaaaattaaaaatttaatctgcata

SEQ ID NO: 71249 - DNA, 1027 bp, Cannabis sativa
ttttttcttttttgttccttttttaatttaatcatatttagtacaaacaaaaaatatgagagatttcttttgaaaaaaaaatgtgatgctaactataaagttgtaatgtataaacaagtgttgtttggttattgattgacaatattaaattattaatgcaactacttattgttctctgcaaccaaaactcattatttaattttgtagaccatcatcaattattattgtcaaccttatctattttaattttgtttgtaatgaatgaaatattgcaacttaatggcaattattcactagacaatgtcaccttatttcttttattaaaaataaataagtcatggtatttgttttattgtaccaaaaataaaaataaaaaattgtaccaaaaataaaaataaaaaattgatgcaccgacttattctaaacaaaagagatattgattaattaaccttaatagatttgtcaacaacatgggatatgaggcctatttatttaatcacctaattaattaatacataattagtttttattataaataaagtaaagtacaatacagtacatagggagagattcatttggttaagattttccatttaattaacaaatgatctttcaatgatgaatatttatttatataggatgtgggggtttcttgaaggatatttaaataaaattaaaaaaaaatgcactatcttaacacaaacttataaattgcttaatcactacataattggtctttattaataaaaccaaatctagtttatttctcacctactaattttgaatatagttttttttaatataatgcagcattatttttggctcattattttaggacattattattattattttaaaggattttaggacattatttattatcactggtactcaacttttattttcttatttttcttccaaaaaaaacttttattttcttaaataaacctgtgtgtattttattttccgtgattgtgattttagctataagaatttaaaaatttttaaagtgttttgaggaaaaaaa

SEQ ID NO: 71250 - DNA, 1641 bp, Cannabis sativa
aacatgaagaatatttttgagatatagagattgcagctaaagtactattaccaatattatctatagaaagagaagaaccattacctactgtaatcttttctttgcctttttaggagttttattgttgaagattggcactgtcttgggtgacatggtgagaggcgccactgtaaacataccagacatcatcatcaagagtttcacttgaagcaacaagggcttggggtggattcggacctgagttgccattgttctcatcaggaccattgtaagagatcgcaaatcttttgtaacacttttgaactgtgtgaccagtgcaaccaaaaagttgacacacatgtcgatttttatttgagtagcctctgccaccaccattgtttgatcttccaccataggaggtcctgccacgacatcaaaaagtgttggatccacctctttcattggggttgggagggccaaattgatttttcttgaattgagtatagttggttgtagctccatggagatcaatgttagcttgggcctgatttgcctcgatgcaaatttcatgattctgaagcatgagttgaacctctgcaagactgagtctttctcttgaggttaagtttacgacaacaacttcatactctatttcaagaccagcaagaacataaagaataagttgctcctctgagctttgatttccaagtgcacgaaggccatttgcaagattttttatcttgagaaggtattaatcaatggctaaagagcctttcttggttgattggagttgattcatcagatgaatttagtgagctcgagatgcagttccaaataattgctcgagtgtggtccatatttcagaggcagacacacaattcaccacatgtccaatcatagatttagaaatagttgacattagccacgacagaaagaattaatctatgcacatccatatattgaattcaggatttcttaccattgttattgattcaggaggttggcgaatccttggttgaggtcaattctggttgagacgaattccttctagatcatgggctttgattgcagggagtacttaagatctcctaaaaatatagttgttttgatttaattgcagaggtagaacaaatattgtggttggaacaacagtttgatgtgctacaacatcgaaggagaaggatgccattaatacaaccgtgaactctaataccaagttgattttcaaagaaactgagtatgaaccatgaagaagaaagcagtgtatttcattgattgaagtaaatgagtacactgattatttatacactatagagaacttaactaactgtaacaaaaccattaattaatattctgacggtttgttgaaaacaagaacataacaacctataatagtaaaatcgaactaaccaatttcatttatattataaacatgcaaaagcaaatatttcatgaatttgacaacaatatttatgttcgtattagatttagaccgtattatgcatacaaaaaaaataagttaaaatctttcatcaaatgcaaactcaccgaaagtaagatatataataatgatatcatcataacttgttgaggtataaatctatatataaatataaaggaatgcacaagacaatgtgaggtggcattctaagaattcatttc

SEQ ID NO: 71251 - DNA, 740 bp, Cannabis sativa
agaagatggaattccttgaatgatatttaatttcgactccccaatctttgtccggtaatccccacaccctacccagaatggttttgattaaagaacggttcatggtgcgattagaacagagacgtcctatagcacatagttttcccacctctgcatctccttcttcgttgatttcccagccatcttcatcgaggacagtaagcttgttcgtttgagagagcagttcatccatggcgttggcaggcttctcaagcaatccttccggcaggctcttctcgggagagagcatataaaaactaaatttgttaaagatatggatttaattcaatatagtccaattttttaaatggagttttactttagttgaaattacacattttatattataagatattataatttagataaagaaaatagagtttctaatggtgatttcctatttatatacacataagagttaaatatttaaaaattaaaaaaaatatattgattacaattaatggcaataaatataagatttgatcatccatataattcttaatatttgtaacactctccttgaatgtccataatattgcctcattaaaaatagccagtttgagatctggctttatgtggatcagataaatatcctgcatctgcatagccaaaaagttatgacccaaaattattagaatagaacaatcctttattaatagtactgtgtagatagcgaagtatgtgcttaatccctttccaat

SEQ ID NO: 71252 - DNA, 1701 bp, Cannabis sativa
ctgatgaatagtttctttttccctaggtatccaatcagctaaatcgcttatatttgaagtttcttaagaggaatcctggctataacgggaaggtataggctaacaaattatgattattctaatgttcatgtatgactccttaaattttttattgcagctaatattctagtctcactcttaacaactgttcaggtttccatatacggtcattctttgggaagcgtcctctcttatgacattctttgccaccaggagaatctgacctccacatttcctatggattggatattcaaggaacatgctcaagatgaaaaatcttcaaatgatataaatagtaaatctggaattggtgaaatcaatgacatgatggggcatgaaaaatcttcaaatgatatgaataatcaatctggaattggtgaaatcaatgatacaggttcacaacaagcttttttgatacacgaggaagataaattggacaaaaatattgaagatttttctactattatgagtcccgttacatccgatcctgatgaggtcactgcaatgacttctaactctaaacaaccaagtgataaggaaggtgtcaacgaatcagttgatagttatcatgacaaggtcccttatgaaagtgatatcttagagacaagcatcaattgtggagtccccagtgatgatttaggaacagtagctgaagaattatgcgaagatacaaatgatagagacaaaataattgaattattgcgtaaagaggttaaagaatattttcgaatttcattttatattctttgtaacctttaaaggcactttttgtatttcatgtagaattaatattttcttgtttcagattgacactctaaaggtaaaaatagcagaattggaatcaccatgtggtggtgaagataggagtctagaattacagcaaggtggttgctaacccttgcattatttcttttatattctctctggttcttgtttataataaagacttcattgtctaacaaatcttcaatataatgttaacatgcacagagaacaaggaggtgcttgagacttcagtaaatccagtatctgagaatctgccagctgagcatgatgatatacctgagagttataccccttatataaaatacacgaaactagaatttaaggtgttgtttttatgatcttacatgtctttttcccccttcttgagatgtgaaatctagtcttagatattcacttatataaccttttctggatcacgtgactcattaaacactaatattatatgtttcaggttgacacatttttcgcagttgggtcacccttgggagtcttccttgctgtgcgtaatgttcgaatagggattggtaatctacatgctttcattttagggatcgacaagtttagttggtaacttgatgtgtcatttgtggtgtacatgctattcctgtaatcttatttcccctttaggagtcttgaacatgctaactttatttttggtggaaaagaaaatgaacataactatttggcaaaaaaaaaaaaaaaagagtgtaaccatctttgtcaaggattttatggttatattcattttctttcatatccacacaagagttttaattcttcgacttgtgcttaccactgttctaaagcacacacattttcctttttttttttttggttttctttcaataatccatccaccttgcttgatcaaattga

SEQ ID NO: 71253 - DNA, 1182 bp, Cannabis sativa
agtgttataatttgaactcatgaatgtaatctgtaagttttattgttttccctatttttcgaagtctaaatgttgaatgtttgtcaggatattgggtgatgttgtgtataaactttatttcttgaattatatctgtaaccatgatctcttgggatgctttgattgcagaaatctgaacaaggtgctgattacgatccaacgccaattgtgatgatagatcaagattcagattctgatgcaaccattgtacagcttagctttggggatcgccttggagctctcatcgacacggtgactgttccatacttttttttttcactatatacacatggatagctattctttattttatttgggtagagaagttctgtaataaatgttagagtttctttctttataaaatcagtcttttatagctttaaaattggaataatcagtagtttgtatcttaagatggtgtatttcacgaaattagattcttggtcatatgatttattgcatcttcatggttttttcttttatttttcctggggcagatgagagcattgaaggatttgggactggatgtgtctaaggggactgttgcaactgaaggttcagtcaagcaaacaaaaatttatataaaacgattgtaagtactatgtaaatttatattatatatgtatgtatttgtattgaacaaatgtactttgaaggagggttttccttggatacgaaaaaagaagttattccttcatgggtgtgatttgcaaaattttctatcattttggacatgatgctcccatttcatatagtagcatatcacgtggctgtatcaatatttgttgttgtgcatctccttggtgattaacgatgatgatgatcactcgatgaacaaaataagacaaaaagaataaagttacaattacagatgattcaatgtaatcacaaaagaaaattttaaatgtaaagtgaatgctcaattttttaaaagtacatcaaatgtttattttaaaaagattgcttatgcaccatgaaggatttattattattatgaaaatggtactttaatgcaaattctttttttgccaataataatgaatgattcacacctaatcaatttaagaatatgaagtattattgaatgaagaatccatagttagtcaagactaataggaagggtagctcaaacggtcatagttt

SEQ ID NO: 71254 - DNA, 936 bp, Cannabis sativa
atcaatcataaaagaccgagaagcaataagagttttagcagcgaaataatcttggacgcaaaagaaggtaggatcaagctgaaaagattccatttctaatagaggtttaatactctcttcccagtcttcacatataagagcttgatcttccttcactgtctacctacatcttatctaacatgtcaaagctctgtactttttaaagaaaaaaatataccaccaaccattgcacattcatagataacataatctacattgcaaagattttgcctttttctaaaacatcatcaacccattacacaaaatggtctttggtttggtaaaaacaaacacacacatgaatagatacatattctatagttcagagttgtgtatttcctaaaactccatcaatgcattacagatgatcatctttaacactaacagtcaaaagattaaagaataaattggtattttggcccttgaactttgacctgaaagatcatgccctcctaaattactacttatgttaaatattttgcctgaacagaagtctaacgaagtcccatatttcactaatgttcatatttaacattgctaattttggagggcacaatcttattagtgacaaactttcaggagacaaaatacctatttattcatacatatactacaaatataattgtatgtatttactaaaacaccatcaacccatcaaaaatatggtcttaacatagaataaacataaattacacatgacaaaaaatgctaaggagccacaagagcaggcatactgtaaaatacaatatcgagtctcacacatttgattaaataaacaaaacagaaaattactaacaacattccatatcggtatagtgttgtccacctaagcttaaagtgcctaatagcattgctcaagagccggcatactgtaaaattcaatatgggatcgcacac

SEQ ID NO: 71255 - DNA, 1574 bp, Cannabis sativa
cctttgagctgacttaacaagtctttgattttgctcaagtaggccgccattttatcacctcaagctgtgtattcaccaaggacttgatttacaactagttgagaatatgtctaggtggtcagcccatactacaagaaccagcttgaggcaagctattagggcttcgtattcaacttgttgttcgaggccttaaagtcgaattgattgctccgtgcaattgttgcccacaggtgttgtaagggtaatgcctgcactggaaaattatcagtgcaacttctgtcaacatcgagtttccatgtttgatcttcatgattttgttgctactcttactcttgcttcttctatggcttatgttgttttcttgagtcttgagagggctcaagagtttagttggtgcactcagccactaagtctgcaagggcttgaccctttatgtgtgttcttagctggtatgtgatcttgaactgggcaagctctgtggcccatgtgggaagttggcctactgctttaggttttggcaaaacctgccacattggtttatcagtatacacctttatggggtgtgcttggaagtagggtctcaactttcttgaagctaagagcaagctgttggtcagcttctccatgagtgagtatcgaatttctatgtcgtcttaccttttgctgatgtagtatacatggtgttgtacacctccttcttctcttgtaaggatagtacttacaatttgctctgtgactgctaggtacacgcatagctcttggttgtctaggggttagacaacaccggtggttgggaaattgcttctttagctcttggaatgtgttttcacttcctctgtccactcaaacgttttgttgcctctgagaatgttgaagaagggtacgcatttgtctatagacatggacacaaatatgcttagtgtagcaatgcgtctagttaggctttgtacttccttgatagttatgggcgacttcatgtccaaaagggcttggatcttgtctgaatttgcttctattcctttggcgttgactataaagccaaggaattttctcaagcctattccaaaagagcatttgaggggttgagcttccatctcgcagctacaaaggattgtgaagcgctcacctagatctttcacatgccccagcctttttggacttgactagcatgtcgtccacatacacctccatgttgcgaccgatgagatctatgaacatcatgtttatcaaccttttataagtggcccctgcatttttcagcccaaaaggcatgactttgtagcagtgtaggcataggtccatcatgaagctagtgtgctcctgatcaagtggatacatctttatctgattgtaacctcaatatgtgtccataaaactcaaaacttcatggccagtcctggcatccaccagctggtcaattctaggcagcagaaagtagtcctttggacatgttttattcaggttggtgaagtcgatgcagactttccacttcttgttgggtttaggtaccaacactggattagacacccactcaaggtagaatgcttctattatgaagtcattggccctcagtc

SEQ ID NO: 71256 - DNA, 2089 bp, Cannabis sativa
taaggtaatgataaaacacattttgaatggaacattcaaatctacctattatggtttttcaaaaaacataaataaatcacgtattaaatataatgtgattttttgcttaaaactaccttttcatgataatctttcagtcatattttccgactaattaaatatgacacttttattcacaataaaaatttgttagtgattaaaacttagtatttaatacgtacaacaagttattactaatttcatttaataagttactaaatttgtgatttttataattaataattttagcaacaaagatttaatttagtcatgataacatagaaataattttaagtcatcacaaaatttgctgttgtgtataaattacgtgaactaatgtagaatgtaactgtcattagtactgatgtaacacagcactagtaatagttctcaatatcatcatatataatatgaactagtatagtagctgtaattaaaaacttattaatgaatggagctgaaggtgggatctataaataaaaagatatatagagtaatacttacagtgacaaagcaatcagaataagtgaggcgtaggagctttgcaacgatgcttttatcagatttccatgatatttgcacttggtggttgacataagcctctgcatctttacaagtattgtaatacttgtaaaagctacgcctcaacttcatcggcgtttgaagtcctatcgctgcctccgtaaaccctagctgacacaagcttagtactacaactattattagtattgacagaaaatgcaaacgcttcctctcttcgcttctctccatttctctctctcttttttttttctctctcaaactgaacttttgaaacagagctttttttgatggaacaacttttgaagcagagcttgcaatatcactctaaccaaatacaaatattagtagtagtacttgatctccaattaataagcttgtgtctacttcatgtgacctaaaatctatatatatagcttagaattttggggttattttccattgcacacgtggcatgaccgacaatgccaagttggatagacttggttaatttacatcttgtaaatgtcaaatagttttttttaattataaattaagttaacttagtattaagtaaccgtgtgactcaagtggggaatatattttcatagtattaattatatatacatatatatatagagagagagaaatagtgaaaggaaaaggcatggtgcctagcatttttttttatagcatttcttttaaagaatatcataatacttaataacataacagtactcatatatatttagagaaatactaaaaggtaacaatacgtattggtgcctatagcatttttttacgtattaatatcgatattggtccaattaaatatcaagtactatatagattaatacaataacttttaagaagtatcgctaaccaattgcaaaatgatatatctagaaagtgctaagtaccaacaataatactaatcgtatggttatataaatatatagggtgttcacatgaaccaaagtttgttgttataacttatatatatgctgtaatatatcaacattcttgcttagacgccatgtaatgtattttgtgaagcaaacagttgttattatggcgaaaggaacgtgcatgcacatgggatctcggccttgactttagggttttttatttaatatatcactatgtatgagttttatggatccaataattttgagatcataacctaaccaattaattaattaattaatctacatctctacgtacgatcgatcagatatatactgcattactataatggaacaccaaatcaacgtaattattcgactactaataacattaatttccattgataatcattatcttcttcttcttttgtccgtaatatttgaaaatttacttggtttgacgatcatatatctttatcctacgagtattgctataggagacataacatttagaggttgctaataatattctacattcatttattacattaaattatgtgagatccaatacttaaatatacgttatataatacgttagaatgtgctagacactactagtacctttt

SEQ ID NO: 71257 - DNA, 1109 bp, Cannabis sativa
accattttccaaacgtggaccatttgtttacaaaagttactaatcaaactctctatttttgttaaataataataaatcaaatcttgtatttttttaaaatagtacaaaatagttagtaccttgagctcaatatttatcaaaataaaacttattaataacttgacctggaggtgaccagagatataatattttttttacatctgttcgtgttaaaaatggattcacgttggctacgttaattttttttggaagaaaattgagctcaaagtacataattcaatttatcatttaacaaaattgaatattgatcagtaattttcacaaattatatataaggttcaaaataatatttatatttatgtatgtataattaattgaaaatgataataatataattgattagttaatattgttattaatattgtttttttttacaaatactattattgaaactagtggatgctcccatcatgataatgctatacttactattaatactatcataatatatattgccaataaaaatattagtggatgttcccatcatatgataatgcctttactgatacaattcataatatataataggctttttcttttttcttttcacactagtccaaaatggcttgtctaatatatattcactatatatattatgggcaagtatggaataatttcatatagcttcaaagaaaaactatatatggatcatattgtttcatcttcttttctctcattatttcttctttttattttgcttcaacaacaaggggaagccactaaaaaggcaagtatataaaatatatataaatatatattataatttatactctctctctcatcaaatgtaatgtgtttatttttaaatattatatttatcctaaaatattcataattatgctaaataatcttataaaatcatatacattatattttattttttcttgaaaaagggttaattttttaattgaatccaaataataactaaatgaataaatccttttattcattttttttatcaacttattaaatccaatataatataatatccaaattaaaatgaaagagtttcatcatcacttaactattaatatgtgtatgtagcctta

SEQ ID NO: 71258 - DNA, 678 bp, Cannabis sativa
caccaccaccaccaccaccaacacaaacaccgccgtcaaattcttctcggttcgaatgcccaaacccgttaacccgacccgaactcgaatcggatcggtgagatcggaagcggcggtggacgatgcttgcgtggcggatacgaattcgagaagcttctacgagcttctagggattccggaaagtgtatcggtggtggaaatcaaacaagcgtataagcaattggcgagaaagtaccatccggacgtttcgccgccgggtcgggtggaggagtatacgaagaggtttattcgggtacaggaggcgtacgagactttgtgtgatccttgtagaagagctgtttatgatcgtgatatggctaagggtgttcatcttgctttctctgctagaacacgattccacaatcaccaggtaattaattaatctttttcaattttttgaatttttttggctagaaaatatgaatttagtttggatattggtgattttagcaataatttgggtttcttcataattttgattattatttttattttttttaattttgaaaatatgaatttagtttggatgtaattttagcattttattttatttttttaattttgaaaatatgaatttaggttggataatggaaattttagaaatttgtgtttaataattttgatcagcattttaatttt

SEQ ID NO: 71259 - DNA, 1019 bp, Cannabis sativa
ggtcaattaccattttgacttattttttagtttttctcttaattttttaaatagagataagtggccaaaaatttgaattagagtatatttgcaattaattaatttagaaatgaaaaagaatagatacatttatttctcaaagatatttagaggaaggagaaaatggatattaataattaatttgggtataaaatgatgtccgatttttgtgatttcacaaaagtcaactatatatacatactggaaatgtaaaacagctacacgaattcaagaaagctgctaaaatcttatagtcaacacctaacggcagttacacattataattgtaatcgtctctatgtataataaataataattatactctttaattaactagtgattctttccacctatatcaatatatatttatataggaaggaaagatataaggtgctcacatgtcaattttaaatcacttcaaatagtattatttatttattattatttttttttttttttatgaataaggttcttgtattgctcaacaacattcataacatttacaacttacttgattacatccaaaatcttctttttttcccccctcctatgtgttctatgtaagtaaatatactacaatattacattttccagcacatgattacatattaccaatccattctctatctatatctttggtttttttcggcattgtttctataattctgagtttgctctcctattgtacctgtttcaccactgctgtaacaggtcttaccttttgattccacaatacatcattcctagcctcccaaatatgatacaccaatccggctaagataaccttcagcatgcttctgcgaattgctgatatagctttgttgttcttaatgtttcgtagcaggctgtgaattgaatctgcatttgttcgtcataacagccaggctttaagctattgcaagcacttcctgctataatcacaagcaaaaaatagatgattgatcgattctttctcctttccacagaaaagacatgtctca

SEQ ID NO: 71260 - DNA, 799 bp, Cannabis sativa
aaaaagaaagaaaaaaaaagggaaccatctcaaacccaaattcatggtaggtcatcggtaaatttatggtatagctaagtatcatttgttgatagtgtctttgccataattttttgtttatataatctttgttccacatttaatccttttatttcctaatgcttactttggactgcggtgacactaggaatgaggatggggaggacaaagaagctattctaattgtccccataggtttaaacaaaatatgatagttgctttggcactttaaattgtccaatgtcacataatgtgttactttataattggtttggcttctttttaggtggttgtgcacttttttttagactactctcctactaagagtatcttcaattgttttttttttttttaaaaaaaaaaagagtatcttcaatggaatgttaaaatagttgtgtattgctatattttagcacattcaaagaaaagttattactctaatggtattttaaaaaatgtgctaaatttagtacatactaaaaattatattaaatttggcatatattaaaaattatgtctagcacaagatataaatagtgttaaatttagttcccaataaaagtgtctctagagtgttaaactagtgatataatgcttaatggtttgctaaatttgtttcatgctaaaatttgtgttaaatttaacgcaagatataacattatactaaatttagcatacaatatatttttttaattatagttttgctattaatcattaatgataagttttaatatacatatcttaattataatattgtttt

SEQ ID NO: 71261 - DNA, 1479 bp, Cannabis sativa
  modified_base (408)..(410): a, c, t, g, unknown or other
ctgtaccaaacttgactttggttgattttcccaacacacactgatcacagaaatctaagtcttgtaatttgtccttcccaaagacacccttcttttccatgtaaagctggaaattcaaaaaatggaaagcttccttccaatcacaggaatcatgtgaaattggtaaaggattcacctttagcctccacctgtccacatatacagactaaaacaagcctttgcaatcatacataccattagagagtagaataaagaaaacaaacaataagaataagaattgtccacactacaaaaaaatcttactgttagtcataacaaaacttgtgactatattagtgaaaagattgtgactaattataaatcacaatttgtgactaaaaaaatcgtgactaaaggtattagtcacannnatcacaatttgttgtgactaaatgtatttttagacacaatacttgttgtgactaaaataaaattaatgacaacttatatctaaatattatgttttaatcacaactaacctttttgtacgttgtgactaaaagttacatttggttacaaaaaaattatgttgtgactaaaagattgtcactaaaaatacttttttttttgtaatgagacgtcatcgatctttgataattctttttataaaatagtctctagaccaaatgtggagtacgtcaaaaatgctattttacaatgccatattttacaaaattagattaagaaaagtttctacaagtatgtgtggtacactatcttaaagggaatttactatttatctattttgtcattcaggagaggtttttatcagtatagtttttttttttttatgattttgtatgttgtagttattttaggttcatctgtatatcttcaaaaaattctaaataatttacagttacaaaaataaaagttcaaatgattgctaaacacgtgtataggaaaaatcaatactcacacgtaatatttgaactttattttatctactataaactaattgaaattttctaaaaatttacaggtgatcttaaataagtacaacatacacatttatgaaaaaaaaaaacaattggaatatataactattttggataccgaagcaaataaaagtctaccaaagcaatcttttagagggtgtagtaacatagactaatagccaaagtttcttattagttttgcaaaaaacaaatcgaaaaaatatgtcgcatgcataccatcctttgccttttctctaaacgttgtttctcagcatttgccttctcgtattctccattttctacacgtcgttgatccggtctaagcctggaatccgtaggagggagtttctccttaattttgtgataagatagaaaacgattaaagatgcataagagaagatgaaaatttatgtcaaatattttttttttttataatatattatgtgtaaagaccgcttagtttaatttggatattagcaggtaattatgattaattatgaaa

SEQ ID NO: 71262 - DNA, 1292 bp, Cannabis sativa
caaaccgtaaatttaaaaaaaagttaaaaaaatagtatatagggtaattcccaaaaaaaaaaatatatactttcaaaataaaaataaaagaacagttaaaaacctcacgtgcgttgcacgtgtcttacagagatccagttaaaacccttctccattttcttcagtctctccctgcatttcgctcagctcactgaaaccctaagacgccgagaattgaatcgcaggtaatttgcgtcaatggcatctggcttatagattattatggttcagttttgttacttttgatttaaacaactgcttttcattgaatcatttatctcgtgcataactgaaactagaaaaattagagttggaatttaagtttggtttggttattgatttgttttcttaatttgaaagcagttgcaaaaaggaaaaggggaagatgcctttgtatgactgtatgcttttgttgaaaccccatgtgaagaaggaggctctcatggagttggtttctagggtaggaaaacatgtttacagaaaaaatggggtcctcactgaggttaaatcatttggaactgttcagttgggttatggtattaagaagcttgatggaaggtactaccaggtaggttttctactaaatcattattatgatttctttcctttctttctgaaattgttctcttttaagaatttagctgtgatgcttttgtggtttcatgatcatctaaggacacatttagaacttcatctttgccgtaccttttttctttggcatgatttattgtgattttgcttatatgaaagaggatatcaataccaattctttgatgtattaacgttattggaggttgattgctgggagacagtgaaatttcattctggggatttctgaatttctaatgttgcttgtggatcattgtaaggattatcagttaaagaacgtaatttttggtggttgccttgatgagacaatttttgatctgattatatgtgaaggctttatgtatttatagtagttaactggaaataatttcttgttgttttctgttaaattggtgtttttcacttattttgtattaattctgtattgttaatacaagtttggggtcatttccgaaaaaagaaaggttgaggttctgtttaaaacataaaaataagaaatcaaagtaatatctcaacttgattttaagtttgaaattctacagatttagagttcaattatgtagtatgctgtgagtgtgtgttctctaattcttcaattaataaagaatatactacaataatactagaaagcattagattatcga

SEQ ID NO: 71263 - DNA, 2891 bp, Cannabis sativa
  modified_base (2574)..(2576): a, c, t, g, unknown or other
aggcataggtggtagatggatgtcactgccttctgatcattaagggcaagtcggcttatcatggcattgaaggtcgatagaacattgattatgacaaattgtgccattagagttctagcggttggattttctccaactttgagtggtaatatgatatacctgacaggagcgatgcctttgcaaaagaagccatacatcacttgactgcagggtgtcaggtcgatgagatgtagccccatgtttccatatgttgatttgaaaagattgttgaaggaggctccatcatccaccatgaatcttgctattgtcatattctcgatttgtgcagtaatgaccaaggggtcgttgtgtgggaaactaacttgagaaacgtcttcttatgtgaaagaaattgtaggctctataagctttggttacttagagaccttatcttgaacgaccaggatgttgcttttaggctcgtgacggagtgcccgagcatagcgctccctagctttgctagtctcacctacaatgtgccgtctgccattaatgacccctaagtgtcctgccataagttgtggcattggatctccattgttatgcacaaaacaacacatgcgaggattgttatgccttatgaggtatttaatctccctcttcaaattcaaccactcattggtgtcatggcaaaagtcattatgaaatcgatagatctttgacatgcccctcttgctcaactcccttttcattggaaagggattcgtgtagaggattgctccctaaatggccgtgaagatggcggtaggtttctctgtcaggagagtgaagtaggtatccttctcctccttattcttttgtggcatggtagaagtgttaaatttctgctttttgccactgtttctcccagagctgttggttttgcattagttactagtgtttttgccactagaagtttgggtggagtttctggtgtctgcctgcgcgcttggtacggcatgagatttcaggatgtctcgtgactgccggttttggcaagccccatctaggcctgtcgtatggcttctgaaagtttgataaagccatcagctctatcatggaactcctttatgttgttggttaagatccttcaaatgtctttctagaagtcactcagtgggagtatgcccccactatggtcgtatattggactttttctataaggcctttgacttttgtatcctcagccacgaacctctggatgtaatcctttaaaggttctcttagtcgctgcttgactttgacaagatcttctaacctgggatgggacaagcctcgaggactagaattgcgtgttaaattctcgaaagaacttgaccctatagtttaatcttcattagttgagtttgaagtacaattattgagctatttttgacaaagaggctggaatatgtgacatcacacatcactagtaaccttcgagagatcgagttacatcttaaagtatttgatgtgcgctaatgggtcttctcgaccagtatacatcttccataatgggatcttgaatttgggcaaggccaaggcatttttgtatgccaagaatggtgatcacctcgaccggtctagttcaagatctcctctgaggtaataaaaagtttgaatggaaagaggaatacgagaaagcttttcaagaatgaaaaagacaacttgcaaagagtcccgtactctcgaaacccttggacgaagaagaattaggaatatactttgctatcactgaatatgttgtaagcgccgtcctgataagagaagaaaacaacgtccatcatcttgtctactatataagcaacagtctcgatgaagctgagggacgatatcctttaatagaaaaactcgcttactgcctgatcttagcaacaaggaagttaaggccatatttccaagctcaccctgttcgagtgtacacttaccaaccattgcgccaagtattgaaagagcttgatgcctttaggcagttacttaaattggcaatagagttgggtcaatacaaaataatctttcaaccccgtacaatagttaagggataggccttggcagactttgttgttgagtgcacaagcaaaaaagaaacatatgggacaacttggagctagtacaagaacccttgtaagaaaacaacgaagactgacctacctagaaatttcacgtggacagatcagccacagaccagctttctgggtgtaaggaatctcccttgtcacacatgggggtaacacctgcacagaacaatcactactacgaatggtagaattcacgacagtcccaaaaatgccttttttagcactgtcgttaaaaagaattttgagtgttgaaaaccgtcgcctataatatactataagggatggtttttaacactcgtatagattaggcgacagtttgtaagtgcaaatttttttgaaaatggttgcccatactttgaccgacgattcaaaatagttgtgaaaaggtttaataaaatgaaccctcgctcctcactgtcaatctcactttcatccaaacccttgatctcactatcaatcacaaacatgatcttactcacatctctctctctctctctcnnnctctcgctctctctctctctctatctctctttttctcacggcgacaaacctctgccccaactggtgacgcacctccgcctccatcggtgacgcacctccgcccccactggtgacgcacctcacacacaaatcttgtttattaaagatttcttttgaaactgttcttcaagcttttaaaattttttgctggtgtatcttctttgtcaactaacctggtaatagaatcagaaaaattaaaaatgattaaacccgtagcagtttcaagtagatctttttgtgtagatttagagttattttctggtcattctataggtt

SEQ ID NO: 71264 - DNA, 746 bp, Cannabis sativa
agatcattactatcaacatggaaagaatattttggagcggaattactacaatttccttagtacaataaatatagacttgtctcttatattactactttggtagtagtggaatggaatcttagctgacaacaagaaagtacttttactaacctgtattaacttcgtcaccgcccaagtggaatagctcaaagggaaaaatctctctcatatctgtataaaatagtaaatataggtagagagaaaaaaaaaaaaagggaaaattttcttccgcaactttacaaagtgaatctagtgatagctaataacaataaaaagtaattagcagtgagtgaaaagtaagaaagtgactattgtaagaagatgcgcgattattatttctttaaacgtaggaatgtagcatcaataatgatggatcaagatgactgaatagttcagattttcctttaattcataaacaataatactagtcctactctcttgaattaagaatctcttgaaaaggaaaaaggaggctacactgtgtaactggagctacataaaaaaaccccatgcttaagctgaacgttgtttagctttagcttagctaaaaccaaacacaaaaacagcacatccatgagaaacatgacagactgcagtattggctgctcgatggagagtgtggctggaaaggaatttgacgattttcgaaggacaggctaatgatgagaatagtctttgagatattattagatttctggttgcctttt

SEQ ID NO: 71265 - DNA, 1628 bp, Cannabis sativa
acaattagaggtctggctctcaataattaattattaacagctaacaaatccatgttttatttatattaaactacatatatatatattgctcaatttgaatagaagtatatatataatatatagatatatatatatttcatatacaatttgaatactcaagtatatctaataattaactgagcaacttgaatttcttatggttaattatcagattcaacaagatctgcagttgatggttgaaaaacaagggaagcaacttcaaatgatatttgagcaccaaaaaaagaccaacaaaaagttcttcatgatcaactcatcaaagtctcccatgcaagttattaatactactgatcctagcttaaatactggtcactatttctccatcgcagaagattctggtagttcccacttttaatcagatttatatataacattaacaaataacatttctataattaagtaaacatgaaaggtcttggaaatggcaaccaaaatgtaatttcatttgtaaaatcttagtcctttactgcaaactttgtctcagtcaatatactagtaaaattgatatttaaccatctctatgcttcacgtggcaaatttgtcataaaaatcgacaaatattatatttggtacgtataattaatgttttaattgtactcattgtactctaatacattataaagttatacaattaatactattactactgtcacaattccagccctaagccgtggcagttatataacattcataacttgagtggtcaaatgtcaggcacatactgacagtttatatatatattcacaagattgtaaaatttacctgttataaattatttatttgacctattgacagttaatgaaatattggttaaaatcagattattggatctgtcaacaagtcaaccataacaattttgatcaaacaataatatttttttatagaaacaaattttaataataaataatatataaaacacacacatgcaacaaactagaaagttgtatatagatttatttaatttaaattaattaaataattaaattattttcgaaaaatctaaaaaataaattattatttacgaaaataataaaattaaataattaattaatttaaaattaaacctataaatttaaaaaattaggtttttaacaaaccaaaatatttattcaaaaatgtcaactaacttttcaaaatttatgttatttagaaaaaataaaatgtcttataaaattaaatgataaataaatatcatttatctaatttaataatttaatttaaataaaataacaaaaatttgaaagttgacaaaatatctagttagatttttaaaattttctaaattattttaattaaaaatataacttattctaaatatcaaataaggccattttataaaattaattaaatattgtaaaatataaaatatctaaccttatatttaaaaataagatagaataataaaaaaaaaatatggtgaccaattaagcaaaaacttagattttatccattttcaagttcaaaatctactaatatttaatattaattaattttattttgatacttagatttgagatttgaaaaataaaaaatttaaatacaaaatgacacaaaaagttcaaaattac

SEQ ID NO: 71266 - DNA, 1124 bp, Cannabis sativa
tttgtaacaaaactattagtataagacaaacacaatcactaataataataataaaaaattataataaaactattagatttttaccttagaactgaaatcgccaccaataccaaccaaaaattccaccaccgtaatcccaaataactcacaataaaaacaataataaaatttaaaaaaccaaaaataatgcattgtacctcaataaaattattaaagattaaatttttacattgataaacgttgagatttaatgtttttatgtctaaattcgtttgtcgaagctacaaccaacgcactcactttgtgctgacaagactaaatattattattctaatactattaatatctttttgggtgttgaaaatgataaattttgcaaaaacatgaaagaaaattgtggagaaattagaatttagggctgaatgggcggtggttggtgaagattttagttgggtattttttgaggagatagatgttggaggagacgaagtgattcattggggtttactgaaggaattttaaggtcatatgaagtcggttatgtaataatcggctccataggagcacacatacacgtgttccctatggagtcgccgactccgtaggtccttcaaaaatacatgtgtcctctatagagtcggttatttcataataactatctccatagactttttcatgagacttaaaggctttggctacccttcttatattactcagctaaaataactgcctctaaaggctaattttaaagtagtctttagacttagtctttatagtagtccattacaaactatatactattaagtattattgctcctttttatggagcaagtggtattaggtggtgactaggggagtgaatgtgtgaggagagggagatagagagcagggacaaagagactacgaatggggagaaagggggagcggggagacaaagggagtagggagagagagggagcggggagaaagagggagcaggggagaaggagtgaagcagtgagcttctcatgtggtgaggtccacttgtgcttgggcatctcctcatgttggctctccctctcgagtggtgtctcaccttggtacttgggcttttttttccttgcccataaaattttaaaagaaaa

SEQ ID NO: 71267 - DNA, 1625 bp, Cannabis sativa
atatatatatatatataggttgatacagtggtaaagtctttttgatgcctttaggtttgttatatttcagccaaaaatcatgattacaactatagaaaatctaaggagaaaagaatattttctttttctcactttttgttttgaatgtggtattagttaagtgtagggcttaatttattaaacaagtaataaaaatgttgtgtatgtataataaatagtgttttgtgttgttaaggaaaagggaattgcctccgacacaagctgaaaaaagaggttggaagctccttcttcacatcatcaaaaccccaaatggtatacgtgttcttctctcctaggaatctatctctgtgttcctttctataagatagcaatgagtttcagggcatatatcagccatggctcatcatcacaaacatgaagactttgcacctcggctttctcaagaaaagcctaggcgctctcttgggttgccattgtcaccattgatgcttatggatagcctttctcgaaagagtagtgtttcttatgataagcttccagaggagcctctcaagctctctgttctcaaacttgatggctcttcctttggtaatatttctactttttactttccttctttcttttctgttattaccagtttccaatttccatgaacacaaattgttaggattttttcagataattatataatatattattttttattttttttatatatttttaggtttaattttttttgttgttttataaaaataacaccaaaataataaaaaaaaaattacataagaataattgaaaaataacatcgaaacttcaaaacgataacaaaaatttaacaacaaattaacaagagtacaacataaaagtaaataaaaaaaatcgtatttttcataaataaaattataaaaatcgtaaaaatatttaaaatttcgtataactgtatttttgtaattttttttttattatttttgtataattataaagtaatctcttttttttttttcattgtatattattttagtctttcaaactctaacccactcttctagcctatattaccctggattaggtacatttataactattttataatttttatttgtatatacctaattaatagaaaaaaattataagattttttttttgaagaagatatttataggatttagtagatttgttaagaaattttatatttataagaaatatgtatgataatttttctacatattactatattaatatggcctataaaatttaataacatataaattttaaaaacaattatttgttcttttaatactttttaaccttttttttagtagttgtagtatttctttattatttatattgtttttttgcttgaaaaaaatacacttttttagtaaatattggttacttatatcttttttctaatttttagtaaggtattgtaattttctgagggtatttaaacataccttttttttatgtattatttataattttacgttctaaaatttttatttataaaaatatacttgttaataaaaaataacgaaaattttaccttgtgacaattataaataaattataaaacgataaaaagtaattagaaaaacaatttcataataactataaataaatta

SEQ ID NO: 71268 - DNA, 1441 bp, Cannabis sativa
atgtcaaaagcctatgatagagtgggttggcggttcattgaagcggtgatgatttgtttgggatatgaccaacagtgggtaaacaaagtcatgaattgtatcacatcggtgtccttttcaatactcataaatggtgaagtgtgtggccaaattcaaccaaactgtgggatccgccaaggggaccctctctcaccttacttgttcttgctctgtgcggaaggtctatcttgtcttatacaagaagcggaaagagctgatatgattcatgggctcaagtttggaaaagaaggtatcaagttatcccatctatttttcgctgacgacagtttcatatttgtagatgcaaatccttcggagggaagaattttgaaagctgtcttagatgagtattccatgctctcgggtcaaaaaattaacttcaccaattctgattatgtgttggctgcaagattaagaaggaagaaggggagcaacttgcggctgtgattggagtaaaacttgtggaatgctgcacaaagtacttagggatgccagcggttattggaaaaagaaagaaggaggtgtttgaggacattcgaactaagattagagccaaacttcaaggatggaaagccaaccttttctctcaagcgggaagggaaattcttctcaaagaaatcatccaagcaatccctacttatatcatgagctatttttgcctcccgaaggaactaatcaaagatatccatgccatgatggccaggttttggtggggatcctcggattcaaaacagaaaattccttgggggaaatggcacaagttatgcaaaccaaaggagaaaggaggtatgggcttcaaaaacttggaaacatttaatcaatccttattggcgaaacaaggttggaaaattcttcacaacccccaatcgatgatggctcgggtattaaaggcttgctacttcaccaactctagttttttggaggctaaaataggaggtttcggctcttttgtttggagaagcataatttggggaaggcaaatcatagaaaaaggaattagatttctatccggaaaagacattcgaataaatgaagacaaatggattccccgccctttcacctttacattgcgcacaccggtaaaggttcctaagggaacagtgatggatactctaaaggaggagaatggtgattggaatcaggatttaatcaaaaattacttccaccatgatgatattcctattattttaggaatggccccttgcaaaagaaactccaatgatgaccttgtgtggcacttcaccccggatggattatatactgttagtagtggctatgagatagccaaattaaacgattgtattgctggcccctcctctcacgcaataacaaagaattggtggaatggcatatggaagatcgaggcccctcccaaaatccgaaactgttgggttttatgccc

SEQ ID NO: 71269 - DNA, 939 bp, Cannabis sativa
ggagggtattttgaggaaaacaataaaattgtcatatattaaaaatattggtaagtataagtttagaaatttttttttaaagtaatgtaagcatagaaattcagatttcccattgataatatattatgaaaaaaaaaaggtggtagttttaggaatttgatcttagcaaaaaacgaccaaagaatcatccccaactaattgtacaaaacaaatcatgaaacaaaatcttatcgacctcggtaaggtggtaatactaataagaaggattaatgccatgtggaagttgaggatgtgggacctgaaaaaccattgatgagttgttaaacgttaaaagccaaagaaaacaaaggcctgagctcttggttctcacaatggtagacaagagcagtagtagtagggagaccttggctgacattgtacatcattcatactgacccttttcttaacaaaatgataatgagaatcagtaagtactactcacttcgtctcaactcatctcactaactttattttttaatattcccacaaaaaaaggaaaaaaaaaatcaattttacaatatttaaaatttggcagtgtctgaggaggaattttgttagcagagttggcagaggccccggagtgctttccaaatcttgtgctgctattcgcgtggaggcgtgctttctctgcctcactacgtcatcatcaactttgcaattttttgttttttttcttttagttttccaaatatgaaattgttacaggcttttatcattttttgatgaagatctcagtaggcaaaaaaattaataaaagaaaaaggcattttaacaggcattcgtgtgattgtttttcctatttagaacaaccctcgtatgtgttggaagtagtggcgttctattagaatcggttaagttagttatgttaattactcgggttaccatatttcagctgaagtt

SEQ ID NO: 71270 - DNA, 1093 bp, Cannabis sativa
tagtatttgagttataatttctcatagaaatttaattaaattttaggtgtattataaatgataaacatgaattttaatatttttataatttatgctcaataaaagtggaaatgcaacggatgaccattaaagtcacatgcatatggtatagtatctaaaatttaacggggcgaatttattagacatatagaatatcgaattattgcaggataatagtttttaaccattttacccgtgggcatttaagttacttcatagtaatgtagagtgtattttagtcttttggtttaagattgatatcaagttattaatggagctaattctatgtttatccatagttctgtggttgattaaaaagagaataagacaaaatattttaagtctaccttcatttctctagaaccaagcaagaactagaccgaaaattcatctttctcttggtgatttagtagaaattcatagggttttcaagtgagtattgaacgtaaagccctaactcctctatcttcattattttctaagttttaagcttgattttaagtttggttttgctactgtaattttgttagggtttgggttggttcggggtctgtttgtggagtacaatcgttagagcattttatttaatcaaaagtgcaattttgagtgtataatggaatcatgagaaattaataatttaggaaatttacgagaataaatttcagatcaacttagtggaagctttattatataggtccatgatccctacaatgcctgcgatattatcatcttgtataacttaattaattagtttagtcattcaattaaaattcataaactaactatgttatgtttaacaatttacactaaggtggtgttaaattgagaataaaagagagattaggtttcatttgttaactatgacactttgtgcgtataattaattagtatatttaaattatattttatttcatacagtaagttgacctaattcattaaatcaaaaatacatccactattttgatagtcaaataaatattcaaattcaatgttggaacagtgggagaggcattttacaatacgaaataacataaaaacactcattaaaatgaaa

SEQ ID NO: 71271 - DNA, 2126 bp, Cannabis sativa
taaaagtaaaagtggcacttagagagatatagagaagaaggtaaaatttgagagaaatcatcatcaaggtggtggggtgtcatcatcaatgacctttagctcctacaataaactttgtttgatttcaataaaacagaataaaatacaaacttttttaatttatttttcaatattattcatatgaaattttgtaagtgtaataacaataatgttccttttcttgtgctagatcacaaatgcaaagctaccaccgcacctaaaaattaaaattaaaggtgatgagttaggacttttgtttttgtgcatggcagccttagatttttggttatctacattaagaccccacaaaatcatgtctacactttagcttttagggtttgaagaattattattattagtataaagcaatgttttaaaagcattcttattagccacttgtagtatccaacaccaccacaatataatattttacaaataagcattgttattgggcaccagtagtacttagaatcttctaagcgtgtcgccttacgattggttaacgatacttactaaaaaatattatattaaattatatgagactcaatacttagttgaagtgctaggcaccaatggcaccttctagcatttctctttacaactacttagtaacttatcataataattattaaattaaaataaattggcttgatttaattctaccaataataatatgtctagaataccaacatgaggtaacactttaagaataattaatagttatttattgagatacgtggaatctaacacttaaatacactaatataataatatggcactttatgctaatggtaacaagcatttctttttgtgagctaaattttgttaggaggatttgttgttttttgttggtttggtgcttgggtcactaggtactgatgattatattacttggcattataatataaatggtgagtattttgtttaaagtgagtatcaagtggagatcaagaagagagaggtggaggaggatatggataggatggaacagtggtggagacgagtatagggtttgaaggtcccgttgaagatcaatcattttctttggcgtttttgtcatgggtggttgccaacttctaaggtgctaccaaaagtggaatgagggaggtggtggggtgttgtaatgtggtttgcggaaggaagatgaagattggtaccatgttatttagggttgtgttcaggtcaattttttttttttgaaaagttgcaggttttgggaaggtggttcgaaaatgtggtgatgaagaccttatttttttaagctgcattggaaggctgatgccaaaagataagtttgatttctttattgtcttagcttggaaggttatgtgaaactgtcttacataaattttttgtgttttctgtggatcgggatttggattgggtatctgattatttgcattagttttgggatacgaaacactgtggacgtctgaatgaggttaggccgaaatgtaaatggcaacctcctgtggtgggtaatttgatgattaatgtcgatgttgcgattgatgaggttgtcgagtgttgtagtacatgtggggtggttcgatatcatttgggagagattattgcagcacaaatgtataattttttaataggtcatttttcccttattgttgttgaattgttagctataaaatatgggattgagttgagtggtccatctggcgggttcgaaatgacaaggctcacactaataagctagataatgttaaatattacattgattctattcgtatctcttatgtagcgtcatgcttctcttttctctcctcctgctccgaggcctttagagatctagcatccccctccccaggagtggcttaaactgaactgtgatgttaaagtgggtttggaaagcatgtgtactgcagtggtagtaagaaaccatcttggaacggacttgttagaatttttgaatgctctatgtggggaagcggttgcatgcttggcgttggaagtagcttcggatattagatgcaagtttatttttgtagagagcgactcgagagtagccatcaatgcacttaatgggtaggagactcattgggcgcttgaacactatgtctctttttgtaatagac

SEQ ID NO: 71272 - DNA, 627 bp, Cannabis sativa
aacaataaaataataagaaaactatataagaatacattaaaaaactgtaaaaaaatttaaaattctgtagaactatattttgtaatttttgttgttgtttatatttgtgtatgtgtgtgtttttttttatataaataatccataaagaataggttgatccatttataaaaaaaacagtaaggctatgtaacaaaaataggatggcctatttatttaaaacttattggtccaataaagcatagtttagcaatgagtccgtcaccaataatttataaaaaaaattacattgtttatccactttactttcttgtaatttttttttttttttattttgagctccaaaaattggaagggtcctaaatcggtggcctagctctagatataaaagatgtcataatatattttctttcatatttttctttattttaatgataagcatctattaaaacatgtaaaaaatattttcataccatcaattattttttttaagcatctccatattaaagatattcttatactactaatagggttgttcatccgatccaatccgcacttttttgatcaaacaacatccaatccgcacaatagctcaaatccaatccaattcaatccgcaaaagtgcggatt

SEQ ID NO: 71273 - DNA, 1202 bp, Cannabis sativa
atgtctaccttttatgcatgccagattaccaagtgacggttgtcttttttctgacgaagattagatttgtgtcccacatccaagcatgttagtgcgcacacctccaccacttttttaacatacgggtaatgcaaacctctaattttaaaggcgaaagctttgggcaacacgtggctcctatctttaaaggttaaaccattgaaggacacatatccatatagtacaaaatagtctcaattatccagctgcagcacgcacgggtattatgtttctcacgagacccaacaatgtgctactattactttgggtcttcttcttcaagagaaacttagagtatagagttagagtttcctgcaaaaatcttgtaaacacttcaaaaataccctaagaggctaatagactgactcgtggactaaggttaattaatattcgaaccacgtaaaaaatcttcctctgtatttctgcattttgttatttctttagttctcaaatatttagtttctaaaaatttttgtaaatactattgatatttcatattttcctcacaactaagtataaatacatttttcactaattatatattattttgtttatgttataaaataatataaaatagataagaagaaaagaagaagatgaagagagaaagagaaattgaatgagaatttctcagttgtttattccaatagggtgaacccctatttatacaaaaatatgactaaaagaatgagaaaataaatcaatgtaataaaagaaaatacaaccaagcattaatggtgataattaatttggtgatttagacatccataaataatatttcataacactcccccttggatgtccataaaatctgtctcatttaaaaccttactgaaaaaacttgggcaaaagagaaggagtgtagtatgaattaaccccctctcatttaggcattcgtagggatcttctaatcgatgaattctaatcttgtgagctatcttctaaaatattgatgttggtaatgactttatgaataagtctgcaagattgatacttgatttaatttgttgaacaccaatatgcattctcttgaaatgtataatgaagaattcggttaaatgtgttttaattctatctccttcaatatattctccttttaattgagcgatgcaagtagtattatcttcatagagaactgcgtgtgttgatacttctttattgag

SEQ ID NO: 71274 - DNA, 1178 bp, Cannabis sativa
tgggagagccaatgctaggtcaaattgcatgattaaattggatattaggaaagcatatgacacggtggaatgggactttataaaagaagtgttacaaacatttggatttcctacagacttcatccaattagtcatgtgctgcatcaagacacctcggtttagtctaatgattaatggagagatgcaaggctattttggagctaaaagaggacttcatcaaggtgatccaatatcccctcttatcttcatacttggcatggaatatctatcagggattatgaataaaattgggagaaagaatgatttcaagtatcatgaaagatgtcggaatatgaagttaaaccatttgtgttttgcagataatgtactactgttttgccatggagattttcgatccatctacctacttttacaaaggcttaagctattctcacaaacttctggtttgcagccaagtcaagaaaattccgcggtatattgctcgagaatggcacaaaatgagatacaacggttcctagatgcatctggttttatgtgaagtcaaatgtcatttcgttatcttggcataccaatttactccaaaaaactttctaaggcagaatgttcgtgcctcattgagaagatgactgctcggataagatcatggagttcaaggcacatatcctttgctggaagaggaacatttattaattcagtattgattgctatacattcatattggggatagattatgttgcttccatagagtgttttgaaggagattatagctatatgtcgatcatttctctagaaagggaaggctggatacaatggcccggtgtatatagcttgggataacttgtgtagaccaaggaaagaaggaggattgggatttagaaatctactgtattggaacaaggcatcacttgggaagtatgtatgggcagtagcaacaaaacaagataacctttgggttaaatgggtacacaatgtctatataaaaggtgctagatggtgggactatacaagcactaatcaaagcagctggtattggcgacaaattgttaaagtgaaagaggagatcaaaggaaaaatcaatccacaacaatttattttgaagagatatactatttagtagggatacaggtggttaacaccacactttgaatgcaaacacatggtatggaaaggtatgggga

SEQ ID NO: 71275 - DNA, 1102 bp, Cannabis sativa
aaatatattgtacaacaaaatctatatatcaacaacccacaacaacccataaaaaattaaaaaaaattgacataactttaaaataaaaaatattttaactaaactaatgtagatataccatgatctttaagtaatttgtttctaattctaaaaaaaataataaaaaaattattaatttttttatgtggcaaaagacaatatgaataataaatagtgtaaaagaatcatttcttaacaagttttgaaatgaggacatttacttacatagtgctatgattttgggtcatttgctataattttccatataatataatattttgacctcaaacctaagcccaatccactaagttatattagaataaataagatttttgcccctaaactataacatttgtagagttttgtctcttgaacttttctctttgcaaaaattgcctttgaactatgcaaatcattgcaaatatctctctcaagttacatgatgctcattttataaaacaatttgcttatgtggctacgaacataggtataattgttcatttaataactataagctacctaaaatttagttttttggcattaaacatacaaacaatagttctaagaatacacatgcatactctcataatttattattagattgctatttatgtatttattttttgtctggactctataactagtttagattaatgttatgttagtgctataccaacaaattatttaaataaatgaccataatgcaacttctaggggatatttgcaataatttttatagttcaggagaaatttttataacagagaaaaatttagagggcaaaactctacaagagtcaattaaggggaggataaattgtatttttttatactatattgaataaaatatattaaaaattgaaataaaatttgtttattaatatttttccatggatgttggggcccatatagttgaccctttttggagcacaaaaatagtttattttagcaaatgggtcgacctacatttaaaaatggaccaagatacaaaatggccctaaatctaacaattaagttaataaatgtccctttttataaaaaattaacaaaatgtccattctgttaa

SEQ ID NO: 71276 - DNA, 864 bp, Cannabis sativa
tatattatgtatagatattttgtttactaatacagagatgaaagcaatttgaactggtgtgaattatagtgattcttaatttattgaaaaagttttgtatttgttgttttgtaatggttgaatacaacagttctttgttcatacatatgtgagaacacatatatatatgcgtacgtgtatatatattgaaaatgtgtgttcattttgtttaaatcaggaacgatagtgattcttagttgagattctacaatattgattgaattatttgttgtattgtgatgattgcgttgttcatatatgtatgtgatcatctatatatatatttagatatagatatacattttgtttagtatgattattatattggttcttgtttgaattaattaagttaaagaattctagtgattcttagttgagcttctgcaagtagaactattgtttgttcatatatgtatgacaacacattataatgttgatatataagtattaacattattgatagaagtaatgttacattcttttcataagtttctccaatgtatgaaaaatcactctttgtacaaaattgcatgtttatataagtgaaacctttctatatgaatgtatataataatcatataatcttgtatattatctcatatgcttgaatcttttgctatgcatttccaaattttgcccctttaactcccaatttttgaagaagaaatagtaaagctaaaactccatattgttaaaggattaaacacactttgattttaaactgttttttgcaatgaaaatgcttaagctatacaaaatgtgaacttgaattttttcttccaaaggcaaaattgtttgttaagaaggcctcttcctttcatgctc

SEQ ID NO: 71277 - DNA, 1017 bp, Cannabis sativa
tttttttttatgttttcaataagagtcccattgttatgggtttatttagtccacctgtttgtgtggagttttcatcatctatctttgatagtatggtggtgttagtttttttgtcacaattggttcatgtcacttggttcatgtcactgatttagtggcctatttatgtgacaaaggttaaatctgagaagcttttaatactataagattgagaatgctcatattgcaccattaaaaatactgcatgtatattgtttctctttaggtatttgaggtttaacctcttgatcaaggaaattgttctcatgttcaaaaaaaaaaaaagtgaaaataattaaagatgttttataaaaattatgtaatataacacacaggttgcaagtagttaacttttggtgacaaatattcatgtatatttttttacctcatttttagattattattaattcattactttagatagcaatttgatggcgctaatatagaaatctaactatttcatggatttttatgtcattaatggtgtttttttttatcaactgtcattaatgttgttattgtcagtttttctccatttgttaattcatatatattcatatttcctagagataggaaatgctggctgtagctaatttattggtctaattttcataaagcttcaccaccaatttttataaagcttcatcaccaattaaatggttaaatgttacaaaatttagcaaaaggtgcaaatttataactgtattatattaagagtactttttaataagccacatatcataaggtatattatttggtagtgcaagttcaggagaaaaatactaattattctttttaagaaaaaaaaaaaaaacacaaagaaaaagtaaaaagaactaatgatgctaatttttaaaagttacgggctaataaaattttttaggttgggaatctaattgaaaagagagattatttcacaaaaacataaaaagaacaaaaaaattataaaaatacggttttacggaattttaaatattt

SEQ ID NO: 71278 - DNA, 934 bp, Cannabis sativa
aaataaaataaataacctggtgacaagtctttccattctcagaatcgtaaattcgggctccgacgacgcgaactccaggagatttaattcgcttgggctgttgagcattctcctcggcaacagcagcagcccgatcagtattgttggttactttggtacccttcttgtgaggagaagagagcttggttttggattcagatttggaaggaacagccatggccagtgctgtaacttgttgcttcagacgaaatagaagagaataataatgaaaatctaaagctgggactcgttggttttgaagttatgattcaattcatctttcgaattgagaggcgggaatcgctgaattgattttggtgccaaaatccaaatttgggtttttcaactggagagcggcaattccaagttttgattttgataatagactaatttggggctagaaatttgggtccataccacaacttcatcctatctacactttttttcctattgggttttatacaagtagcctttttccttctctctcactcaacttctttcttctttttctttttttaacacttgttagtatattttcaaaaaacaaaaaacacttgttaggattttgacacttttcttaaatgtttctctatctttaatttaatgcttcaaatttcaattgaatgatttgtcaaaaaaaaaaaaaaaagtttaaggtgaactaataaatacacataataaattattaaatcaatttaattattttaaattatgtggttgaaattagtaattatttttgaagaaatataataaattataaaattatctgattcatagcttacttttatagataatttaaggagtttacaaacttaggttagttagaatttttaggtaacaaattaaattatatggatggatagaaaattggagcatttccaattatattctttgg

SEQ ID NO: 71279 - DNA, 953 bp, Cannabis sativa
acttccccttcaaaattcactttcagggtaacaacccaatcacaaatagcccaattcctaatcacacacaactttttccaacaatgtaatgagaaaaatcccaaaaattcacaataaaatttcaagattctccaacaatccaaaattttccactaataattgtatagagagtctaagaaattgttacctcaatgaaaatccacctttactctaactccattgaataaaatcttgaagttcttgaggttgaagatgatgaatagtgaaatttgaaatttggatgaggtttagggattttgggtgtgattttgaaaggaaaagagtgtttgatgagaggaagagtgatttagaatgatttgggatgaaagattgtggttagatttgaagaaaaagggtttaggatgagattagatggagaaagatggttatggggaggagtttttcggatgtattgggttagggttgagaaaagaggtgtttttgaaattgtgtgacgtttggccccttttgaacccgtcagcccatctcaccgcggctagagtatacctcgccacagtgagataggctccaaaaataacctctctgcccaggagatatggccgcagcggccctcctcctcaccgcggcgtgatgccctcgaaaaaatcatgcttctgtccagctactatggccgcagcgaccgtccatctggccgcgtcgagatagcctcgaaaaaatccttctctgtagttcacttatggccgcggcgacatgctttctcgccgcggccactgggccgaaccccgaaaaaaaaaatttcttcttttttttttcatatgcagtacaaaaatttaaagaaaaccaaaatttggtttaccagttcactaaacataaactaaaaagaagagaaataaaaataacaaggaaaacataagaaagttcaactaaaacatcaagaaaatttgggttgcctc

SEQ ID NO: 71280 - DNA, 794 bp, Cannabis sativa
  modified_base (764)..(768): a, c, t, g, unknown or other
ggacattttgccgttagtaatagtaccgttggtgatgctattaatttttgtagtgcgatcccataactatgattttctttaaaaattattacatccagattgaccttgatgctattaattggtggaacaattcaacactgaacttagtcacccgccatgcatacctaaccaggacgattctaaattagagttttgattagatatttcttaatctctagacaattagatttttataggatgttgatatatatattgacaaattataggcccagcatattagttgcaataaacctgaattttatttgataattattataggttactggcgtgcgttatatatactatatagtctatatatttgagagattttccacgactcacgaagcatgcaaagtaagaccaaatctcaaccatgcgctcctttccttccattttgggtccacaccaacaaaacaaaacgtgagtgtcctcaattatttttctaataataaaaataaagttttatttgcaccataagtccccaaattatatactggctaatttagatttttaatcctgaactttgacatgtatcaaattatacctcctgaacttttaaagtccttaaaaatgtttcctgaactattaaaattattgaatttaaggactgttttctaattttagtaaaaaagtctaagatggatcaaagttcaggtactataatttagtacatgtcaaagtttgaggggcacgatttagttgatatcaaagtctggggagcatgnnnnngtacataaacaatcactgaaatagta

SEQ ID NO: 71281 - DNA, 1280 bp, Cannabis sativa
cctgacctcaaagagacgacgaaatttgttcaaaggccacatggcctcatcatacgaagccaaggcgttgttcgagaatacatcacaagtcttgtactttctcctagcaggcacaacctccttaacctcagacgcactgtccgtcccgatctaggcctcctcatctcgaccaaccacaggctacccaaccataggttcctcaacttggttggcccctggctctccagcatatcaaggttgtacgacctcctcaacaaattcgaccctccctctagtctctagcatagcaatgttgttattaattggtattaggaaacaatcaatttcaaacaaatgcattcacactctaagaattgcacattgaattgcctttagttcctagaaccagattgagagagatttgagagaatgaataatacttttattagtttaatttgaaatgcaagttaccatctcgatggtgagacttacacttatttatagttgatctaaaaggaaacataacaaactaactaacttttggtcaaacatagaaattgtttgacttgttaactagtatccctctaactgtactaactgaataaacagaccacgactaacaattttcaccttggtcgaattattcatgtgtaacaaaacaataaataatcaaaaaattagagggtgaatcacagaccactaatggtagtgattccaagtaagttcaaacaatgtctgaacttggcagtggggagaggtttaatgtgtatgccaaatgcattctcctttgttgaaaccttcttaagcttcacttttccttctgttatgaaatctctaacgaattggagtcgcacatcaatatgcttagttcgtcatggtacatctgatttttgaataagtgcaatgcactttggctatcacaatgtacttcaatgcgcctctattccaagctcaactctctaataattcatttcagccatatggattcttttactgcttcattacaggcaatgtcttatgcctcagtagtggagagtgcaacaatattttggagatttactttccaactaattatgcagttacctagcagaaaaatccagtcagtttgagatctcctagtgtccatatcacctacatagtcagagtccacaaagtctttaagatcagactctgttgagggagcttgtgtgtgaaataatgtgccttttaagtacctcaccacccattttgttatcttccagtattctatgcctgggttccccatgaatctacttatgacacttacaacttggcttaaatta

SEQ ID NO: 71282 - DNA, 618 bp, Cannabis sativa
attgtgggccaaaagtacccctaatgaaggaccttcttagaaaggttgggtttgaaagtgtggtctccaaaaaacccaccatgaatctcatggattatagcacttatttttgttccagaaggcattggctatcctcggtggtaaaacttcccatccatgaatacttaatgatgaacctaatactaaacctttctagaagcatcattatctgcgggaagctctgccaaatataggaagtggtaaatgggtgccatccaagagtgagagttgtcagctatggcatttagctctagacttcaatgtttggtctttccaaaaggcacttaaggacgtctctgtgttcgatgatctcaggatccattgctagttttgctaacatgtttgtgaatgaattttgttctcttagaacttgatgaacgttgtaacttttaaaaccttacagcagttcctaggacaataagacgtatggagcaattctttaacctagaaatttgattcaccacctgttgggaatcactgtaaacatcaacctgttagacccatactttcatagccaatttcattcctgctaatatagcttcgttgttagaggtgtgaaccttaaagtgcaaagcactt

SEQ ID NO: 71283 - DNA, 693 bp, Cannabis sativa
gaacaatgtctaaggaatttttggtggggcgataatgagaagaagaaatccttccatactatctcatggagctcaatttgctaatcgaaattcaaaggaggactaggttttcggaaaatcaaaaatattaattctgcccttcttcttaagtggggctggaaactcattaccgatcctcataacctctggagctccatcatgaatgagaaatacctaaaagggagggatctctttgatgctaagttgaaagggacagagtcaatgctctggaaagcaatactaaggactggatccttactgaaagaaggcctttgccgaaaaattagagacggaagatctacgtcaatttggtttaatgcttgggtaccaaatggagaacatatgccgcaacccctgttggatgcaacctaaagagaaaatctagtaagctatttttattaatgagaatatgtcatggaatgaagaaagggtaagacaatggttcaatgaaagggactctagaaatatcctgaatattgggctacctgctcaataccaaccggactcctggaggtggccaggtgattctaggggcatattctcggtaaaatcagtgtataagttggtgacgaacccaagattgcaggaccaatccaattgggattggaagattttatggaactctcctacccatgggaggttgaagatgctttg

SEQ ID NO: 71284 - DNA, 2136 bp, Cannabis sativa
ttttttttttcctttcacaaaggaggattaaaactctataatttcacagtttgtttgatgggtgaaaattatatttattttttttacaaaaatacaacaacttttatgcccatttgaaaatgtcattttttaggatgtaagattagaacttcatagttttaactattttatttgaaaaaatatacttcattaacaacaatcaaagtttaatacaccaataaaaaatatagaaaatcattcatctaagtcagtttaacatctacactaagtacatgcacaactaatccatgcataaatttattacctcaattaagaatgcctcataaaacttgaaagcaaactggcaatatcctctagtaaagatcccatttcataagcaaactagtatgattcaacttgcttcgaagagagtggaggtaaatgtcttatcatctgtcatatgaaggaggaaaccatcgtccattaccttgtgacgtgtcaagttgcccaactttgttggaactaggtgcggattgaaactcactcatactgctgcaggtagtttctttgactggtttgtatcatctttcaaggctttggattggataatgataagaggtgtttattggctgttgtttgttgggcaaaatggggagctaggagtgatatggtttggaataaaaaaagtaaaaaggggcttttgagattattacatctgccacaaggtatcttcaacaatggaaaaatgctcaaaattctagattgcaaacatcttggtctggtttgacagcttaagatgattggtggggtttggttttggggtagccgctagagaccacagagggtttttgatagaagcttgcaccagatttttcagtgttcgagttgcaccagaagttgctgaagctgtgggagttcgggaagcactaagccggatcaaacaactaacaatggcagcaggtattgttaaagacagacaacttagttttagtgcaagctttgaggagctctgtgagaatttggttaaagattgtaaagatttggttgttgatttgagaaatgtttatatggtgtttaataagcgtctgcaaatgtagttgctcatgagtttgctctagtgtctcattctaatcctaaccggttctttcagctcggggatgtcccaactgagttgctatcggttttgatagctaattacttttgatttcatgaaaaccaataaaacacataatagtactaaattgaattaggcaatttcctccaaaatttgagaaggacgcccctggactggatcaccatcattgcaatttccattcacttagaatattaatatagacaaataggacaacatatatttcataaatgtttcagaatagcaagtagtaatatatatattttttgataagagtaaactttttctacaaatgtttaaaaatttctacaattctacaaagaacacaaccttcgaatcttatatctattcatataatatgaccagaatcagcaagtgagcaaaaagatcaacatttacagtcaaaacatttaacatcagtcacttagctcatcatcatcgatgccagaaacattcatccttgcagaggcttgtttagccatcttgacaattttttgtgcctctcgactgatcttctgttgttccttcattgccattttcagtatctttcgttgctctttaaacgagaaagaccccaaatcggacaatagctcatcgttcttgctccaatcatcactgcttattgaccaatcttctttactcctcctacgaggagcctcctttttcggagaacaccataagcaacctgctctcttcggcggagatggagaagaaaatgaccgattttgcaatctcgaacgacggcgtttcttctcatccaaccctcgtttagaaaccgaaaatttgactttctctggagacgaattagaggaattcgaagaaaacgaaatcggcccccgattggattcttttgaagttgaaattcccaaatttttcagtgacgattccacagagtcaataggtaatttggacttggaagcgattaccttttctgggtttcgtttggaaggcgagaaaatggtagaatcttcgtcaggcgactcggttttggaagtgagatcagatacgcagcgagctgaaccacc

SEQ ID NO: 71285 - DNA, 2176 bp, Cannabis sativa
ctactacttttccttataaatttacggagcacacactttttcctttttaaataataatataaataataaaaaaaaagtttatattttttttttgagaaaagaaaactaacttagtcatcttatggtggatgttcatgacttggattcaaatgtttatatatactcttatttagaaaaatgatgtagtatgacaagttggcatcaacatgatatcaccatgtctaattctggatatagacggattagtctcgtgccgaaggctaaagcctacctagttcatgattcaaaaaaaaaaaaatttctttttaaaattatacatattttttacaaattttaaaaaatactacattttttttttttaaaaaaaataagagtccaagaatatattttttttcttcttatgacccactaaatttcaagatcggcgctcagtcgacctattatgaatagttatcttgctcatgatgcttgaagttaaggctgattccgagataagcgagcaagacctgcgttttagactcccaaatattcagagcctcaaaattataaaagaaaaattatatatagacaaaatattaaataataatgacaaaaaatagttttcagtgtagtagcacaaagtgttgttttaagttttagaaaatttgcattctagtcctcctattttaaaaaataacattttgaattatatgataaatgcaattatcaaattttatgattggtttattttaatatatattaatttatttattaaaaaattgaattattatatttttataattaatttaatttgaaccaaaatttagagtgcaagatcaacaatgctacattagttaagaaaaaaatgcatgaaaccgaaagatcaatttatttatttattttctctccacaaatattataagagactatgcatgaaagctacaaaatccactaattaagatcattaatggctctgcatgcaattttcatttgagaaaagcaataccatttacataaaataatgcaatgaatttataaaatattatttcaaaatacattttatatatagatatacctctccacaagctcaatctatttaacaatgttttaatttttatttgagaaatattattagggtgcatatataagtataataataatattacacaatttagatcaatgtcatcataagattagtggtactcaactaccaacctttttcttttcttcatatattattgtaactagactatcctcacttggcaccacttgaatcaccatgacaaagacatataaatatacataaatgtatattatacatgtacataatcattaaaatagtggattttctttttaaaacattaaaatagtggaattgattttacagaagtattagtattacattcactatcgttgatgcacacggagcaaagaattagtggggaatgcttcttctatttttattcctgttaagaattttaatctctatctttgcttattcctcatcgagaatgaggcggagaatcccttaatgggagtaggaacaggatggggaatctcctataaaaaaataaaatttttaatataaatttaaatatataagaatattaaactacaaaaaattaaaatattagacattaattataatttaataaactaataattatccaaattaaagacaacttaaaattcataaaaagaatactaatatactaaaaaaaatacaaacataaattataaattataaaatattattagaaatataaaataaaatactacacgggtcttgtcaggacggagagtgtgattctctttcccgccctatttaacattctgggacaaaaaatgtcaaaaaaaattaagcttacaaatataaattttttacaaaaaataatattttatataattatcatttttttaaatccacttaatgaccagtgggcttcaaaaattatttaccttcccatatttaataataacaaaaaaatacataaagttgaaaaatatctctttttttatatctattaatcaaaaatacctttatattatatttcattaaaatgtacttatttttgtgagtggtttgtccaatatactcttaccttccatttaaatttagtacataatttacattaatctaaggggtataatatggacatcatctataaaagtgagtatatgtaaagcccgcttagtt

SEQ ID NO: 71286 - DNA, 1294 bp, Cannabis sativa
tagaataattagtatttttacattaatgtggtattttatattaataatgatgtgcttacgttgttattttctgtgcttgtcaataatatccctctaaatataacttttacattaatgtggtatttccatcacactctactcaattttttcgcaaaatgagtgacacagtagatggtagttggtaaatggatgcaaaatgtataatattctctctttttacgttaatgaataatagaataaaagacattttttttaacaataaattaatattttggtgaaacttatataattttcatctatttgtccattatcatccattgtgtcctcatttcatgaaaaaattgaatagagtgtgataaaaggataacgttaatgtaaaagttatattttgaggggtattatgagcgagcagtatatcttgtttttttaagatccaaacctttgaatctgattgtacatttaaataataagatcatatctgaatttgaatataaaattatttagcatgttttttttttccacatctgaattatttaatatttttaatcatataatattaacaagtttatttaattttatttaatttaaaaaagtattctaaaaaataattcataaaaaatacacaattaatatattaattataaaaaaattcaattagtaattgtttcctctgcattagctctagtgcaattttattcttcaaattattcatgatttgagcattctcaggaactaaggccgtttgtttccatctgtctaataaataaataattttttaatgttgtatatatgatagtactcttaaaatattcagaatttaactttattttaaccttacttttgtcattgcttactattcagatttttttaagaatttataggtgatcctaaataactataacatacacgatcataaaaaaaattagattaaaaatctcttttgaatgccgaaatagatagtgtttactgaaacatttctttagaagggtgtactatagacttatccaaacaaatatacacaatattatatttatatatacataatatcaaatcatagcataatcatttttaaattatatatatgacaaagacatgagataaaactctgtttttaaacaaaaacaaaaatgaatatacattaacatttgatgtttgatttgattgaagttgcatagagacagcaaaaaagttatagttgagaaaaaatgaataaaaaagagcctgatatatatgtcttaaaaagattcagagtctaatttacctcttattcagtaagaggtattaagggggaata

SEQ ID NO: 71287 - DNA, 3429 bp, Cannabis sativa
atgatacaaataatacaataactaagaggataaaatgaaaatcaataagaacaactcataatgacataaaataccaataaattctatttttgcatatttaattttaactaatagaaatgacataattaatttaagtcctatcagattagtttaacattacatataacaaagccaaaaaataattgaaggccaaagacagtttccaaatgacaaagcaagagagaatatatataccatgggtgttagagacataaatatgtgttatcttatactatatgagcagaaaatgaaactaatttatctagattcaacatattgaagaagaagaaataagaaaaactctaaacaacatcaaattgaatttacagtcaataatttcaatataattaccttaaattcaggggtgcaccaacgatcacacaatatctcccaatcttcttggtggtcatcttttagatctggatgtcgctttctcttggccatctcaacatcctcttctcctccaatttctttaaaatatgaatgtaacttatatttgtgactcctccaagcttttctcatttgctcatcaatacactttatagttgtttcatcaagcaaatcaatatcatatgtttcctataaatataaaatacaattaattttgaatttaaatattatatttaaatatatatatatacattgaacagtttggagtctgtcggagtgagtaaattttttgataaaattcaaaatgattaatattaggttggtaagaaaattatttttagcactgcttcaatagagagcaataaaaaagaatcccaatataataatgaacataaatacataatgacaaatattgtatcatttagccctataaacttttaattcagtcttaatagaaaagatatccaaaaataacttaccaaaagataatgtcgcaatggtgctctaatttcctcaggaaccactctccattccttgtaatgaaatgaaccatgattacgaacaataaatccaatgtcattattaaatctctcagcattggtgcaaattggttgacgacactcctcatcaaaagtgacaagcaactttccattagccgatgccttagcaatgctagcagttttcacgccacgagtaagcccacgtgatttattaaccgatacagattgtcctacattgattttttttttagtaaaaataattaaaattcaaaacaactaaatgtaaaatatattagacatacctgattgtgtttgagaagcaacactatcatcttgactatgtccagtagagtgtgtggtgcattcaggtggttgaatatgtgcagtagactctgtgataggtcctatattggaatatatgtttttttttaaatataaaacaattataatttaaaacaactaaatgctaaatataataaagatacttgattgtgtttgagaagcaatactatcatcttgagtctgtccaagttgttgactctctctagtggagtgtgtggagcatctaggtggttgactgtgtacagcagaatgtgtggtggatcttggtagttgactttgtacattagaacgggttgtgcgtccaattggttgactctgtaaaatagagtgtgtggcgcattcaggcagttgattctgtatagtagaacaagtggtgcgacgtccaggtgtcataacattaatagtctgatcaatgtgtgggttatgtgcagtagaacgagtggtgcaacgtccaggtgccatggaaacaattcttcatataacaaaacaatataaaagatattaagagtattgtggactatgaacattaagaagatagtcccatcatggaatattaagatttatataacaatattaagattcatataacaatttaaaatattaaaatttattaagataacaaactagtaacatatatttgataaaactaactatgaattaagattctccactattatcaaattccatgtcaagtatgtcatcatcacttgaacaaaataactcatcatcacttgacaaaactatgtcattattgaagaagatagtcccatcatcaaaatcttcatcatgttgatcctccatggattgattatggttgtttatattcagctcactaaccagttcatctgcaagagctaatggagcaacatcttgtcgaactaaagaagaacttacaaccaaatcctcaataggtcgaaaaggaggcagctgaaatgattcttcctcttggaagacatcattatttaatgattcattttcaatattacacatttcaggaatctcataaattgatcgatgattaactttttgaacgattctccagtttgaatgacgactcatatcaagcaaataaaaaacttgttgtgcttgagaagccaaaataaatgggtcatcaggataccaatcactagatgtatttatggatgttaaattatgttcaacctgaaggaatctcccctttggattggagttataccacttgcagcgaaacaagtacacttttcgatcgaaaagaaatgacaattgtaaatctcaatcaaaattccataatatgtgatatactcatcgtcatgatcaccttcagtgcaaaccccagaacattgtgtttgaagagtgtcatcacgctttttacatcgaaatcgaacaccatttacaatacaactttgataactattgtatcgttcaagtggaccttgagatatagagtataaatcatcattgacaagtggcgattttcgtagtcgcatttgagaaatctacatgaggaaagaaaagtagtaaagaaacaaaaataacaagaaataagtaagaaatcatcaatgacagtctctcacctttgtcttaaaccaagacaagaattcttctttttggtgatttgcaacttctaattctgaaagacctctttgttccaacaattttcgatgttcactaaatataaaattaataattatcaaggagtgaagtttatattgtaaaatttaagaaggataagaattaatagagttataactcactcaagataatcttgaatatcattgatagaattattcaatatataccattgaataacttttctccaattttgtaataactcgacggatgatgcacctaatgggcgaacattggaattgaaaacatccaaagtatgatttgtagaaggtaaatcccaattacgctctggccttgtaagtcttgtctctatgtttgatacatatattgacaagaaagttacagcttcatctacaacaaaggcttcagcaattgaaccatcaggtcgtgccatattcctcacatatcgcttatacaaacccatatggcgttcggttccaaacatccatctggaagcaacgggaccacctaataacacttgatttggcaggtggacacagagatgaaccattatagtgaaaaatgaagggggaaatatcttctccaactt

SEQ ID NO: 71288 - DNA, 988 bp, Cannabis sativa
aaataaatagttatgttggtatagctttttaaaaaaaaaaaaaaattaatcgtagagaataaaaagcaataaaagaagaaaaaaataaaaaagtagttggttttcacgtaacggaaaaaaaaaaaagaccaaaaaaaaacttagacagaaaaaaaattgaaatgtggatatatattattttatattaagtataaaagtatccgtattatttatattaaaaattatatcggtatcaatataaataatgttagtattgagtatataattgaaagttctctttttttattatagcgatgtaaatgactatttgagttgtgttatttacattataaattatttataattttttaaaattaattaaatgtcttgtatatattactataatatacatgatacatgcatcatcatataaaaagattttctagcttgacgaaaacaaaaacagctatccaagtcggaataaaattagtatcctcatgaatttttctatatatttaataaaagagatcaataataaaaatattcatataagttttaagatattataaatacttaaacgtaaaatattcatgcctaattgactgagatcatcatacaagaaattatttcagtttaggtatcgattcactacatgatcattttcccacgttgcaaaattgactttttttttattatttgatttttttgtttgacaaatatttgctattatatatacttaggtgttttataggatcttaattaggtgcatgacgattaattaatagtcccatattcatcactttcgcataggttgttttagtttatgtatatattgataagttttcggtgtaaagcaaatcacaatattcttcaaaagataaataaatagtaaagtaaagcatataatacttgatcatcatcagtattgcccttaaacaaatgtaatttatggaatttggtagagaagtatatttagtggacatatataatactattacattacacatac

SEQ ID NO: 71289 - DNA, 1704 bp, Cannabis sativa
ggaaaagttcgattatttcaaaattgagcaaatcccaagagaacaaaactctaacaccgatgccttagcaaaactggcctcgcaaaatgacttggacgaactaaacttggtttcagaggaaatgttaaatgagccaagtacatgttaaaaggaagatttcgagatgatcgatagttcacccacatggatgactcccataatcaactatctactcaacggacagcttccgactcacaaaaacgaggcacgaaaactcatgtatttagtgcctcgctacacgatagtagaaggaaaactgtatagaagggactattcaatggctctcctaaggtgtgtccttcccgcagaagcaaacgagatcatcaaagaaatccatgaagacttttgtggggatcatgcaggttggcaaagtttattgaaaaagattattaggcaaggatattactggccaaccataaacaaggacacccatgaatttgtcaaaaagtgtcataagtgttagagattctcgcatatacctcgtgtaccaccaacggaactgagaatgacgacctcatcttacccatttgctatatgggggattgacttgattggggcacttcccatagggcaaggaggagccaagtacgcagtggtggctgtcgatttctttacaaaattgatagaggttgaacctttggtgtcatagcatgcaaaaaggttcttgactttgtagtcaaaaacataatttgtagatttagattacccattaagatagtatcagataatggaactcagttcgatggcgacctattcactgagttctacgaaaggaataagatcattaagagcttctcgtcagtatcaaggccttaggtgaatggaaaggtggaagatgctaacaagaccttgaaggatactatttagaagaaattagatgccaccaagggtagatgggtcgacatactaccccaagtactttgggctcacaggacaactaaaaagacagtaacgggacaactccattctcgctagcatttggctcagaggcaatgttgcttgtagaagtaaatatctcgactcactgacaagagttttataatcaagaagaaaaccaagaacttttaaaattgtacttggatctacttgatgaaaaatgtactaagtcgcagattcctaatgcagcataccaacaccgagtaacaagatacttcaacaaaagggtgaaaaagaggcttttcaatgttggagacttggtgctaaggcgagtatttgcaaatacaagaaatgcatctgcaagattattcaacccaaactaggagggtccttatgtgatcaaagcgatagtaggaaccgggggttacaaattagctcggctgaaatgctcgttgataaagaactactggaacatggaacatttgcgaccctactaccagtaaattgatgctataactcatatttctgatgtaatattttgaactttagttattagtaaagctcattattttttaagtaattacaaagtgttattctttaaaattacttgaggggtggttcatgccacaaaagaagatgtgaagaatagagtgatttgcaactggccaaaaaaagtccagcaggcagatgccgactggtttacaaatctgtagctatttttttcagtttaggctcctgaattcattattcttgtgaaaaaaatgttgaaatgtatgtttataatttgag

SEQ ID NO: 71290 - DNA, 1945 bp, Cannabis sativa
cagagttgtattctgtaactacggaaaaactgtttcagtaccagtttcattattccgcatttaattaatctctaaataaataattaaactggaaatattaaaatacagaattttataatgcactcttttttaaattttttttgaacaatgcttttattttttaacaagaacaatccactctattgattagtataatctcatttttttttcttataggttttataaaaaagtgactatatttgcactcgatagatgtataaaagcacccattctttatgactattaaatcaatttattttttttttaaaatttatgcttgataccagttttcaattttttacattattaagttattttttgtattaactattttacatattttaatttatttttcttttatttttttttttaaaaaattaatatttttttttccttttacatgtaaatttatttttattataatagattttttagaagaaaaaaataaaaataaaataagaagtatataagtgttagaaaaatattttatattaattttaataaaaaaaaggaggcgttaattaaataattatagtgaaagactaatatattcaaaaaaagaaaaatagtttgaggtttaattttaactatgttaaaggtagattataaaataatatacttgatcatatgaggggaaaaataatattatgtcaaaagttaggagtataaactaataatagtagtggcaaatatcagaaggcaaaaccactcattgttataaaattttggtagtttaacaaataacttattaatagatagataataaggaaacaaaagttcaaagtgagataacaatttgttcccccttgtttattgtaatatatgcagcactctttcccgaacacactaattaacgccattagttttggacttattattaatattaattttagaaatccaatggagacacagaaacaataaataataaaataaaaaatggtgtaatttttataaatatatatatttggagtttgagtgaagtatgctctggaaagcactattaatgaggctgtactagctagttaactatccatgaggcttgtttattcacacagctgttactactagctaggaaaatatcacttgaaatatgaaaattgaaaatcatattgataaatagtgatctgattgataagcttttaggatcattctcttctaataagtatcatattttcgatgaattaatgagtatatatcttaatcaatataaatcgacgtgaaaaagaagaagataagacttcacggtaagatggttagaaagcttatatgtgacttagagacaaaaataagggtacaataatttggtttgtaaaacgatttggtgcccaatgggctttgtatacatatacaatatcaatatattgacttaatattattgttatgaggtcatatggatagacgcttgtgacgtaggtataatgagttatccaatctaatttattattttttttttttaaaaaaaattcaattcaattaataattaaatttaaaaaattattatttaatgtcatttacaaaatattaaattttaagtaaaaatttacaattttactgtcacacttttttataaaaatactatccttttataacaaccctaatgaacaaatgaacaaaacataatagttaaaacaacagtagaacaattaaaaaacaatcatggaccaacagtgaaaacttaacacagtacacagtataaaatgtacatagtatttttttaaaaaaactctatcccacagtaagaaaaataaaaaagttaaaaatttcaatatgtgatgtgaaaacccctttaatctaatctaattagactttaaaattcaatctaatccaatctaattataataataattaaattggatcgaatttttaattaaatatccaattgtacacatctaatttttaatattaa

SEQ ID NO: 71291 - DNA, 1149 bp, Cannabis sativa
gttaacataaatcacttctaatctattattgataacaaatcagattagattgtaatggattttatttagggcatacaatcccaacagttaggcctcttgtgatgaaaatttggaagctagcaaatttaagaggctaaacaatcaagctactgatgaagtagcgagaatgactatcaattccatatgatgactattgtaccaaagggagaggtgctgatgtggtttccaactactttatttgaataataatttttttcaacgaaaaaaaaccatcaagtgattattgttcatcgactgatatactatttttgatttttatattattgttattactaaattttttacttttattatttagatattttagaagtgagatttaaattcaaagttgatagattttaatttattgtactctttttttattttatatgaattatataattcaatttaaattatttatgatttttatttaaatgataatatcatttaaattcaaatttgactatataattaattatgaaaagtattttattaaattataatattactattattttcatagaaaatattataaataatgaatatttatttatataatataatagaattttaacagatctatctatctactaccaaaataaaaaaaaaaaatcaaaatatctaattagttagataataaaaagaataagcgaataataaatgtattcaaaaaaaaactaattcgaaataattttcgaattgaatatctctcaataatatctttatttttcacaaaacaaaacatacttttcctagaaaagtcaaatatcaatagaaaatcgatatcttaagatttttgctctctcattgagaagagcctttcctgtaggaatgcctaacaagcctgaccaaacaatggaggatctccctgatcccacgaataaattaagggttgtggatgaagatggctgggaagtttgtgaagacagggaaatggaggtgcgaaaatcttgtcttatgggaagattttgctccaacaagaacgttaatcgatctctcattcgaactattttgggaagggtttggagattagaggaagtagactggggagtaaaaatcaaacgagtcacaaccgaggccacttttatggtgttctctttcaagaacgag

SEQ ID NO: 71292 - DNA, 819 bp, Cannabis sativa
tgattcatcaatgtattattaaattaattattagagtttacagcgtaaatatacttaactttaacttttagttaaatacttaattataattttttacggtataataatattaattattagagtttacggcgtaaatatacctaagtttaactcctggttacagataaatagtactaagtctaattttttatggtaataatacttaagttatgtttttggaattttcgtaagtttctagccgttaagtgacaagttaatggccacatggcagtccataatagatatagattattaaattttttaattttttatttaaatataccaatagaaaaacaacacgtgaatattgacttgacacttaatttcgaagtgcttacagaagttaaaaaaatataactttagtattattacaataaaaataaaactttttaatttatcggtaattggaagtacttgcttagatatatatttacgccgtatattattttattattattaaaaaaataatgttatatgagatgacttacacaatgtgaggacttaaaaaaccaccatactcttcttctaaagcttgtggagtatcccaatggaagagagtaacaaagggcttcaatcctttggctatgagttcatcgatgagatcattgtaatactttattccttttttgttcacaccaccactcactttcccatctaattaatcaaattcatttaattataattaatcatacatatatccattaataataattaattaattaatattaatacatgtaaacgtaatacgtacgtacttggtaacaatcttgaccatgagat

SEQ ID NO: 71293 - DNA, 739 bp, Cannabis sativa
tatatatatttactccttttgagtaaaatagtactatacacagagaacaaaaagaaaaagagtaaacatacaaagtaacacatttataatattctttttcgttccttcttgcatatttgattccccggccggttcattaagtaataatgtcgctcaaactctaaggaacgaataatacaacaaatatttatatatgtcaaattgttataactatacatatatatttatataggttacttctgttggccactatctattttcatgttaaatgcttaaaaacaacattattacaaattaacaatcatatatatattagaaggatatattttttttttgaaaaggaatattagaaggatttgaataaataattttaataacaggctcctgattagcaatatatactccataaatatctctatacataatgatatatatatatatatagcagagcaaatcaaaatatacccgtatctagttatttaataatataattagttatgtaaacagatcatatatttataaaaacatagaaaaatatttaacttcttgggagttgtttgtaaaaatagcagcaattaacacatatatatatataggtactcgtttaaatcaacaacatgtaattacgaatatatatatatatggaaactcattaatatataaggaatatatatatcatccaattatgaattgttcaggtttaggtgaacctgttcattgtacagcactaattaattaa

SEQ ID NO: 71294 - DNA, 1283 bp, Cannabis sativa
tgtaattaccacctcatatccaaacacaccttgcattttaaaatatagtgtaattactaaactgtgtaattaataccctagtaattaccctaggatattggattttgccaacaggaatttcaattaaggatattggattttgccaactggaatttcaattaatgatattagattttgccaacaaaaatttcaatcaatcgatccaaataggaactcatccaaatcaaataaaaacaatagttagttaattggacattgaattgtatttgattttagacaatctattccacaatcaaacctatccaagtgaatctgattggattcaatgataaatctttgattagatggtactacattcaagttttatgaaaggtatcattaagctcaaagaaagacaaactagagcactatatatatatatagagagacgtcaaaacacccgatcccattcgacattgatagaatcgtcttgtgccatatgtacctgagattgttcggaaaacattgtccatgccccaattaatattgacatattcacttttaagtaaaaaaaattccaattataataatgtacttgaatggatacatgtaacattcacgactcacgtgtcacactcactcacttatatacaataaaccaaaatgctaagaaccactttaaagcatcacactattctaataaattattattaatgcaattcaatattaaatcttatatatttatatttaataataaattaaatagaaaaccacttattaatcaatatatcaaaatccatcacatcaatatatagtattaatatataacaatattgctctacaaccaataagcactataaccctaattacaatatatacatatttacaggtacaaaccatacaaatacaatccatcttcttttatatatatataaatatatatatatataggtgttgacggagaagtcgagatgatgagtgtttgtgttgtgagtttgattcaaaagggttagaagagtaagatctgttacagagccatgcatgcatttctcacccttacgtgtcaaaatccatatctctccttccaccacctcatcaaacctatacatacatataacacatatacatatataatcacttacaatgattctcaactatctcatctacatcatatccattctctctcttccatttccacaaggtaatatatatatatatacatattatgtaatgcatgcaatgagttattattactttatgttctttacataatttgtgtgttttttttgtttaggggagaaaat

SEQ ID NO: 71295 - DNA, 1775 bp, Cannabis sativa
gatagcatgaaaaactcgattgaaacacacaagtttaagacatattcactatcaccattacacttccattccatctaactctgagagcattttcgtcgctaaaccaagtgtgaaagagcaatatattctctattgtaagtatgttgctgtcgctgtcatttttgtttttggtgtttagttcttgttgtttttcattagtcgaggacgagcaatactctaagtttgggtgtgataactctatggtatatagttatttttaacacctttaaactgaaattaatgtgaaaagagtagtgaaagtgtctttgttattttactttacttaatttctagctttatgttctaaatagtaagttaactttggagtcttataaaaattgttattgttagttgtgctttttttttttaattaaatgtgcttgtttgttgttgaaaaagaagaattaaattattagaaaaaggaaaggaggcaaggatgaagtgggaacaaatgctgaaaatggactaaattgctgaagcaatgctacaacgaattcatcattctggcagtgacgaggagagagttagaagaacgaattttgtttgtccacatcagcatgagcgtgtcagtcattaaaaattaagccagctggctgttgtgaaggaaaaaaactaaacctagtgggccaaggtggaaaagggattggacttctatttttaggatattattttgtatcatatttacccaacaaccaaaaagaggagaccaagtacaccttcttctttaacatgatgcagctgccatttttgaaagaaaaattaattgcaaaagcaaagtacggcagagggggaccaaagtgacaagagagaaggacacaagcttttgtgtttgattttcttttaccttcccttattatttttctttcttgtttcttttacttagatattaaaaactttgtgagctgtaaccaaagggcagcagccatggagaaatactttttactttggattttattttcttgtttaaatataagctagactttttgagaattgaatgactataaacttctatgttgggtatgattaatttttaagcttattttagcatctttgtctttgtacattcaagtgagcttgtcatttttatttggttgttatttcttggccatgagtaacaatttgttaagctaaatcttgtttcggaaggctaaatctagtaattaaacttgaatggagcaagagaaatcctagattttaatttttcattgtaagtggaataagattattttatttaccttacataacttaagaattgatatttaaatagtgttctagttactggtttgatatatgaatatattgagctaagtggtagaccttaaattgtgagttttggcaaattctcataagcttagaaaaatttctattatctttgtacaagaatgctggagtaatgctgaaccgatgctgtaacaattagtagaaaaacctaactaggggagattagttattcaagccactttttaccatattacatttcttgaaaataattttctagcaacaatagcattaatttttagcaagtttaattacagttattttaattttgaatcattgctcaaccattatcataattttttctttttgctttaatttataattagttggttttacatcatattttgtttgcaatccacgtggagacgatcttacttatcactttattacttgtgtgactacgtatacttgcctccataattttcacaacaacaacattaaactttggtagtatatta

SEQ ID NO: 71296 - DNA, 1557 bp, Cannabis sativa
tattggtgtgttataagttgttaatagtttaccttgaatgtgttagggattggttttcttcttgagcttagtgggaattatacctctggcagagcgtttaggatatgcaacagagtaagtttttgacttctaattagttcttgattgcttgaagtagttagaatattttaagaactgtcttaagaggctaaaagactatttcttgtttattacattgcaggcaacttgcttttttcaccgggccaacaggtaacagttacaaaaaagtactgaactttcgtgtcgaatgtttgattaaagctataaattatgctgaatttggaacattgtatgtcaagtgaactctggatcgaagaaaaattgaaggctatttaggatattttccctgaaatattactactactaaatcgtgttccctgaatgtttttattcgttagaaattctttttgaactattcacaatgctgaagtataagactctcttaagttttattcaatgtgtcttaacaaattgctgatgttattgatgtgtcgttaccatatcctaaatagccaaaattgaaatgaggaatccatgaagaagtttgagaaaccccatgaaaaaatacatgtcaaacatagtgaattagtgaagtagaagggtggtggtgaagagccatcatgagctaattctaagcttgtgttgttgttgggggctttcgggttgattggaaacggctcgggacacagtattacaatggaaaaagaagcttctcttctttaaattgtcattgacttagatgtgtcttcttaggctgttagtgtcaatacttttaacacaattcatttgctggaatttgcagttggaggtcttttaaatgctacatttggcaatgcaaccgaaatgattatatcaatctatgctttaaagattggaatgattagagttgtgcagcaatctttacttggctccatcttatcaaacatgcttttagtgctcggatgcgccttctttactggtgggataattcattctgagaaagttcaggttttcaacaaggtagatttcccgaaactcaatagaaactattccctttctttcggtattttcagttgttctgagttttggtatgtcatctttttgaaacaggcagctgccatagtgaattcgggtttgctgttgatggctgtgatggggttaatgtttcccgccgtgcttcactttacgcattcagaagttcatttcgggaagtcagagttgtctctttcgagatttagcagttgcataatgctagtggcatatgcaagctacctatactttcaacttagaagtcaaaataatctttacagtcctgtagatgaggttagttgcttcttattaaccttttcattgttttgttcatcttaaaattttaattaactctaatctttgtttgattctaaatattgataacaatttcagttttcaagtgtgtttttttctcctttactgttaaaatgttttatggagaatcatgaaaagttagtttggtatgctgtattaaatcgtattatattatagtatactaaattataatac

SEQ ID NO: 71297 - DNA, 714 bp, Cannabis sativa
aaaaattactaattagccataaattaataataattaatgtttgtaatattattctgtaatatcttattcttatgtttattatatgcgaagaaaactattaatagtattcatagcatggcggcacagttttggtggggatcatcggaaaaggatgcgaatattccttggtgtaaatggtccactctttgtaaacataaggaacaaggcggccttggatttcgggatttgggtctttttaatcaagctcttcttgctaaacaaatatggagatgtgtaaggtacccaaactctttgtgtagcaaagtgttaaaggtgagttattttcctaatgttggggtcttggaggctaaaagtgggaatcatgcttcctttgtatggagaagcttggtgtgggaaaaaagatcattcaaaaagggtatcgatggcgaatagggaatgggaattctgttcgggttctcgaagatccgtggttgcctaagccggttacattcaaagtctatgataaaccatcgctattggatcaattgtatgtcgttgacttgaagaaaggaaatggggaatgggatgcggagtttattagagctgtcttcaatccaacagatgttgaattaattcttagtatggctacttcggagtgggaaattgaagataaaattttgtggcattatagcaagaatggggaatattcatttcggagtgggtatcgtatggcgg

SEQ ID NO: 71298 - DNA, 1972 bp, Cannabis sativa
tgctcttgttgttcaatataactgtccttaaaatggaacacgatgccacactagaggccatataacatggattgttaaaatgcgatattattactttcgtggaatacttcagcataattttttggcatgtttttaccagttaatttattcttagctgatatggcgatatcatggccatttttattatatattatattttaatttattgttttgtctcccaaaattccctttttgaccaggattgagtaggtcattctacatttttaagtcacggagcaatatgtattcatcttggctgttcgttagtctttatggaccttaaaatcagaacgagtttatgttcaatcaacttggagtttttcttttacagccaaagaaaaaacattggagtcttttctcaaatttatttatttattttgcaagtctttgttataagacatgcttagttattaaccttaaatttcttttcacacaataaacttttaaagcagaaggatgaaatacgagttgcttatgactaactagcatgtagtctctaaaatcgccaaatgaaggagtgagaaccagacctgtaccacaaacatgatgcactttttggttataaaacgatttcaaaaagaaatgccatctttcgaatcaattagaatttggcataatgtataaaatactttgaaaatatatagtaaggtaattgagttgtcttcttctctactacacaaatctcttcttgcctttccaatacttcatgattctaacatatacaatttttcacttaaattaattttggttttttttattatataatgtatgactaatttattgattcattctaccctttttgtttttctcgtaattaattttctttaaacaactgtatatattataattatgcatgatgcaagttttaagaaacttaaaaattatctttgttgaaatcagacaatttattaaacgtaatattaattttttatacgtgtatttaacaagagtatgaattctgatttcgatatctaaataactcacagtacaatctataaatatagtagcattttaacttcttcaagtgtaagaaaaaaataatattcaccgcttatatgggaataaataattaataattctggtaatttatatttagtaaatcatttatatctattcggattcggtttatattctagtaaatgttccataaaggattatattaaaaataaaaataaaaaagttccataaaggaacaaaatatctaaggataaaataaatcgaccatagactaagcatcaatgggacaataaccgtgaaatctgcagccatttacatccatatctcaaagagtgctccaaaagtatatttttttttacaaattcatgagtttaaaatatttgaaaagttggctaacttttctcaactatggtgcattttaaaattatcttgtgaaacttggaaacatatagaagataataaaataagaataagatatacaaaaagaaaaggtactcggtagctttcatcgcaagggttcagaaagcttacatgttcacatactctcatgctccatgacccaaccaactaatatatatccatttagcttaatcattttcaaaaatatattgctatatataatacccaattaaaatttatagtttagtctctcctaattaagaacacttctttctcaagctgcactcattaatctatatgagttataatattttcacctaactatatattgttactatatataaataaaaagaaaaccaaacattaggtaaatatatataggtcaaacaaaagatattgatgactgaaaatatcagagtcgttgaccctccatttggggatcatattaatgtcttgccccttttttatgctggattgaaatttgtgatttattattttttttttttctaatggttaggtatttgcaaatgccaataacttcaattttattttatttttctaatgattaggtaactta

SEQ ID NO: 71299 - DNA, 1970 bp, Cannabis sativa
ttgcaaatcctctactctctctaagaatggcagccaggaggtggatttgtgatgatggagcttgggagattggaatcgttatgatggccagcatttttccaatagaggctatgatcagaaacttcccgagatttatctatcgtaagttggtcttttttctatataaagtaagatttaggttctatttttgtttatctgctttcaaactgttttcctgtctaagtattttttttcttagtgtgtgtgtgtgtgaaaatggatgcccttggtttcaatcccctccaacctctgactttaacttctgatgaaaatacggtttatactcttgatgatccttcttctgagacctcccaggaaattaaactccttcttaagctttgtactgtcaaacactttagccgcttgtctttgatcaaaactttatcccaaatatggactcccagtgtcgtttccctgttgtggtgtctgatcactctgagggtctttttcttgtcacctttggctgtgaaggtgataagcgtaggattctcgatggccagccatggcattttgcccagagtctgacaatctttgttgcgcctgattcctcttttcctattaccccggaccaacttcattatgtgcctttctgggttcaaatttatggcattccttttaggtgtaagtcgtttgaattggccaaacttattgccacaggggttggggacttaatccaagttgacagtactactgtcaaagatggcactgggccttatttgagggtcaggtttcttttggatgtcaataagaaaattcggcgtggcattcatattcgtttcctaaagatgggtagggagttcactaagtggctagattttaaatacgagcgactgtcggatttctatttctattgtggaaaacttgatcatactaaaaaatattgtcatgcttatctgcaaaagtgtgatgagtcccttctgccaccccttgcccttatgatcttctcctgcgtggtaaagagaagttgtctgagaaacctttgcctttccaatatcctcatgctcctgctattaccattgctgatgtggatatttctgactttcctcaaggtggccaagttgtgaatccttttttttcaattactttatgggtttcacccctcttctcaactctcatatggctttggtctcttatttaagtgcccccaggaactctgccagtgtcatgatccctactcctgttaatcccaaccagggtctggtttgtggtttttttaaccctgtgtctgtccctactccttctactattgtcagcactagtccttccatgtctaatgatggtctggtgggtcaggagggccctagctctctatctccgatgtatgctccaggtttcagttcggtctccactgactctatcattgtgagtgcaaaccactcggattctcattctgactttggtaatgcttcccgttcgttggctgatgctctgccctctctggtcctgagtcgatctacccttgctgcccccgtttttcaagctgaagctcctaggcaggaccctaccgttaaaggtaagggacttgcttgtgcttcaggtgtcaaaagaccctgctttcagccttctcaagcaactgtgggaggttccttgaggtccatgctcaagcgtgctcgaggggggggaggctgaatttgctgaatctttgccttcagatgctgttgaacaggcgggtgctgctgagcacaaccgcccagaaaaatgagtttgataagttggaatgctcaggggctggggaacccccgagcattcaatcgactctccctccttgtcaagaatcataagcctactttactttttttgatggaaactagattgaagcccaactctgttgataggcttaaacgggctctaggttttgttaatggctttgaaatccgtaggaagtattttggggaggacttcttcttttgtgtggggatgatgttgtaaat

SEQ ID NO: 71300 - DNA, 1233 bp, Cannabis sativa
ggaggaatttttatgcatgctttatataagcttttatctaaaaatgaaaaacaatattagtggggcaaactttaatttgacaagggacgattatgtgcataaacacgtatctatatcttaacttataaacatatacatttgtttattggaggtttaggacaccaacattacaaattacgtgagaaacttcgaaattagcatctcaacaatcttcacgtatgcgtgtcatattacatctgtgtgtttgtgtcggatttgattttttgttttgtatatttttatctgtattaatatctgagtttggtcctcgtaccagggttgcaacttagctgctcaaagggacaataatagattcttcttctttgacatgcttaagtgggaatgtccaggtgaggaattcaggtataaataagctttctctacccttttaatgccataactcattgtaggctgttgaatcttcaaaatggtaaagtagtgggatcgtctaagtatttagaagttagaattagacttatgtgaggagtcctgttataggagaactttattaatgaaacttcagtttttcttctctagttttcgtttttgatggaacaaattattgattcttcagatgaagcagaagaagcaaagagaagaagtgcacttgttactctttttgggaaaattcagaaggttataggtgccttacctcaagaaaggaggagctctgttaccattatgatagatgatatttctcttatggaggtggctgcaagaggatcaatgaatcttgtcatagactttctacattactgtcacacgttaacatctgaacttgtaagacatgtcaaccattgctctacctgtaataatttctcttttttgggttatgttattaattctttctttgcatttctcttcatagggttgttctttagttgcgctaaaccatgaagatatctattctagcaccaagaggccaacacttgttttacaattggagtatctggcaggaattctgataaaagccgagccgttgaccactgggttggccaaagatgtgcatggacaggtaaaatggagctgtaaacttttttataacaaccttttttgatttcttgatgttgttgtcatgtagtaagttcacattttatgtttatcaatcaatccttgcacaatctctattctctatccctgtatgaatttagcaattacatagtgctaacagtaacatttggtttttagtgccaa

SEQ ID NO: 71301 - DNA, 1270 bp, Cannabis sativa
ctataatacacaagtcatagatctagagtaaaaatcctaaatagcctattactaaactgttcttgactatgaatgttattttttaggggatgtctccaactggaacacaacaaattaggataaaattaaaaaggtttgtagcaaacaacaaggcctataactaaaaacaaaagttgaaaaacactaaggtagcacgaagatataaacacattaaaccaagcatgattgttttataaaaatagtctttacgaaaatttttatagagtaaattaagtgatattattttgtaaattttagtattaagtttgataaatttcacgataaacaatctctttgcaaagcaacgacttgttagtggaatttaggaggagcatgccaaacaaattctctcattcaaattaaattcataacaataatgtgtagtcatgttttggttggatcaaacacaaatgttaatcattcttgtaaaatttttggaaaagggctccactccatttgtgttttttttttggtgctaaaagatccttttagtacattgtaatatatttcattgttagatgaaacgaatttatagacatatgaataattctatataaatataaaacaactacataaatagtacatacagaaaaagagagaatcaagtatgtatacatacaattgatgcatgcaaatttcaactaatatattttagtttgtaaaataaaaaagagaaattaatctctcatttattctccttgataatgtttgtggttgaatgaaaatgaatagtaagcttgagaccaatctcctatatttatattcattgcagataaaattagattttataatcattacaaataataatgtttattggtattaaaaatatctcaatcatagatattttgaacaaaaacctagttaagaaaataaaataaaaaattacaacacgaaccaaactaagaagtctaacacaattatgagtataattattaattctccaaaaataactagatccctttggagcattataacatttttggatgatctttttatgatcacaaactactagtacttaacatatttctcattatcatattgttattggtataattaaatattggatctcatataagttaataaaataacttttaagaaatatcgctaactaatcgtgtgacgccatctatagagggtattggacaccactgcttaatagcaatgctattaaagttattcccacattgctaatatgtggaaacaaattaccatatataagatgaatgggcta

SEQ ID NO: 71302 - DNA, 1302 bp, Cannabis sativa
aataattagttataaaaccaataacattgtcagtctataattgttgctatagttaaattgtcaatttataattgatactacatgaaccaatcttgttcatacataaaattaataagtgttttatacatgtaataaaataattgtatgcataaataaaatttaacatataaatatatataaatcatatacggattaacatgtacaaactaattttcgttacaaattcgttaggttataatatttgaacaaattttgtcctaatttgtttttgaataaaagtagaaacttcattaaatactattgattgaagagcagaaggtatattactctcagagaaaatacgaccagcccaaaaacaagaatcgcaagttagacaatatacggctttatttgcagatcgtttaacatgacaaactttaacattattcaaagaaaaaaaaggagattttcgtactcttggacaagaagaccaaagatagatggcatttcaatagagttgttaagagcttgaattgcaacaaaacagtcagtctctaccacgacattattcaaactcttcctttttatccaacttaaggcttccttgatactcaccattcttgcgaaccactagttgactatgtagcaaaagcctccatcataatttttttaagttcatctataacgattaaattaatacaatttttctttaggaacaaattaatatgtattaacctgaaatataaaatagagatgatagagaaaaggtctttttattattgttaaattttattttagaccctttattttgaaaagagtaatttgcggcaatctcctctctccaaactatcaatttacttgcaaaaaaccatctaatctcatattttagtagaaaaattttctaaagtattgttctgtttacatttttaaggtgtcggtccagcctcgttaagccctaattttgcccacatggcaatgacaggtcactaaaaaattatcttacgtggccatattttataaaataaaaattaaaatgagtaattaaaaaaaataaaaactttaagagtaatttgcggcaaaaccccccaactattaatttacttgcaaaaaactatccaaccttaaagttttttcattttttgggtggttttttgcaagtaaattgatagttagggggggtgccgcaaattactccatatattttgaaaaataaaattaaaagcttaataaaaatagtacaattacttaaaaaatatgaataattataaattctacttaaaccatggtttcgaaccaaaccaaaccgttcttaatggtttagtt

SEQ ID NO: 71303 - DNA, 1134 bp, Cannabis sativa
ctcctccaaatttaatatattttaacattcatagcccttaaaatatattttttgaagatgacgtaaatgatcacaccccttcttcattctatccttataaataaacacaccacacaatttcagatttaaacttactaattatatatttaactaataaaaagtgtcatggattgtaacaataaccatttccgttttctttcttggtcgacgttttgtctacttattataactattcctactgctactacaaattcagatcaagtaagctatattttatcttcttttattttccttattttaattaattatatatacgtacaacaattgtttatattattgtaaaattttattgataatattatctaggggcagcatcatcaaaattggttgaaccatggaggagacttgaacaacagaagacatgcaaacaaggagataaaaatcagtcccagaactgtttcgaagctaagtttaaaatgggaattttatgcaggaaaagatgtgacagtaactcctgccattttcaatggtaccctttattttacaagctggaatggttacatatatgctgccaaagcaagtgatgggtctcttatttgggagaaaaacttgggccacttgacaggccttaacgctactgggctcatcacaaatgccaattggactgtgtctagatcgaccccaaccatagctggcgatcttctcatagttgggatttatgggcctgcggtggttattgctgtggagaggtcaacgggagaccttgtttggtcaacgcagcttagtaccaatgtttttggccttgttaccatgtccggaacttattaccaagggttagtaatttatttaaactccgggtaatatgaggtgaaattctctttcttgttttattttttatgtatgtacttaatttttttttttttttgcaaatttgagtcatcactagctaaatatttgtgtatatatgtgatagtaaattcttaaagctaatatactagtaatactgttatttaacagttatatctatctatctgtcacttcaaatttacaaaaaaaaaaaaaaaaaaaaaattaaaaataaaagagtttttcaaaagaaaaaaaaaaaaaaagggtaaaaaaataaaaaaaaaa

SEQ ID NO: 71304 - DNA, 1543 bp, Cannabis sativa
gaataatttataatataaaaattattgttcaaatagtttatttcacacgtgtacaaaataaaatagtaacgcgtgcaatagactgtttgaaccttgtttctgggtgttaaattttttaaatttttttaaaatttttctatatgtcttaaataactacaacatatatgatcataaaaataaaataaactaagaagttcttccgaatacaaaaacagataaggttgcatcgatgcacccctttagatggttcattgaagaattttctaaaacttttttgctgcaaaagaaagaatcaatatcaataatgcgttacacatgatgaatctaatagtaaatttcatctttcctacgatacaagtgtacggaaactttatctgcgtttcaggcattggacacgtagacttcaagtcatcatccaagacccatcagtgggaccctcagcaaagataaaatgggccaagcccatctggatatgtccttctaggaacatatctttgttactcgcaaagccttccgccctaagcaagccgtacccagaagacatctccagtaccacgagattggagagacgagacagtgcgttctcagaagacccttccaatttccatttatattcttgcacaccaataaggaaactctagttgtcagatcacaacagagtatcgtatcaagattaaagaggaaacttactacaataaatattatgcaatttattcacattaattgcccacaatcagtgtatgcggtgtggaccagatcaatccaaatccgatctacctagtctgcagatcgtcttttccatgggctgtacttcatgagaaagcctaagagtattatttactctaaactctgtaatagagggaaagaggaaacctaatgtaactctcaaactactataaatatctcacgaatcatatgtgttaacgcgattttcgttcagtaaatttgagccttatgattatgattcagcacaaaaagagtaaaagttgtagaaaaataaaataagaacactggattttttacgtggttttgcagttaaaattctgcatagtccacgagtcaatcttattcagatttctgagtatgttttttcaaggcctctcgcgtaagagttttttttttgtcccctttttttgatcttatctaccactatttataattgcatagtggcagttaattacaaagccgaccaaaatacatttacggctattatccctaaaatcatgggatttgaatacaaatcaaaccaaataaatgaagtttttacacaactatgaatatcgcgcctttattgggccaagatgggcgcataattaaagatatacgataagccgtatctcatagggatgcctcgccgaggagggagcaagatcactttgatagcgagcatctgcttgtcattttagctgatcgagactaatattgtcttaactctgactgttatactttctggggtcgacaagatcttcctcgcatgcaaaacatcttttagtgggataaaaatctcgctatttgtttacttgactcgccatactatctgtac

SEQ ID NO: 71305 - DNA, 1514 bp, Cannabis sativa
catggtagcttatttatttatttatgttaatattttcaaaatattgaaaaataaaaataaaatggtagattaatacttttaccatacttcatggtttggtgttgtcagtattgaaaaggacggtgtgcgttgaggaaccaaacgaagaaaaagatcacgaggcttacagtaagtagtctcactctcatcctccctaagatttcatccactgtcagatctcaccgtacgtacgtactcgtcttttcatcaggaccgttcactttgcctagtctccacgtctttgattcatcgtcaatgccaggtaacatcaaatccatctacattttttttggatgattttttttaactgttttttttttttttttgaaacgggatatttttaacttattaacaaggtattaattttgttttaaaaaaaccaaggtattaatttatgaccctcttaatttatttcaattttttttatcaaaaaaaaaattatatgtatatgatgaaagtgatgttgcaaacgtgtaaggcgggtcttttttttaaaaaaaaaaaaacaacaacaacttggtattgtgtcaaagtcaagccaccgaatcaatgcttgtcgtgagtcaaagttaggtgtggactaatataagaatgatttagtcaactcatcttccggaattgaattttgttagaaaatgactaaacccaactaataaatataattagatctctttgaacatataattatgctactgtatacagggtccactctacatttttattttttaaaatatatttaatgtgtaactagtgaggatttgaaactgaaattcatattgtttgatatgttggtttgatttgatgggaataggtttaatattgtttggagagtgatgaagggaataataaacctaagaaagtaatattatcgtgtttagttgacattacaatacaatgtgacaatttttttttacaataataattattattttttttataaaatactaataattcaatatttttttctttctaagcattcaaaataatttttaattattatttttatataattttataaaaaaaaaattaacaataataaataattataaagagtaaatttatatacaaattgataatatattttatagaataaaatatataaaaaaaaataaggaaaatatttcatattttaaatatttttatatactttagtattcatatataaaaaaaaaaaaacaattttaaaatgcaaaagtttgtgtttgccaatagcattggaaagtgaaaactatattttcattggttttccttgtcagccaaactaaagcccaccatttttccttagccaacaataaaatattaaaaacctaaccaaatataagaaactttgagattctcatttccactttcctcgttaccgcataccaaacaaccccttttttttttttaatgtaagcgtttatatattacaacatgttttacctgggactcgaacccaggacctccaacactcacacacccacctatggccactt

SEQ ID NO: 71306 - DNA, 1342 bp, Cannabis sativa
tataactctagatatctcttgcatgttttatctcaggttaacaagccctatcttccgttggcctcgggagaatattcagttcaaactggtgtcatgattgttgcatcctttgctatcctggtatgggaagcatctttacaaacgaatttctcgtttgtgtatttggagcctattatattacattctaatctagccatcactttgtttttcagagtttcggtcttggatggatcgttgggtcatggccattattttgggccctcttcatcagttttatattaggaactgcatattcaatcgacgtgagtttatttagtctctcatatgaatttccatacataatcaaatagatttttcaaaacgttaagatgaaaactttacagactgtttcttatgtcctagctttgacacctttcatgttaggtgccccttttgagatggaagagatttgctttagttgcagcaatgtgcatccttgctgttcgagcagtcattgttcaactagctttctttcttcatatgcaggttatcatttatctattcctcttgccttacagttaaacttttgataaataaatcatacatatctaaaaatctaaatgattaatgaatatatagcatagaaacagaaagtgaaaagaagaatgctttacagatttcaatggtttttctaaagtaccgaaatatgtaaatatgcattgatttttcagacccatgtcttcaaaagaccagcttccttctcaaggcctctcatctttgcaactgcatttatgagcttcttctcagttgttatagcattatttaaggtatatcaacttctttctctttattgaactttttagttttgcttttggtcaagaacatgtcacatgcaactcggtcagaaacaatatcttaattttatatgttggtgaaaaatgtataggatatacctgatattgatggagacaggatattcggtattcgatcatttacagtgcgcttgggtcaaaagcgggttagtcttaaatatttaatctattttgttcttgcttttcgaaaacgttacttaattaacgacattgtgcaggtgttttggatatgcatttcgctacttgaaatcgcttatacagttgcacttttagtgggagcatcatccggcttcctgtggagcaaagttgttacggtaatgtttgagtgttgctaattctgtaggaactattgctcttcattcttattggatataataatacaaatagtactatgaatatgaatgctaacgtagtattaggggtgagtagaatttccgcttaacaatgctaacggtgtggtgtggtggtgatggttaaattttttactacag

SEQ ID NO: 71307 - DNA, 959 bp, Cannabis sativa
cgtcagacgtacctcctagaatgtttatgaaaatcccagtgaaggaatctaagacggctttcttcagatagatccttattgataaagtcaattgcatttgcaaactctgttcgaagtatagactctcgaggcctcttttcttgtgtctgtaccaattaaaattaaacgaaaaataaaagcaacattaaatctacatgttaataaagattatcaatataacttaagtattcaacttttatcataaaagcaagacaataggaaaaaaacaactaataatattagtaataatacaatgattaccttaatcagattcaaaataattatggggttcccatatctcttgacaagattctcaaaatgaagtctagtagcctcatagttctggtccttctttgacactgaaaagagacatctccattcataaagtccacaaaaatgtacaatggttaaacttataaaatcagtacttacatataatatctggtttgatattcaaacgtgaagtttcttgtgaccagaaaagagggattgagccgcgattctgaacgacagaacttatttgcacaggaaatccatcaggcagatcctcaaatacaatctgctcagtctcgacatcattagctactctgcccttttcattcacacctcgtttgagatacctacagacaaggaaaattttataagtacacagatctgtttattgaaaacaacttttaccaaaataaaatccctggatcacatcagacagctagaatagtctctatagaattccgcaagaaaaaatagaaagtggggacaaaataatgagtttgaggacatatacatcaaattgtgaagtgtgtgcagtgatggaggtagtcaatgagttagccacccacccaaaagaaaaaaaaaatcataattttgccccaatcttacaaattctcccttctatcagcgtgtgtgtgtgtgtgtgtgtg

SEQ ID NO: 71308 - DNA, 594 bp, Cannabis sativa
agacctcgagactccaccaaattggatataaagggtaaaaactagtctcttcccttaaaaccttctctttcaaaaatattaagcacaaaattagtatcaccaattagcaaccacgggcaaccaaacatatcacccaacatcataacctttgactaaaaattcttcttcgcatgaaagtacaagggacaattaacacaagtgaggagccaaggctgggagggagggttcgaataaaccagaccaaagatttgattacaggagcaagaaatactttcaaaaataaaaccatatttccaggtcaaaataatacctcttgcaacaccaacagcaggcacaaaaatattaaaataaaaatgaagtgaattaagaatacataccacgagagtagcatcaactttaagctcagttagaaagatgaaattagaatgcacggccaaactagggactttagctcacaaactgtaaagttctaccccaaccctctacagttccgagccacacctctcatggctcttgtggaggatgcaatccatgctcctccacaagggtaccaacctgagacgacacacaagcccaatatcttcaatcaaaacc

SEQ ID NO: 71309 - DNA, 1929 bp, Cannabis sativa
  modified_base (1820)..(1822): a, c, t, g, unknown or other
tgtgagacaagttagaaaaaaaaagcctctcagattttaaaatcctcttcttcctctactgaaattttttaaatctctaagtgaattgaggaatttcccacacaatttaaggcaatactcaggcctttttggaagattgtgaataattccaacaacaaaagaagatccaggtttagatcttgatcatactctacgactgaaaggatcaagggttagagatctaaacgaaaggagacattatattcactgccaccaatgtaaggtaaactataactttatatgtatttattttattgttttaggaaattcatatttaggatgttagactatagttctataatcaacataaatgttagtaaatttagatcatggtaaaatatgttccaacaagaagaacctcaaatggcattaagttgaagggcacttgggattatgatttggcctatgagaaagtaaaaggagaactggagttgaaagggttcatggatgctaattatgttttgaatagagatactgaaaaatcaaccacttcctatattttcatgacaaaccagaactgtatgtgctagaaggcccaattactgttcgtggttgctttatccaccatcgagtagaatttatggctactacataagcatttaaggaagctttatggcttcgaagaattttgttcgaattgaaacaatagagaggaggagtggctgtgtatttagatagccaatcatccatccacctttgcaagaacccaacttatcatgaaaagagcaaacatatagacataagactctactggattagagaaaagatagaggaaggattgattgatttggagaaggttagaacagaagataatcctactaatgtcgggactaaggtcttaacagcaaaaaagttcaagcattgcttgaacttgatcaatctcaaaagttagtatattgagagatacctgaacaccagccatgatgattgcattctttattcatcattgtcaatattttatttcgaagaaactaaggggaatttatggtatagttcctccaaataaaaagatctccaaagttattctagctatggaaagttagatgtcttctggaagggaattcttggaagtctctcttccatctggaagaagtcttgtagaatgataggtgtcttccaaaagggcattctcggatgcctatcatgtcaacctggaaggaatcttcaggagagctagtcttgctccggaaaggagttctggatggctagctattccctcctagaagggaatccagatagttgactccaactatgcttttcatatcaagggcggtccttcaacgtgtgcttcaattcatagtcccagaagtgttcgtttcatctgggcgcactataacttaagttgacgtggaaagtttgttatatttgttaagttgtaacaaacttaacaacttagcactgcaaccacaacctttaggatctatatcgtgaacatataaatatcaccaaagattagcattttagagaagaataagttcaaatgagttttgagaggtgatcttaagagagaaaaatcgagaggtagattgggtttggaatttgtatgaagaatcttcaatagatgaaaaagattcttgggtaagagtgtgagagataaatattttgagagaattcaacagagaattgatctcgactgtattgcaccttgttcttgctcaatcaataaagatggttacttgcaataataggtgtagccatggctagtgaataatcctactgttgtatctttctaagtcaataggtgtagactgtattgcacctaatggtggcgactgtatttnnnttacaaaatatgaaacaatggtagaagctcatcagatagaatagccttgactctcgcctaaacgggacaatgctggattccaaattgatcgaataaaagattgctag

SEQ ID NO: 71310 - DNA, 665 bp, Cannabis sativa
aaattaaaagtcacccataaatttctcaaaaactaagaattttagttatataggcacattttatatagaatagatatagtcttaaaggagagtatcaagttagttagattataatttagttaattagttagtagtgatctatcatagagttagttattgtgtcttgcacgtgtaactaactttgagttactataattagtaaatgtattcacttgtaatcaattagatcattcatttaatataccatacactttttcttcttttctactctatttctttataactgatattgaacaatgtaaaatattagttatataaggctcacactgagttatgttatattgtattgtgttatattatattatattgatattatttaatacaatattataattggtattaacttatatcaataggttgcataaaattatactatatttaccataaactcgacctcaactcctatcctggcccaagactcgaatctcatcttcaattcgatcgggtctgaacccgaaccctatctccaaaccctaataaatttgtaatatgcatgagaattcttatacttttaattctttattttctttttaatcagaataaatgtgtagtatatattcaatgtttagttgacaattcttaaacacttttaatgaaatatatat

SEQ ID NO: 71311 - DNA, 1171 bp, Cannabis sativa
tagtgactatatatgatttcttttaatacgtaaaagaaatgtgcctagtatcaacaatatattatggtctcctcaaatatcacaattggaacaaaataataatgaatacaacttgtggaattggtctatctggtgttgcctggttttagaaagagtaaacccttcgtttgcaattttatagctgtatcccattgtacatgagaaacaaatttattattattattatagttattccaacaaagaaatgaaaatgaataaagggtcttctgcttctcaaaaaaaaaaataaaaaataaataaataaatatataaagggttttctgatcttcacaaaaatataatccaaaataacatcactattatccttaatatatataatatgaaatggtaaacatagaaatttgtattaaaagggagttccatacataaaaagactttggtagaaacaatgtaaggagcatgcttgagttgtattatatgcactttatctaaactcaatcggttcataaaaagtagtaaatataattaagcttgaccgaaagctacacattacagtatccttttaaacatagggtaccatgattttgttttgcctttcgaggaaaataaactgtaatttacatgaattctgaactatttgaattaaaaaaaaaaaaatagtggggtaataatccaaaatattattacccaataagtacaaagtgaaaaaaaatcttggataagtgcgagtaatatgctcaaaatcattttttttcaatatgttctgttttacatgaggaatggttagacattctttttgtttgtaatttttttaataggggaatttttatggaaattgagggtatatttttattttgttatgtcataaataaataacactataagtttatatatgagtttttttatgctatatttttgtaaaaaaaaaagtagaaatctcataattataaaataacaataagttttgctggaaaagttatcagctccagaaaagtcaccaaaagagttagtatcaccagaaagtcgttggaaaaatcatcgtcgctggaaaaatctctggaaaagtcactgaaaaattcagcagaagtaaatgtctcagatataactaaaaatataactagttctatgaataaaaactaataactcaaaccggttataattaaaatatatc

SEQ ID NO: 71312 - DNA, 1126 bp, Cannabis sativa
atcatcactattacaacgtactcgattcaaaaacataaaaagacaaaagaaaattaaataaaatgttacaactgggtggttgaattgggaaattacagcagtatcaattttgaggttactatagtggctgcatagattaaaaaatgaatagattttagcaccaattttttagcaacattagcagtaataacataccacatatggtggtgcaagaatgaagctctctgaaatatgaaaatttataaaattaatataaatgtaaaaagaattaaatatgatgttaagagtagaattcagattgtaatgtctaaaaaagcggcaaggaagaatttagaatggtttaaatagttgtgaacaattgtaaaaaaatggtagattttaaatgatgctactaggatgtaaaactttgtttagtggaatatatactcatcaaattgaaaaaaaaaatattacaattcaaaatgaaaaaaaaaaaaaataccaatatataaataaaaaaaaaaagaagatgagtagaattacaactcaaagcataaacttacacataaatatacctaaaagtgatatatatagataagtaagtactgaatgattatatttttattgtaactatgttggttacatttgttttaacctgaaataacaggttaccaatatgtaatttttttaagaattaaaataattaatttttcaatttaaatattaaacaaaactttttaggataatatttataaatagttttatttttatatttaaattcttattataattttttaaataataaagttatttaattaaaatatttacaataaaacttttttttttttacaaatattaaactttcacatgttctaaaataaatttttgaataattaattagtttttaaaaatgacacttaattattttttttgcagaaccgcttgacccatcttcctcccatataaaaaaacaaacctttaatttaaaaaattagggtttcagtttgtcttaaactaatattatgtgaattttctacttcgatgcaatctcctcactacaaaaaatagtactacaaaaatgagttttcccgacatttttaaatagtcgtttaaagtattctcgtcggtttctataaccgtcacctat

SEQ ID NO: 71313 - DNA, 3167 bp, Cannabis sativa
ttcgatgtgccaccgcgatctcgttcagcactggctgcaactagacaagccacacctgcaaagattgacagataaactgctgaaaagaaacacaatcaacccaaacccgaacgaattaaaggttagtttttttcggtatgtattacctataaccgagttggcaactttccctccatgtttctcaatctcttttctccaatattgctacattttcatgatgatcatcatcagcaactacattttcatgaaacataatgaagaaaaactcataacttacatgggttcgagagaggcgccccatcaaggaaatagtcattcctaagaaaggtttatcggttgctttcgagttcttgccagggcgacgactcgggtcttgatatttcttcaacaactgcacaagaaaatgaaagatcaactttataataaagagcacaatatgtttgtaatgaagagatattttttaaggagtgttccaacatctgaaaccggggagtcgagcacagaatcgggtaatgtgatagcttcgtctttcctaggcggatcccttgtgctgaaagtacaagttgaccactcactgtatgaaccattgcagcaaaaccttatcccattgtactctagtgtgccattacaaacagggcatttgtctaatgctccatagaatagcaagtcttggctgtttcagagttcaaaaacaactgagttcaaaagtcaaaaccttgcattacatagaaataaactaaaaacagtctttaaggtagattgaattcaatttcatttatttttccccaaccaaacacacccttatgaatcagctaataacacaagtattcgtaatattactctaaacatgtatcagaactaaggttcaatattattctcttgggttcatatatatattaaaaaattaaaaaaaacaagaacaagtcttcaatgttcaatacccttatgaattcagctaacacaagtatttgtcactgtccgaaatttgtactattactcctctaaacattgagttagaaagaaagtccttaaagttcaatattctcttaagttcttatgtgtgatgtttttcagtttgactaaatcccatctcattaatcattatcccaaccaaacacacccttgtgagttaagctaacacaagtatttgttagtgtcttaaatttgtatcattactcttctaaacatatatatatcgaacaaaaaaaaaatcaagtcttcaacaccacactcccttaggttctaaaaataaattgaaatccaatttcattcattttcctaaccaaacacacccttatgaatcagccaaatccaagtgttagtatcaaattaaaattagactcttctgaaatttgtactattactaaaacattcatgagataaaaatacaatctttaagataaaaagacaatctttaaggttcaataatattccaggttctaaaaatggattgtatcccatttcattcatttttctcaaccaaacacacccttatgaatcaacccaacccaatccaagtgttagtatcaaattaagactcaactcctcagaaaattgtactattactctaaaacatgcatgagacaaaaaatacaatctttaagacaaaaaaaaaacaatctttattatattctttaaggttaaatattctcttaagtaaaatgttagtgagaattagcatcataccatctttaaggtttaatattctcttaagataaaaatacaatctttaagataaaaaaacaatctttttaaggttgaatattgtcttcaacttcaagtacaagtgttagtgagaattagcatcataccatgttctaacaagtgaggcctcagaagaaactgaggaatctaagccattagcatccaaaatttggcgcatatgatcaattgaaagatgctcattcattgctttacaaaattcctcatactcagcacctatttcaccaccatttttcccattagaatgcccactacttttcgcctttttcggcgaatgctctgcttcatgccctttgttctctgccttttgtttctttgttgtcttcatactatgatcttctgaatgagattgtgaccttgtctcatgaacctgttttcaaaacataacattaataaacaaaagtgttattgtttcttcaacacattctcaagtttttgtcaatttattctcataaaacaaaaaaagtttcaaactttaaacaaaacccattaagaaaagacagcaatttgttaagaccttcatgtttaaggttgttgtgtttttatccaattgaagctaagagtactagaaattttttgagagaaaaactccaaattataagatgaacaagttttgttgtgtgacttatacaaaagagagtagtaattaagttgacacgtgttcatgcaatgcatgcatggcatcatattgtgtcatcataaagtgacaacatctgttctgtcgtttgacacgtgtccaaatgggctgctttcattgtttttgttattgacaagtgttcaaaacttaggtataactagatcactaagtagtaatagtagcgtcttcaaggtctttccaattccttcattttcattatgtttggtttggttgtcgttttgggttgtgtgcctgtcgttttgttcgtattccaatgtcgtgggagtagtacttctctttcgagcgtgttattgtttttacatttttataaggttaattaagatttttgtttcctgaattttgatatgtactaaattaggttctttgaacttttaaagtcgttaaaaatgccctctgaattattgagattgttggatttaaggactttgtctaatttcatttaattttactatttcagtgattgtttatgtactaaaccatgccccccagactttgatatcaattaaatcatgtccatcgaactttgacatgcactaaattatgacccctgaattttcatccatattagacttttttactaaaattagaaaaaagtctttaaatccaacaatctcaataatttaaggggtatttttaacgaccttaaaaattcagggagcatgatttggtacatgtcaaaatttaggggacaaaaattctaattagcctttttgtaatgagaataagaagtcacgtgcaaagcatactatcaaacaataaaaaattttaatgataattttttagttat

SEQ ID NO: 71314 - DNA, 1613 bp, Cannabis sativa
tgttagaggtttatcttgcttgtacgagtcatctactcaacatccagaagtcttgacttcgataaaggatctagtccattatattgattgggtccacgattgggcctgtaacaactgggctaaaactatcttagaattacatgcatcctccatctagaaacacgaaaaagatttacccttaagccttcagaactcaagaactcaaggggtttcagaggtttgtctttaaccttccagatggcatgagggtatgtggacataaaaaaggaggaaacctttgtgtattccaaataaatttatttattgttaatagcttcttgctttttgaaataaagtgacacgtgtcattatttctttggctcatgagaattactttcattaatggagtgtgtgcatcatagatttataaaacgatgactaatcatgttagtgagtattctataaagaatatcatcatttaaataccttggttccaagcaacgcattaaatgctaatctaacatctcttccggaccgttggatgtattttgtattttcttaaatatcatcttagcccttgatctgagctcacgcgtatcaccatcctcgttgtataaatagagtaaaaattttccatttaccacttttgccaaattttattatgagttcaaattttcagagagaaaagagcaaaaatttctttcggtgaatgaatcattgcttcgacgagtgtattaatcttcgtctttgaatttatgagggataataccttgaagcaccactaccaatcttaattattgattcttctacaccatatgaaccactggatcttcaagtggagatcgaagcactcatcaacaaagcttgctcccttcagattaggcttgtgcgccttgatgaacctttctttgttagaaatttttttgaggttgtcgcacaacattcatattccctctctgactcctcggccttctctgagttcttcatcaagtaagtaattttggcattttctggaattctaggtagtactaaagttctatttttctttcttgatgattgcatgttttccctaggtatatgaatagaatttagaccataggagaaattttgaacatttcgttgaaatggggatattttctgtgcatattgcttgtaaacatttttagattttgtgatcttctatctttattagtaaattgtggttaaaatagctaaaattctgtaacaaccaaggctaaaattaactcctctatttgagcccttgtgattccagatgacacaccctgtagcttttgtttttgtctttgtgatcctgatctgattgttctggaacaatattcctcaagatttttttttgctggatgtaggatccgggtgggacatctccaagcagtaataaggaaggactctcccgtaccattgctatcttctttagttttggtatttaacttcttatcacttttttttcgtttttcttcttttcctattcttgccatgacagaagttgttcaagttggaaaagtcaaaattttggagcaggaggaagtagcagctccaagaatggtgtataattcatctttctaggaggtggatgttgggttttgtgccctaaatataactcatttcaatataat

SEQ ID NO: 71315 - DNA, 1413 bp, Cannabis sativa
  modified_base (1035)..(1059): a, c, t, g, unknown or other
tcttagtgtaattactttttcaataataaagtaattacgttttcacgtgttgtggtgtccaacacataagatcatccaatttaagttctagagttttcacctcatccattcgcacattgagagcattagcattcaaaagattatttatctccttctgagtttccactacttgcttagataatgacctaaatcttaacttattccaagttgaaaggcgatttgcacagtattcaagagagttctgaagtcccaaagtgtcggccacatctaacgtatatctttaccatgcctccaacacaatggatcgacaatcattgtctttaagccaatgaggttcaaagcgaaactgtcgtttaactcgctcatgactccgtaatacaacattctcaagtttagtgactataggacaatgatcagaaagaaaaaaattaccatgacacactcagactaaaggatacaactcagaccaagcttgattgcacacaaagcaatctagttattcttggacatgtgaaataccttgtcttttattcacccaagtaaaactcggccctttgtaccccaagtgtaatatcgtgataagtctaatggtaaataattaaggtttataattatattatgggttaattagataataagtgggattatgatcctactaatctagtttaatataaattttaaattcactataagtgagtaaataagcgtaatttataaattacgaagatttatatagtatgtgtgaatgtaagatgagctatataaggaataaaaatattttttggtttggcgaccttggagacccgatcgagggccaaaaatatcataatgagtttaattgatataattgatgagaatattatgatgagttaataatataggtattgggataattaggagtatataggatttggcttaatgccctagaaataaaaatttcttagtggctaaaaaataataggataaccattaataattttttttattaatatcatcatattattattattattaatcttattattattattattnnnnnnnnnnnnnnnnnnnnnnnnnttattattattattatattatgttattattatatatgtaaaaacttatcaatatatataataagtttataaacaaaacttacgatcgaaaacgaaaccctcgtcctctgtcgaaattctctcccccttatatctattttctttgattttcaacttgaaacttagcaatctaagctccggtagtagcgaaatagcgaattctcagagcaggatagcttaaggtaaggttcaattctattttaagtttaaaataatcggtttcatataggagtttgtgaattagaatagttatgaaagttttgaccttatagaattgatctcgggtagtcaggggactagttctgatattttcttg

SEQ ID NO: 71316 - DNA, 704 bp, Cannabis sativa
ctgcacatgaaatataattgtgagtcaataaattcattaagaaaagtataaaacatacaacatatgtctaacatgtataggcgctcatacacctaattatcattaatctattacccacattcaacgcgtataactgagtttccaacgttcttaactatagtacaattgctatattaccaacttatacttaacactctagtcgtcaatccataccacaagtataataaactataatatctaactgcaatcagtattttattcgtactagtgttggtagcgttaatttatatttttctatattgccaaatatatatattgtcgatatccaggtgtaactctttatacaccaataccacacaataccgctattaatgatatgttatctaattggcaaaacataatacatgcatactaaacatgtacatcttgacattaatcttacctcagtttcgtaatcaagtatgtcagtcaacctgagtggaataattgctcgacaatcggaggccttaagtcacattaatgtaaagctggtaagtatctcgttaaaacacttttggagacttaattcataatttgaaatttcattatcgataaatagggtggcaataccctaaatatcgagaaaaaaaaaattgaggttcctgaaaatcaccctaaatgggcgaccgaatcaccaaacaagtgctcagaattttgggcactcg

SEQ ID NO: 71317 - DNA, 1662 bp, Cannabis sativa
  modified_base (1373)..(1374): a, c, t, g, unknown or other
acatagaaaaaactagcataaaatttagtatacgtgcattgcacgtagctttttgctagtatatatatatatgtgtatgaaaagattataaaatttagacagcggcttaattccctagtgtagggataaaaagaataaaaatttaaaactttatacataaggaagggtctttcattgtagatgtgtgcatgtatatatattatatgtatatacatgtatttattatgtgtgtttatgtatacatatgaataatttatataaaaagaagattgcttagtataacattaaccattaacaaaaattttagaagaaaaagtcaaacacgagaaaaaagctaacaaaaaacaaataagtataacaatgcaaccaacttatcaaaagaattgcaattaatgaaagatggttatgaatgatgtagcaaatagaaagaaaaaaaaagtatattaagaagtcgttaaaagaatagcaaaaatcatcaaattagttgtatgttgatacctttaggaatttaagtgtgagagtgagaaatcgttaaaatgataggatttatatagattactcgtaattaaaagaaaatatctcaatccattcaaaaaaaaaaatatttatcaatttattaaaaaaaagagaaaattaaagataaacattttaataaaaaaaaaaagaaaattaaggataaaattaataaatgtattttaaatgattttattctaataaataattataaagtgagagaattgacgagagaataattagaagtgtttggagtgattttagagtgtcaagtctcattcttttcctatatttatatactagtgaacaacccgcgcttcgcggcggatatttaaaaaaaaaagaaaaattactgattttcatataatttttttttaataatatgagaagttatgtgtacaaataggtcagcttgacatgtaattacaaaatctcttttttataatggaagcccgatatggttcatataacactcttccgtatatctcgatcattcaaaattgttctcatcattgtatatcacctgttgttattacagtatctcactaactctctatcattttgacttaacaaaaaaattaaaaaagaggtgatagatttggagttattatttttttttaagaaaataaaaaaaaaaaaatgaaaaaataaggaaaaaataaatagagatatatattttagggaaattaccctatatactattttttaatttttttttttaaaattacggttttggttgctatggtgatttctatctgtgttgctatgtgaaatttaattgcgatttaagttgctacgttagttgcaatggaatttctatatggaattccataaaaatacaaaaaaaaaaaaaatatatnnatatatatatatatattcaagtctaaaaatgaaaaaagtcccaatattttatatgaattaagatttataaagttaataaaaaattaaaaaaaaaatgagagaattaaggagcaaacaaataatactaattaaaaaaaatttagattgtcttatcacccttatgtttctcttatatatatagatatataaatataattaaaaagttaaaaaaaagtagagagaataaaagagaaaaataattttgctactacgtttagagcgtcatatcactgcatcatatagatatat

SEQ ID NO: 71318 - DNA, 2062 bp, Cannabis sativa
taccagcgcaataccaaactttttccagcacaaaaatgtgctggtaaaagtgacatttcttgtagtgtgtgtttgtatacattctaagctatttatagtagaaatacctcttcttttaaaaaaaaaaagttaataatttactgtatcaaaaataagatttaacattattagttgtacgcgtattttttcttaatacacaaaattgacacttattatagttgcttttctatacaaatgaaaatatatttgttcggctttagcttctataatcttttttttagctttaagatttaaaaaaaaaaatttcttctaggtgtgtttggataaaaaatgaaaagccattttttttaatttaaaagttcattaggaagaagctaagatttgtagcttcttttaaaagaactttttgagaagctattttcaaaattaaaatagtttaaataattattaatttactcacaattttttttaatgatattcaaacactttgaaaagtatttttcatatataataattatccaaacagtaaaaatgagttaaagtttatatttatcttatacttctagctataatcaaaagtagaagcttaatcaaacagaacatcatttgatacaataactatattgtgtagttaacaaggaaggcacattatagtatacacataaatatatagtgtttaagttaattgttgtaacgggtttgtaagttcataacaggaacaaaaatagtatttcgatctacaagatatggaggaatagaaggacacaaaaatctatacataatggaaaatgcagaatgtggtgagtttggaggaacaacaagaaggctaacaacagggaattggactgatacacattgcagttggtcaccaaataatgattggatagtgttctcttcatctagacacaagtcaccatatgcaccaaaaactgacaatggtcttgacccaggattttttgctgtgtttctagtaaatgcaaataatccttgtgttgtggtaagagtatttggaagtgggtataatcttcaaggccatgtaaatcatccattttttagtcctgatggtaggagcattgttgtgacttctgatcttgctgctgtctctgctgatccagtctctatgcctattcttccccactctgttagaccttatggagatatatttactgtggatattgacccatatgatattaacaggaattggaatgtgccgtattttacgtcttacacatagtaggtatgagaatactagtgctagttggacaaagttctcaaccaaagatccacatgcagtatggaatagtcaattggaatctaacaaagatcatcactatatgctcaaatgcccttatgcacatcctaaaacgggttgatagtactttctttagtacttaaattattacatttatagtacttacatttgtatttaacttattcttttagtggccaaagtacaaaagttattacaaatttaggtatttaaattactttttattttgcagcaaaaatactaagattattatgcttgtaaaacttaatgcccaaattaactttttggtatttaagtttgttgacgtaataattttaatatttttacggctaaaaaaataatttaaatatttaaatactataaatataataatttaaatactttctccccactaaaataaaataatttaaatacttgaatactaaaaaatataataatttaaatactttaataatttattacacgttgtcatttcattatctcaattccaataataatatcatatacattagtatatgtttatttccaatgtaagctctttatattgtttcttgttttgaatatggtgataataaaaactgaactctagccttacttttccttgatgttcttaccataaaagtttttttatatatttcaagttatagataagaaaatttgataatttttttatcattttttaatggactttatattttgttccattttatttatattactattatattcttattggcattcttatttatcggaatcaaatgcaacatttgatgctatatataacttttgtag

SEQ ID NO: 71319 - DNA, 1669 bp, Cannabis sativa
  modified_base (224)..(225): a, c, t, g, unknown or other
caaataaaaaatactagaaatctttaaaaaaattgttaatattattgtgaactaatattttattcctttattttatcgactaaaaactgttaattgactataccatactaaacattttaaatttacaactttttaattaatatttaacactaaatactatgaacgtacttttaaattatgatttactaattagtgactacaaaaatttaaaatataaaaatatnnatttataatttaataaaattgttgttaattctctcccactcattaaacttttttatttttttttttcattttcttaatcattttttagttaataattattttttaaaaaatcatatgttaaaaaaaatcttctaactataaaattgttttcaaataatataatttatagttatttttttaataaatcaaatcaattttaatttagatttatttattattaaaaaatgctacacgattaataattatttagaattaaaaatatatatatatataaaattaaaactaggatgaaggagaacaaatttgctcccattgtcaatcatatttttttatttaatattgttaaatttttatctattttatcttattattaatatatgtatacatctctatttatgtatatatcattccaaatatttctcaagaaaaatgagaatatataaatatatgagtattccatgatatttaaaccataaatgtaaatttatgttaaaaaaaaaattgatacttattaattattaaagttgtctgttttaattgttatgaatttttttagtatatttttttagaaacccctattacaactagtcagtaaccactttagaaatccaaaccgtaaatttaaaagaaaaaataatatataagataattctcttatttatttaaatttatttttggaataaaaataaaaaataattactcatattattagaaaatataaaaaaaaataataataattaatatctcattaaaaaacacaatttttttttctaggtaatcataatatataaaataactcgtatgagaagcatatatatatttttctttttgtagagtaaaacaataacaaagagaagctgattgatcatataaaataatttattgaaaagttgtctcttttagacatctttccacagctactcaactaaaaaatctcatgatgattaatcgtaatagccagtggacgaggaagaaagttatatatatttccaaaatttctatgtattttttgacttttatgtttattattgttgttttcttatgcgtgattggctatagctacgaacgaggactcagcatatcataatttataaacatagcaagtccatgccatctcataactttagcgaaaagggcattcatgtcctaatcttttcttttcgtgtaatataattaagagaaatgctaaagggtatcagtggtgtctagcaccttcctatgtgttaatatcgctattatttcaactaagtattaagtctcatataatttaatataatagtttttagggagtatcgctagctaatcgcaacgcgacatgtcgtaaaagtgctaaacaccactggtgcctaatagcaatgctctataattaaatagggaaggcattattttctacactagcattttttttatttttggcacgtagacaactatattctaatttttc

SEQ ID NO: 71320 - DNA, 1353 bp, Cannabis sativa
aaaaaaaaaaaaaaaaagtccaacttttagctgaaaaaaaaagtcggtaaacaatatatggcacttaaaaccgcaccataaagaaggtgttcgcggtacggaatgtggatcgtgtgtgtttagcttattttttaaaattaaattgtatatgtgatttttataatttttcaagtgtcctgaaacattttggaattgcaaaaattacattataaaaatgcagtatagtgctgtacagtttacacttattattactatcatatattaaggttaatctattaataaactttaacaattaaaaaaaatatatatcttatcaaaattttaacaacataacatatatactaattaaattattgtattgagttgtcttttaaaaaattatttaatttagatatatatattgtattaaatatatatcaataataacaatatgttaataataaaaagttaacgaaaaataaaataaaatttgagaataatttatatgtatatttcttaaatttaatggtatagcttgagttttgtaagcatatgagttgttcatgtataaaaaagagaaatttgtaaaattaatatttttgtaagtgattttaaattttaaacggcaaactgtatcacaaatttggtgaaaatgtaaactgcaaccacactgcaaataatataggcggtttgtaccatgtgaacagtttgataaagactccctaggtatgaagcttttgattcataaattttatattttcttaaagactttttttgtgatacataaagtagtcttagtttagacttaaaaagcccaatggcctgattgtcaaaactcaaaatcacctattgtcaaaacaaagaaaacgaacccgtgcctttggataattacataaagtactatatttgtaaaaaattacatttttacgttaattttttttttttatatatttttacggttttgcatagaaacaatacgaaaacaacaagaaaactacagaaaagtaatataaaagtaacaataaaaaataatatacagataacaaaaaatcaataagagtataacataaaaagaccgtattttctgtaaataaaatcataaaaaattttaaaattccgtaaaacagtattttgtaaattttgttgttgtttttgtatatttgtgaaataaacccaaacaacaatgtgttcttgatagcattttattttcagttctataaatctgtaaaaagcccattgcagtgacaaaggcccgttaaaatggaaacttgagagcccaaactagtggaatttgagatagctcggcccatatacccatgttgacaccccactcaatattaatgaaaacgatacattggaaagaggaaatataaa

SEQ ID NO: 71321 - DNA, 894 bp, Cannabis sativa
aaaatcagatgttaatactatgacatttaaagatttggtgacaacgcattcagtgacagttggccagtcacaaatatttaaatctaacatatagccacaaaaaagaaaagaaagggaaaaaaagattgatagatttcgatccaataatgaaaaagattgatacttaaaagcttccagctaatactggtcagtgaaaatgacaacacatgcttttaaacaacacaaatgttgaactttgtctgagaattgatattctatttactactcatttccgtattctaagcaaaagggttcatagaatcagggaatagaaagtttaaaccagagagtatgctgtcaaccaactcaagctgagtcctcaccagacttagattctatcttcgggattggagagccggtttcggtctttggcttggagttggaaggaagtgaaggcgaaggagagccttccactcccatttcagttttgagatcattgatgctttgttctaactcatcaattctgcttcccatctcatcaagtgactcacagttaaggagaccgtaaacaagtagaattcaagtactttaaacaaggaaaatgataaattttactgtcataataagaatcgttgaaatactattagcataaagtaattttactaaatttcattgactcagccagtaaatttatgcataaaaggtgtaatcactggaaatttcatctagaagccaaccataagaataagccaaaaagtcaaagtgcatgagactaagaatataaatgtaaaaaccatgtaaaattttcaccatgagactaagaatataaatgtaaaaaccatttttttccgacaaaccaagtagacaaagaatacaattctcaagtgtttgtactaattgtataaattaatatga

SEQ ID NO: 71322 - DNA, 875 bp, Cannabis sativa
tcactaaaggtagtagttttttgtagtgacatgtatgagtccaatttttttgcattaatgtttataattgtaaaagtcatatgaataaattatgggaaaaaggaaaaaaaatgatatataagagtagttaccagtggtggggtcaagtacatactgccagaagcttgagcaggccaatggccatgtggtgattgaagagctgaccagaacttaattgatcttctcatggctgcattggctgctttgtatttattctcatcatcatcaacatcattattcatcttcacttgctcaatagtttgtttgaactttctctcattaagcatctaattaagataagtaataataatttgtacatatatatatatatatatatatatattagaagtctgaatctctaatgcatgttttaagtttttgggaaaaaaaaattaaaaatgagtaattaatactattttgaatctaatgttttgcaaaagttactgtttttttttactctttattgtttaaaatgataaatatcaaactttgtattttttaaaatagtactctgagctaaatttttaataattttttttaatgtaactaactagaagacaatttctagtacgaatagatacagaaaatgtatccaattttgtcataataacaactctagaacgggttatttttaacttttattttgataaaaaaatcaattcatggtattatattttgtatcattttaaaaaatacatggtctagtttttcatttaataaaacaaagaatcaaattaataatttttgtaaaagacagagttcaaaataatattttagtttataagttttttctaactaaaatttatattaagtaaacaatatttataaatatatta

SEQ ID NO: 71323 - DNA, 1187 bp, Cannabis sativa
cgtcgccctgatcagcgtcggtagcgaatttcgcgaaaactgacgctgaaagggcttaaaaaccgcctctaaagggtgtttttgtagtagtgcgtacatgacaccttcggagggagtaactcatgaggggtggagtgattggattgcttactgtacctcaggaaaagaataggtacctaataaaattattaatcttagtaatactttatgttatagtgaacgataaataattaattgtaacatagatatgttaatttcagacaagatcaacaagaaataaacaaagtcaagtaagataaaattttaaggtggaagaggatcaaagtttaatgtagtacatgttgtcaatgaggtaactttttaaatttatttgttattgataagtattttttttttagaaaaaataataatcacagttatttttacttaaatataggatgatcctgagacagaagaactttcagctattgtagatactgttcgaaagttccaccaaaaagacaatacttgacgcaataaatacgtgcaacaagcttatgtaagtttacattgatatttattaatttctaaacatttctttcaattttttttttttttaaattgactatttaattttgttggagaaaatagttgaattgacaacaaatcaaccaacgcctactgaggatcagcttgctgaggatgctatatatcccacccagtacccactagacctgcctgttatgatgcaagtattgggtgagcgatctcgacatctgaaagactttgacccgagattgaagggagttggggccaaaagagcacatgccacatcttttactgttggctcacagactgttactatggaacagtatgatgccataagagacaagtgcaggaggcacagtagtaaactcagtattcgaggtagcagtatgaaacacaacaagtctacctcaagcgattccaatatcaattttacaatctctttcgggttgtgtctggtttcaacttgcctcctatgggtccacatctgtcattccccactcctcctatggatcgtcatcaagttgtcccgagacccagaacaacaacaacgatgacattagccgtctttagcaccatagatattttataattaactttagaacttgacttttttttttccctgaacttcttttaacattttacgttaacatttttattta

SEQ ID NO: 71324 - DNA, 1139 bp, Cannabis sativa
gggattctttccactttgtattctgtaaactcgtggagcagttctctgacaattgctacgtaagcggccattttttctccacgtgtttggtattctaatgatcctggttgaccactaattgagaatcactgaacacttctacccttgcagcccctacaactttgcccaagcttagtcctgcaattagtgcttcgtattcagcctcgttgttggaagctggaaatgcgaagcgtagggcagcctggagccggagtccgtctggcgatatcattgttatcccagcaccggatccattttcatttgacgacccatcgacgaacactttccacgccagcttctgttgggctggcctactggagcaggcctctgcttcattacattatgttatgaagtcagcaagggcttgtccttttatgaagatgcgcgggacatagagtatatcaaactggctcaattccatggcccatttaaggagtcttcttgaggcttcatgtttctgtaagacttgccgaagcgggtgatttgtaagtaccttaataggatgggcctggaagtagggtcttagttttcttgacgccatcaggaggcaaaaaactaatttctcgattaagggataccgtgtcttggcttctatcatgcgcttacgatcatagtacaccgagtgttggatcttgtcctcttcctagagcaaggccgcactgacaaaattctcggagacagccaagtataataacaagtcctctccgtgaatcggttttgacagtactgatagtttggccatatgctcttttagttttctaaatgcctcctcgcattcttcagtccactcaaatttttgacattttttcaaaatattgaagaaagggatgcacttgtcggtcgaccgggaaatgaatcgacttaaggcggccaccttcccagtcaagctttgcacatccttgtgtttctttggggaaggcattttcaataaggcctgtattttttgggggtttgcctctattccacattgactaacgataaatcccagagattttctgagatttgacggcgaaggtacacttcttgggattaagcttcatcccataccttcagaccacttcgaagcactccgtgacgtcatctgcatggcccatgcatgt

SEQ ID NO: 71325 - DNA, 1631 bp, Cannabis sativa
tgacgttcgatccccggcaacggcgaaatttttgaacttttttctttatattttaaattcattttagttagtgcaaaaaagatgatgattcactggttaacctacaaaaaaaaaaataatttataaagtccactaaattccccttcaaactgaacatcactttctcaatcttttaacattttttttctttaccataggatttattcccatggtttctagttcaaaattatttgaaaaccaactcaaaaaaaaaaaaaaaagtttcagcatgattatatgaaaagatgagaagaacaaaacagaagatccaatctttcaaatgcaaaaaagctttatgcctatcatgggacaccttttattcctttataaaatatccccatcaaaccaagcaaatctcataatagtatttaaagcatcggaacaactatatatttttttattattgctgtaaaagctctcataaggttgaagctaataaataaaattacatccccaccgaaatgcaaattcaagagttgaccacgtgggtccagtacattataataaaagagatacagtgactttgtaaataattcaaataaactaatgtgaaataagaatgatgggatttcaagttaaccaaaaacttgtcaattatgcacttccattggccactttagctgaatctccagctgggttaagctcatcccaggcctcaatccatgtgaccatggcatctgccagcttgtcaaagtaaggatccaccttgctgagcttctctttgacctgcttagacagttcaatatagcactgttggacagtagtgcattctttggaaagcgtagcagcttggaagaatggaatgatctcctcctgccaaaagatgcccttatattccttcttcaagttcacaaatgggttactggctttgctgtgccagatgtatggcagacctgtcttcacacccaatcccaaatgatcacatatcacctgatacagccattaatcatagatctatcactgtcagtaattgaataaagaaaatcaattttcttactttgaataattatgaaaaagaaaaaggttcaagattcgaccttgacacaccacccggcccacatatcgtcgtaacgtccaattggctgaccatcacccatgagaccaaagtacattgcagggccaatgagctcacggtcaaaggccaaattcataccacacatggggaaaagggtgccctttggaatggtaagaacagcatcaacgtacctgataaatcaaaacaaaacatagaattgagactctgcattatgtgaaaatggtaattggttttaagaaactgtttacttttgtttacctggagtttctctctcgaggtttcactagctgagtgggagcatcataatcagggatgttgagccagaggccatgagaaacggcagtggggactccttcacggagactgaatgggtagccacgaacaaaatctgccccttccctgtatggatcataaagggtgttgtagaaaaatggggttgatgggcagagaaggttcttgatgtgctgctcaagtgcgttgatatcatgccctgttgggtcttttgcaacctataaatataaaatatattagaaaaaatttggtaacatataaggta

SEQ ID NO: 71326 - DNA, 1091 bp, Cannabis sativa
cacagcctcagaatcatcacacttgaccttccctaggtgatgtgggattgtacagattacccgatatttttccttacggatcacgggactactgactgtcacacctacggtagcctttccaaccaagattaaatcatcctaaaaaaatatatgagaaatgattggcccaccgcgactgattctaatacccttgataccaccatttttagggactcttgaataagccttgataatatctcaacaacccaaattaaaatataaggggagagagggtctccctgaagaatatcacaagaaggatcaattctgccaacttggccccatttaggcaaatattgaaggtggtagttaaaatacatttcaagacccagttacaaaatctattcgaagccccaaagcacatcagcacccaatccacaaactaccaactaagtttatcataagcttttgtaaggtcaattttaatggcaaaaacccctctcttccctttttccttttaaaggtgtggataatttcctaggcaatcacattgttgtcttggatatcccttccaagcataaacactacttgagtagggcaaacaattttggggagaagaagctttattctatttgtaataatcttagaaatgactttatatgacacattttaaaaagagataggcttaaaatggtgagtccaagtcgggttctgaattttggggattagaataaattttgtagcattaacactcccggtgcattatacccgagttggaaaagtacatgattgctacacaaaattctgttaggacctaggattagtgtggtgttctaacatatattaaataaaagggtaattgggtcattgtattaagaagagtgttgagtgagattacaataatatatatagaatacttaggagtattggggggttatgcaatgttttgagtaaatctctaattgcttcaaaggggcctaagggctcccttactttgtaattgagtttttcatacattcaatacacattttctactgttttggctattgttctactcctattattgctattgttttgttgagttcttgatcggaagatctcggggcttatca

SEQ ID NO: 71327 - DNA, 1459 bp, Cannabis sativa
gcttggggccatcgtctcgaataaggagggggtacggtgtgctcggctcggcagcatccccactctctgctattttcaagcctcaatggcggaagcagaactgccttactcaaaggcttgttcttatgccttcgtttaggctatacacatcttacagttttcttattgtctttgatttttgagaaatgaaaagaggtcattatattaagcgtgtttggtttgctcttttttctctagtatttttattgtaagattattaataatgatattgcctatttcttagccagacttactagatgaatcaaaggtttggttgccggattttttcttccgattttccaaagtgaatctttgtattgattttttcatctttgagccctatttaatagaaatatttattttcttttaaataaaataaaagtaaaaataaaaaaaataattacttgcaatttagttgttgactcatgagttagatttatgactagttggtttgcaatattggtttgtacgtgcagtattattatatatagaactatttaggtatgttatatggttcatcatagcactataaatatagcttcaaagtaacctttagatcacaacattttgagtagaagattgagagtaataatggatcaaaattcatcacatgaaaaagaaggttatagtactgaaagtaaacctcatgctgtatgcattccttatccaagtcaaagccacatcaaggcaatgcttaaatttgcaaagctacttcacagcaagggtttctacataacctttgtcaacactgagttcaaccataatcggttcctcaagaactcctccaccttttcctccatgccgaacttccggtttgaggcgattcccgatggccttccagtgtcagatcaagcacaagatgcaacacaggacattctttctcttagtgattccactagaaagaactttttgggcccattccttgagctcctcaaaaaacttgcaaaccaaaccaaaagtaatagtagcaaggatgatgttcctcctcgtgtgagttgcattattagtgatggagtcatgagttttgctattaaggcagctaaacagcttcgacttcctgtggttctgctcttcacagttgctgcatgcactgttatgggcctcgccaactaccgccctttacttgacaaaggaattgtaccactaaaaggtgatgagtctgaattttatatatagcatgtgaaaatctcaaaaacgtcttgataattctaatatatataattaagtttgatcaatatatggcttcttttttttatttatttattaatgacttttactttaattaatggagatggagatcttcggataatgtggaatttcaaagctacgaaaacctatcttgatttgtaataatatatatatttgttgtgtgtggcagatgagaatgatttaaataattttctagacacaagtatggaat

SEQ ID NO: 71328 - DNA, 1393 bp, Cannabis sativa
  modified_base (27)..(31): a, c, t, g, unknown or other
aatcttattatattgaaatgggttttnnnnngggcacaaaacccaacaaaagattgctggactgtttccagcagcatgtctgttgctgataaaatagctctttgtgcaaaaaagttggctacttggggaactaatgtgactggtaatttcaaaattctaatcaataaatgcgaaaccgaattgaagagtttgaagaataaaagagatgctttttctatccaatggtatgccgaagtgaagaaggagctctttatggttttggatcaaaaggaagttttttggaaaaaaagggctaagcaatttttgttgaaagagggtgatcaaaatagtaaatatttccaccgcgctactagcaatcgtcgaagcttcaattatatctcgaaacttaaagatttaagtgataattggaaggattgggataatggccttgatgacgttgttgtggattatttcgccaatttatttactacatcagatttaggacgtgaagttgtgattcagtgcattcagaagaaggttacaacccgaattaatgaagatctccaccaacctattatttcctaggaagtaagaaaagctgtcttcagcatgcaccccgacaagagtccaggtctggatggtatgacgcctgccttttaccaaaaatgttgggagattgttaagaatgatgtaacagccgtggttcagagtttcttcaatacgggtgagtttgatttaagttgtggcgatgcaaatgtagttttgcttccgaaaaagaaaacacctgaaagtattgttgatttaaggcctattgctttatgtaatgtgttgtacaaaatcattactaaagtaatggctaatcggatgaagccatatatggatcaaattgtttcagaatctcaaagtgcttttattcccgggagactcataaccaacaacattttagtctcctttgaagtgcttcactacttgaagagaaaaagaaaaggtaaggatgggttcatggcattaaaacttgatcttagcaaagcatatgatggcatagaatggaaattcttggatgcggttcttaggagaattggtttctcagaaaagtgggtttcgttggtgaagaagtgtgttaactcggccaagtataaggttgttcatggaggtagaacaatggggccaattactcctactcgaggtatccgacaaggctatacgttgtcaccttatatcttcattctttctgtgaaaggactttcggctttgattaaaagatatgaggatatgggggtcattcatggttgcaaagtggcgaacggtgctccgaaagtgtcttatatgttattcgctgatgacagttatttgtattgcaaagctactcttcaagaagctattcgaatcagagattgttggaatttattttacc

SEQ ID NO: 71329 - DNA, 958 bp, Cannabis sativa
atttaatgttaaaattactatgaaacttgtttaaatgttattgttttaggacaaagattcagatcagtaaagactgaactcaaaccttaaaaatgttgaaacttgttttgctattgcagattttgcactacaagttacacaatgatccttggaggcaaaatgttcatactaataatgataaggatttcggggtgcctcgagaatgtttagcgaaatcgaaatgaaaagaaatgttcatgaggcagattcaagcttcaacaccatgtcttcttgtggtagatgattcttttagataaatacataaaatcctcatctaattttttgatagattaatttatatatgataggtgagactttaacttcataccaattcaatttgctaaatctttgtgataatgctatagtttagcaccatagatgaagaaaaaaaaatgtcaaatttagccaaaaataagaataaatgttatattttaataaatattcatctaattcaattttttttattttttttccatattattttatttattcaaacttcaattataaataaaaatttactgtgcatttattaaacatagtgatttttatttatatataacattgtttaatattattgatttactccttaatatatataatttatatatatatatatatttatatgagttcggttaagatggtcctcataaaatatgcttatcgatggaacttcatttttaaccattagatcttaatttaatggttgggaattgttgactaggcttttttttttttttttttttgaaataagcgtgttatcattgattcaaataaaactagacctcatggtcgttacataaaagattatccagtaagacagagactgtgatagatccaaacatttgatgagcaaacgcccatctaaccacattgtgagcggcaaaattacaagtttgactaataaaagaaaaattacagc

SEQ ID NO: 71330 - DNA, 1066 bp, Cannabis sativa
tgaaagtaaaagtaaactaagatgcaaatataaggcctcaaaactacaaacaagagcacataaataaaatgataaaacactcaaatatcacttcaaaacaacaagaaagaaaagtcctttcttttcatcaaaaagtcaaagaaatactcaaaacccacaaaacccaattccaagttccaaaaaataaccacaatctattgtaatatagagatacccaaatgcctcaaagtaaagaaaaagccataaaattacacaaagaatcaatgaaaatgaaaaagattgaaactttagaagaaatatcagacaatgattaccttacaagaagagaagaagaagaagaagaagaaaagtgtaggaatgaaagaggagaagagataagaagaaagcatgtacctttataggaggagaaaaaggaagagagttattaagaaacataaatgtgagttataatatatcatcatatatgaaacatgaatgaatgaaacggtagctaatgaagaaatgaaatggagtgagtgagtgagtgagtgagtgagtgaacgagtttggaaacatatcactattcctccttctcaccattcactctctcactctctcaagtcaaacattgttagtatattttcgatatttttggcagtttatgtgttttttttcttttttagtgtgtgttattctatgtatttacttaacctttatttcaatcaaaacactaaaagttacactaaaattacatttcttattgttatattattttattaaattaataagattgattttatgttgggtaaatatcaatttgataccactataaattggaccttgtattttttaaaatagtactgaatactactctaaattgattttcttataaaataaaacttaataataacttcatatataagagttatgacaaaattgattaagttttctacatctgtttgtactagaaaatatcttcaagttagtcatattaaaaaaactgaaaaaattgagctatgagtcctatttgtattatttgagaaaatacaagatctattttattatttaacaaaatagagaatccaat

SEQ ID NO: 71331 - DNA, 1666 bp, Cannabis sativa
  modified_base (1614)..(1625): a, c, t, g, unknown or other
gtctaaacagaataattgttctgtctccttgtcctcttggggtcgaaataaaaatcaattctcaaatcgtatcaaaaatatccaatcggatatagagcgtctcatggtgggtcctactgtttccccttatgacgtcaaaaaggccaatgatctccagaaaagtctagatacccttttagtcaaagaggaaatcttttggaaacaacgctctcgaattaattggttaaaagcgggggacaagaatactaaatatttccataaccggccctctgcgcgaaaacgtaccaacttcattaaatttctaactctggaagacagctctcaagtaacctctctcaacgacattaccacctcattcgtccagttctacaccgacctcttcacgtcccaaggcactaacactgaggctatgacttttgctacgcaaggtctccctaaacgtcttacccctactcaatcaactttcctctcatctcctttcacctttgacgaagtcaaaactgctctctttcagctggcgggtgacaaagccccggggcccgatggatttaatcctagttttttccaaaaaaattgggactccgctggcaacgacctctgtcaagcagctttatatgctctcgccaccaatgctgacctgagacaggtcaatgaaactattttggtgctcattcccaaaattaaaaatgcttctcgagtcaaggatttccgtcccatcagcctctgctccactctctacaaggtagtttctaaaaccattgccaatcgcctcaaaactactctcccggatcttatttcccataaccagggcgcttttctctcagatcgcattattttcgataatatcattattgccaatgaagtcattcacgcgatcaccaaccgtaagcatgggaaagtgggttgggctgctctgaagctagatatggaaaaagctttcgacaaagtggaatgggcttacattgagcacatcctacaccattttggtttccccgaccctcttatctctctcattctcaactgcctttcctctgtttctttccgtctccgcattaacaattgtctctctcaccaaattttacccactcgtggaattcgtcagggtgatcctctctcaccctatcttttcctcctggttgctgaaggtctttctgggaccataaacgctaaagcccactctaactctttccatgggatttctatttctcgctccgctcctactatctcccaccttctttttgctgacgacagtcttcttttcacgaaggtaactccatccacggccatggaaatcaaggatattcttaacctttataacctcgctactggccaatctgtcaatttccacaaatcctccatccttttctctcccaacaccattccctctgattgtcgttccttcagggacactctccaccttgacgacaagcctttcattgataaatacttgggtgttcctcaatgtttctccaggtcaaaaacctcctctttcctgtttcttctcccaaaagcaagctctaagctttcagtttggaaccaaaatctcttctctagagcggcaaaaagaaatcctgttaaaagcggtcattcaagccattccttcgtatgccatgnnnnnnnnnnnncttccggtgtctctttgtaagcattacagcaagttaatgtc

SEQ ID NO: 71332 - DNA, 912 bp, Cannabis sativa
tattatatgtatgttattttttgtcgttgttttgatgttatttagatgttaattttatgttatttttatgtaattttcttgttgatgtaaaaaaaattttgaaaacgtaaaaatataattttttttttataaaaatagtgtcttatgtaattattccaataatatatacgcgtgtataagagataagtttatgggagaaaagccaataaagacttgaagtaggagtcttacaaatatttaaaagaaaatctctattttaaaacatattttgtcagttttgattctcctagttcttttttctcctatttctttttttttttttttttgaaaataagcgtattcgtgcattaactaaacaaattgttagacctctcggtcattataaagtagctccttcgatacagaggagatcaaaatagaaccgtataattggtgggtaaatgcccacttaaccacattgtggattacaaaattacaattcctgctaacattaaagaagttacaactaacaaataaataaacttttcctaatagatctatcacttttatttctgtattttttttataatatcatacattatatgtagttattttgtctattattcaaaaaaaaaaaaaacagttataattaacataatacataatatcatataaacacaattagcacttaaaatctctacctatgtcaaaaataaaaagaacacatttattattttcactttttaattgttcatttaaaaattaaaattttaaaaatttaaaaataaaaaaaatcactttcaaaattttttaaacaattttttttcttaataaatattttagattccgacctcaacttaggactagtttggcatagctgtgctgtgtgaaaaagcggttgtagctgtgctgtgagaaaaatcagctgtagca

SEQ ID NO: 71333 - DNA, 1709 bp, Cannabis sativa
ttattgaaacttttttgagtcataacactatgaattctattttttacatgcaattttcactttatgtacaatagtttttggattatcataggattgcagccagaatctttcatttcttatcctccatatttgatgcactagtactgcgagaacagttgagaacactttcttttgaaaagttgttgttttttccttcctatttgtcgaaccaggttagcaagttagttggtaggagtcttccaccctaatcattatttaacttgttggagacaatcattggatagtgggcatttaaagaataaatgttcacttatttcatctcccaaattgcacatcaaacaacaagtatcaggtggaatgttaaatcgaacagtctttccttagtcttcaatctattttgaattgcaggccacattacaaagatatgcttcagggtgtttaatcttccccacacttctttactccaatttactcggcctggcatagggcatatcaatttgtatccatctacaattttgtatttgctttgagtaaaagaggaatgattcattagtgttaggactatacctttcattgctactatcttcctccaataccagctgccttattgggggccaagtagctttaccaatctacttctttgataaacacactgtgtatccacttgatccatagattgtcctctttagttgcaacagcccatacatacttaaacatagtcgctttattccactcagctacattcttgaattcaatgcctccagctactttagattgatagatgttttcccatactattttccctgcttcagtcattatgtgttattccttccataaaaaagcttcgcagatagcctctattttttttagaatcttttaaggaaggagcatgatttgactccaataagtatgtatagtaagtacaaccgagttaacaagtactgctctgcctgcaaaggaaatatgcctggtactccatgatcttattctatgaggcattttgtccaccaatatattgcaatctttagaagagattcttttggggctgattggaatacctagataggtacgtcactcctctggaaccccgatgcatcaagaatacactgcacctctgtgttagacataccactgcaataaatggccaatttgttaggattaggctgcaatccagaggtttgggagaatagtttgagtccctgtaggagatagtagatgcttttataatctccattgcagaaaaatagaacgtcatctgcaaaaataaggtgattcaggttcagatctttacgtctatcatggaatataaaatctgatttcaacccaatttttctcataattcttgtaagatacttcatgccaagaacaaagagcaatgatgattcagcttaagatctttgttagaattatttatgaaataaaaattaagtaaacaaaagtataaatgaaatgacacaaaaaaagctaggcacatgcattgcacatgctacccttacctaattgaacaaaattcatgaagcattttatatagataggtatatataaggatacatcaattaagtatataatatagtatttttaataagcattttttttaaatattttatgcttattgaacaaaattaataagcatttcatataatatttttaatatattaatacgttgtaattttttattttttttattttacatataacataatcaagag

SEQ ID NO: 71334 - DNA, 1155 bp, Cannabis sativa
taactaactctaactaacttccaacaacatagcaaaagtaaccaaaataactacaaagtaattaactattgtctacttatgcaaagtgtttgcttacaatagactaagtcttgattcaaccattacttaacagttgaactatggtggtggtttctctgtactaatgcagatatcgagtaatggagcgttcaaaagcccgctacataaagtgttgacaaattcagaaagggagaggatttctttggctgtcttttatgtgccagagccggataaagagattggacctttcgaagggctgatcgacgaatcaagacccagattgtacagaccagtcaaaaactatgttgacatttatttccaatactatcagcaggggaggaggccaatggaagcatcaaaaatccaagactaacactcccatctcttataattaagaaacttaataatatgttctttgttgacttctattttagctctttttatgttttcctataatatttgtgtggtatcaaaaataagatgatgcagcttacataggaaacatattgcttgttttcaatgccaattctttaggacggtaaaactacttctatattgtgccaatttctttggattctactaatacttgtttctttataaggagtgtaagaatgtaacacaatattaagacatgcatacttagtagcttatttcatctctcatttaattagactgtagtctaaatcacaagttttcaaagtatggttttaacaaaacttctaaattaattcaaattggtagtgcctacttttgtaaaacccttagaccaatctcaataactaaagccaatctttaaatttgtaatgaatcggtcaaaaaataaagtggtaacaagaaaatttgaatgtggagagagagagagaacaagagtgtatttttgaaaaagctccatttgtatctcaagatgcatgtagagaagtactaagtactcatgacatttatctcaaacttttaatttttctatatttttctgttataatattttaatattatatttttagatattatttatttatgatttaattgtgaattttacttattttaacaactaacctccaattcacttatttttttacggcaaaacttctaaatcacacttctgttaacaaattaact

SEQ ID NO: 71335 - DNA, 887 bp, Cannabis sativa
tggtttctaaactacttcaccacccagcacgaaggcagaggaagaaattttcagaagacagagccgaccctcgtgctagcaccggcaccagagtttctagctggataaagttgttgcatctaacaacccttcttaaattagtcgtcgtaaccgcatcgggtggtagcttctttgtttggccccagtgcttctttgctcgtacgtacgtggttatacggtgggggatcttagtctgaggatcaatcctacccccaatgagttggctggcaagatttgagctcttagggacaaagatcagtgcaacatgtgttttaaggccacgtgaacctgtttctaccatttttctcgcgcagaggagggcatcaggtcttattcaaagcaacacttcagactagtacattcttggttgtcgactagacctcgacgagagattaagaggtcttccttcttttctagcacaaactttttttctgataggctcacgccactgatcaccatggatacctcttttttcagctctcaataaaagtaccaaaatatttatcgagtttttcggcaactgaatattcttaaagcttaagaaagtaatgaagtcaagaataatgaaataatacataagagatttttacgtggtttaggcgttaactatccttagtctacgagtctattttattaggctcattgttcgatcactgtttatacaaatatagatacaacggacgtttactcctttccattgtgttcctcttgaagaagaggaagttaagtaggaatattctagagttaataatatggttacagtaaatatctgctagaaccattagttagcttccacgaacacctctaagaacataaataatacaattaagttaaacctaaccatatca

SEQ ID NO: 71336 - DNA, 1752 bp, Cannabis sativa
gccgccatgtttcatattcttaaaagggccaaaacttaaattcaattcaacaccatttaaaatattaactgatttgattttccttaaaagatttctattgtacacttaagcattcttcattgaactgatttgattcgggaatggaaatagagtataaatttaggtattgagctagagatctgattggaataaaacacttgaaggtggatataaatcgagttgtgattatttccaaaccaaaaatttcattaaagaaactttacaccaacactcaatcatatatttcccctatcccacattccctggttcatgtttctgatctcctgcttcccagtggagattggaatatacccttgcaacaaaaccacttccagcaggacattatcaacgacattctgtccctccctccccctgatactacccaaccgaatttctacttctggcagcacaccccttcaggtcactattcagttaaaactggataccatgttgcaaaacgatccataaacttgacacaaccttcctcctcagacaagggaacccttacccgttggtagaaatccctctggagtcttccaatcccccctaagattaggcacttcatctttaggcttgctcagaactccattcctactgctgaaaatctttatcataggcactgtcttaactctcctatttgtcctagatgtcatctttgttatgagtcggtacaacatgctttgtttgagtgcaagaatatgaagaaggcttggtcaggtacgtcttttagatcttccataaaggatactaaacacttgcacatgttggatatcattttatacatgcagcttaatttttcagcaggttcttttaacctatttctttgtatgttatggaagtgttagagtggcaggaatgcggctgtcttgaggaaccatgactcacatccactgcgcattgaacaagaagcccaggattacttggaattttatcaagcagctcaagacaagcatacgatgcagcttcaatctaccacagatctcaacaatttgacatgggaaccaccacctatgggaactctcaaactcaatgctaatgctacagtgtctagccaccagaataaaacgggaggtggggttataattcgtgactccactggaagagtaattgcagcaacagcttttagtcgctcgggacggatgcaacccaaagcaacagaaggctgggctttgcgggaaggtcttaaatagagccttgagaagggaattaacattgatcatatagaagtggactggaaaaacctactcactgatctacaatcaactggtgatattctttcaagatatggaaccataatcaatgttattcgacggatgttatctttgcttcccactgtaaccgttcaccatactcgaaggcaagggaatacagcagctcataatttggcacaaatatccataaggttagataagtaactctttgggtctttactttaaaaaaagaaaaaaaccactcaatcatatattttatttcaattgtatatttacttttattttaaagaaagaaaagctaatggtagcttttatttcaattgtatattttattttactatataatttatcaccaacacttttttattttactttgctaaagaaagctaacggccaacgttagtctttagttagttttattaataataaaagaaaattttaatagaaaaaatattaaatcaaaaaatttgttatataatcatattttatatagaatagatat

SEQ ID NO: 71337 - DNA, 1501 bp, Cannabis sativa
atcgcttcaacgcctttcgcaatgacaatttttcaggaagtctcttgcccatccgatttggagagtaattttctttatcattcgcagcaccagtagacaacatacaggttgtagaatctgtcatgagtgggtaatcagaagacttcgagactgttgcagcagcaatgttaaaagtacttgtgggcagtgcttcaggaggatatgttgctatgactccttcttgatgaccagccattggcatgtacagattagaaagatcactttcatttggagaaggtggatgtgtggtgttaatggctgaatgaaggagtttgctggagaaggtgtccctaacatgtgttgatccgtgtgttgtaatgggcagtatgttatgtgaaaaaacacttgcagaagcaccaggtatgccgttgtttttaacagggggttcaattacttgtaatagcattgaggctgatttggaaattacaacccgatctgttgccgatgttggtgttgcaaaggcagatgcaagttactaggaaccaatgaagcagaagttagtgctgttggggcaaaggtgaaaggcctactgctatccatggtaactgcctcaggacaagttgagttagtacgattaacatcagaattttgatttgctggaaagccatgagtgagttgctgagtgctagatgattctccataaagtaatctcctaggctgtggctggtttcgattagggaaggagggaatggatgttgtaagagcattccgtgccaatcgagtaagaagtggccaagcatttcctttggagaagtctgttcggtatctgtcataacccgatgttggaagagtagcccctttgatttcaggaccataggcaagttcaggatcaactccattgtctaaaagttcaagaaaaattgaacatttctgataagggtggccaagacaacgacattccatacaccattcgggtaatctctcataacggaaatcaacccaaaatttgtctttaacttgctgcaatcgaatgttcctaccccttctcaatggtttggtaacatcaagtttgactcgaatacgtaagaatggcccccatccttcgttaagagaatcagtatatacctccaaaaattctccaattttgttgcccaaggcctttgccaaacctctagtcttactaagaaaaggtagcctataaacttgtacccaaaatggagagaatttgaggtctgagggtgatacattctgcagtgcagtaggcttatatagaacaatatggtggttttggaaatgccatggttcctgtgtaaggactctttccttatccccttcacagccgaaagagactataaataagaggggttctttctcagtaattttggcagggtaacgaccatcccaatggtctttcatttgtttctgaaatgtgtacaaatagactggtttacgagtaagaacccgggcaaaaagggagggatcattggtgatttccaaatttggagattcattttcatcaaaa

SEQ ID NO: 71338 - DNA, 1124 bp, Cannabis sativa
  modified_base (913)..(951): a, c, t, g, unknown or other
tggattggatttaaactcttatgcagatcggattggatccaaaatatgaaatctgcacttagtgctgattggatgttatttgaccaaaaaagtgcaatttggatcgaatgaacacccttatgtcctaatttagcgatttatgtaaatacttgtcattttctctgaatgacaagaagattgattcattgatattgcatgtttcttcgtatatataagggaactcaactagttttattaaaggggccatttagaccttagccacctacctatatttgatttaggacaagtcatcaacccactcttccttcaatttgctctcaattaattgttttggctctattttgcttctttctttttttatttatttatttttgttggttgaagtcactggtctattttgctttaaatttagcaaaatctagttatcaattttgtagtggtctttagatatgtcaattaatttgtttgggcaatcatcaatttgtttccatcattttgataataatgccaataataatttattattagagtcatttaaagtgtaaatacttatgcttaacttttaattataaataaatatttaagtttaatttttaacagtaataatacttaaattatatttctaaaatttccgtaagcatctagccgttagatatcaattcattattcacgtgtcattatcttattggtatatttaaactatttaaaaataaataaaaaaaatttaatgacttagaccaatcaaaaattgatacttgaaaatttacttaatatttaatcgtcatatacttacagaaatttcagaattatatcttaggtattattatcgtaaaaaattaaatttaatatttatttgcaatcgtattttaaatttaatatttatgccgtaaattattgttgttattattattannnnnnnnnnnnnnnnnnnnnnnnnnnnnnnnnnnnnnnttattattattattattatgtgttttcaataattttgatcataattgaaagtaatggaaaactaatcataaaatagtttaaagcttataacaatgtctcacgtttaaaaaatttataatcatggctaattattttgaaatagaattttatctcctaagactcctaacatatat

SEQ ID NO: 71339 - DNA, 1707 bp, Cannabis sativa
acaatccatgataaaaaagcaatatgatcaaatactagtagtgttaaaaaaacagagggcttatggccaaagatacgaacatgaagatcctggggctgataataaagtaattttctaaaaaggctccaggccacataggacatgaaagtaatgttctaaaaaggcctcaggtcacataggacacaatgtttcaaaaaggccataggccacatggaacacaaaagtgagtaatgttctaaagctataatgccacaggctttgcggaacatgaaaacattgtttatatgatacacacatgatgcttaatactaacaaaaattccatctacatgtgtacaagagctgaatttggagccgccaagttaagatccacagtgtcaaacattacaattctggctggccactcccctcattggactgctttggctagccagacccctatatagatgtccaaggccaatcagccacatgcaaaaagcaccatggttggccagcttatatagtgccaagaagacaaacagagttgaaagcgtaactcactagagaaaggtcctgaagtccgacggagtatagcctgtcaggcccactattacccaactctttcaaagccccatccaagaaaggaatagctctctctatatgcagagtggctaaatcagcagccttttaattagaagttttacttgctcctctgttgggcctccgtgtaccttggttggcatgctgaattagaggttgccttgctggtgcaggccttggtggagaggaaggtagtgatggtctactagcatctacaccacgggaggtcctggacacctaagccctcacccgtccggtaggctcatctaaaggctcacctgcaagacttcttaacaagaaagacatgtctgcaaaaagaaagtcacaaagttagaatgcattcataaaatattcaatacaagaatataagtatggtgttatcaactatcaaataccatcatcatcagaagagtagctattagagatcacaactaaaaccttgcccttgcccctagatgtaggcacggggcttgaaggtctatcaaaaatctagcctctaggtccgatttgaagggaggtgtcacctactggatgctcacgggccaagtgcctatggagagcgctttctctctctctctcctctccaaattctatgcaatatgagacaaaggtacttcttcatcatccaagtcagggccttgcccatctccagagcaggcctcatcagtagctagcagtcttacaactccaaaagcaggagagcacaagccatacatccagaagttgtccacactggtctaccgaatagtgtttctttgctcagccgacaaagaaagaatgtgattccctctatcccttatttgcagtatggatggaacgtctaaagagtggcataaactaaaatttgtggttctcaatttcaagaagaccttgtgcaataaaatattttttggtgtacctaccaaccttcgacatggctacgcagttggtgtcgcctagccattagttaccaagttggctgaaataaaaaatagttggttgtgctctgcttcggcccagacttcaacacaaaataatacctgtaaggaccgtcagacaccatctatttctctattggtatgatattgtccgctttgggcctaagccctcacgaatttgtttttggggaccttcccaaaagacctcattc

SEQ ID NO: 71340 - DNA, 924 bp, Cannabis sativa
gtaacatatcatttattatttatttatttattaaaatctattattttgttaaattttaaaaccacagaaaaattgtcttcatgagtctaaccacataaagattctaactttatctatattttgagcattaattaaggattaatagcaactactttcatctctattaatttcttattctttttttaaaaaaaaaatgtacattaattaaggattaatttgtcatataaatttacagtggataccaccaaagtttgctgaaaaattcatgaagagaattccaaaggaagtgaaagtaaaagatgagaatggaaaaaattggtcatttgggatgaaaaagaaagaagaaaaagtgtacattgttaatggaaaatgtcaatgggaagagtttgtaaaggagcacaagcttaaacgtggagactttttagtgttcaaatattacacttccattgctaatagcaacttttttcatgtcaaaatctatgcttgcaatggatgcaacaagaaacaacttcatcacaaaaccactattactcaaccaggtaatataatatatatgtacttcatataaatatacatggcatgtataatagattggatttgatgtacttttgttttcaaccgttaaatcaacttcattttgatccaatagttatagtaactatgggacagggttggccttaggcacaaatttaggctaaagcgggttaggcccacgcttagggctcaaaaaaatatataattttttaaaataatggcccaattttttttttaaggctctctttaaaattcagggttggtggccttaccacggggtgaccacagaatcatttttataagacaaaatctactccctatatatgtactttcacatttttgtatttattaatttaatagagaggtattaatagtataaatacataagtt

SEQ ID NO: 71341 - DNA, 1007 bp, Cannabis sativa
gataaggaataacgcttcacagttgtaagcacataaaaagggagtttctccagtggtggatcgaggtgtggtcctgtagggccatagcacgttaggaagcttatcaacccataggcttttgcgcttttccagcttggttttgaggttctttttgatgatcttatgtatggcctcaacttgaccgttggcttgagggtagaccactattgagaaaattcttaggatccccttatctttgtaatacgagttaagtagctcacctttaaactgagcttcattattattgatgatcttgtaaggtattctgaactgacatatgatgaatttgttgatgagtgcaaccacttgtttggtgattatctgcactgtaggggttctgcctctacccacttggtgtagtaatctactgccatgattgcatatttttccactactatacctattggcagtgtaccatttctatctatcccctacatggtaaatggccaagggcttgtcaagttggtgagttcggtaggcgagtgtctgcttaagcttgcgtgcctctaacacttgtcacatcttttaggaaactcgatggcatccttctctagggttggccaatagtacccttgctctaaaattttgcgggtcatggatagccccagaatgcttaccacattctccctcatgtgtagcggaaaagactttttgtgcctctcctttgttgatgcagtctagaaggggagttgagaatcctctcttgtatagtctctcatcgactaagacgtaaagtgtttccttctataccacccagggcaccaggtcatatgtcaacttgggcattgggtgctctttttggagctttcaagatgtcatttttatacttttgaagttcttgaaatcgagtacaaggtctcctacctcttttttgaccatgccattgcatttggatgattgaaaccaacatactaggttaattgtcaattgggcgtaggggtcagctttcatgcccctgggattctcgt

SEQ ID NO: 71342 - DNA, 1710 bp, Cannabis sativa
gtatttagtttccacacatcctcttaagatggtagctatatttttacttacaaatcttacacggctcggtcacaagcggcgcttttagcccaaatcacaaatcacaagcggctcagtgagtatatgataaggtgtatgaggttttatctcaaaatcaattgacaataaaagacgtatacatcttatgtatagtatttaattagtttctacacattattaatgtgtgagtctctcacatcgctaattaatcgtaagaaaatattgaacattactagtactcaaaatattattattattatggctgtgagcctgtgacttggagaatggtggtagatacaagtggccttttgatgatgggaaaatcatggtttttggagctcttttcctgttccaccgcggagtcttggcctttcaccatggtatgatttgatgatgatgaggacgttaactgtttatatatatattattaaggtaaaaataaatatgaaatattaaagatatatgagtttcttttttcttcttctttatgtatggtttcatttaacggttggtgaagaacactgccaaaattgaaaattttgcataggtacaatacatgaacaacttgattattattattattattagctttgactttatatgtaaaatgtatttagtttttggaatctccgtcctcaaaggtggagcattgttccaatacttgatgtttgaatagtctagtgattctccccttagagtgtggaaagaccaatctgacctttattcatatttgattttgatattaaatgtttgaagatacttaataatactccaaaagtaccactcatatattgttattataagtcaaatgttttgtccatgaattgtacttggaatctaattagttggcttaagttaataagacgggtctaacaaatctatgtgaggagggtgttgtggtaatttcacagtgagagtagaagcgagcaaagaatattcagcggattaagaatcattttcgatgaatctaagaatgtcatcacattatttaattaattttgatacttttgacgataacacactcactgttcactaggactactactagatagggccaacgtacgccaatgcaattattcattcatttatgtctccaacttgtgccacgtggatcattcatgagagttgatgactttgaagtcaacccttgtcttttattctactcctatcaataactttttggaatcgaattaaagtttgattttttttttaacacttaataattttggttggtagaaatatggaatggtttggttaataattgttaacaaacggttaattaataagcatgcagtaaataaagccattaaaaggctccacctaaataaattagcattgctattagacattagttgtgccaaccttacatattgctttgcaattgagtagcaatattttcttgaaactattatattgaattatttaaaactcaataccaatagcaagaccacacatagacaccccttgtgtcctttaacatttctctaaataaatatatattggaataattatataaggtattatttttattttgtaaaaaataacatttttatatatatatatttttttttacatttttacaattttacatagaaacaacacaaaggtaacaagaaaactacataaaactaacaagaaaataacatccaaataacatcaaaacaacaacaa

SEQ ID NO: 71343 - DNA, 1161 bp, Cannabis sativa
agttgactgagttgaccgggtcaacccgccaacccgctaaacccgaccaaccgaaacccgccaacccgtgaaccgccaacccgccaacccgtgcactattcgggtccgggttcggtttcaattttttgaacctgaaacccgtgaacccgaaacccgccaacccgaaatctggtaaacccgcccgatgttcagcccaagttgggattcggacaggacccaagagccaccgggcccagacacggaacccagacctggacccagacctaaacctagacctgggaccctaacctggactcaggactcgggacttgggaccgagacccagacccaagactcttggacccagacctagaacaggacccagggctcgagatcgagatctggacttgggacttgggacctaggacttggaccgagacccagacccaaacctggacccaagacccgaaacctagacttgtactcgaacccggacccagacccaaattcggtacccgggacccaggactcaggacctgggacctgagaccctaacccaaacttgggacccagactgagacttggactaggacccagaccccgaacttgaatttagacctagggtggatctagacccgcgatctggacccagacctaggattgggacacggggctaggacccaaacccgagacttggactcgaactcgggatcaggaatgggacccaaacccaagacctgggacctagaccgagactcagactgggacccagatccggaccccgaacccaaagctgagaccggaactcggacttgggactgggacccaaacccaggaacaggattcaaacccagaaccgggacctggacccgagatccgagacctgggactaggacctagacttgggacccgaatccagacacagaatcagatctgaaccccgtaccctgaacctggacctcaaacccgagattgggacccggacccaaacgcagacctagactgggaacgggacgagaccaggaccgggactgagacttggacctgaattcggacctgggtccgtgaccaggacccgacctagacctaggagccattcctggaccaggacccagactcgggacccaaacccagacccagacctgagacccgagacccagacccgaacttgactcggagttg

SEQ ID NO: 71344 - DNA, 1424 bp, Cannabis sativa
tgttttgctctttattttctttgttctgttgtgtatgttttgtgcttggtgattggtcttaaatctcaatatcctcacattgcttagctctcctctaatttgttatgctctttagagctgattgtgacattgattgtataagtagtcacacttatgacattataatacacaacatttcattctctttgtaaatctttccatctctttctccgtattttcctttcatttacatgtcaaagaacttcaatacatttatactaattaaattaatggaatttcttttggatttctcaaagtgcagcagtactttaatacatttcttaattttcttttacattatatgtctcttcatctatacattaattgttgctccactacagtacaaactcacttactactttaatgaaaataatttgaaacaacaaactttgccaagttttgaatctcatgttatagcatacatgttatacaatccaaatgacatcagaaaatatttagaatttagtagatttattgtaaagttcactactcatctttaatagatacatacatctataggttagtcttccacacattttaaagattaaaaatctcaacaaaaatcagtattaatttattactaaaatcaaatttatgtgtttataaaaaaaatcactgaaaaaaaaacatatataaaaaaggaaagcaagcacaatgtatcaaacaaaagaaattaaatcttcattctaaaatattaaaaacaaaaggaaaattataacaaatctaacaaaaaatagaacgcaacaaaagtgcaacaacttaacatagatgccaaaattaaaatatttcttcaatcttctaacttcttcatcagattttttaatatgattttgcagtgccattaaattctcctcaatcatctctagcattttaaccaaatttatatcattccttagagctagtgggtcaatccatttaaaaaaaaacacaacacctaatctgaacattactctgtcaaaactaaacaaaaaatcattacaaaattttcaatatccaaataatacccaaaaatatgtaaacaaagtttccattttggacacccaaaaaaccttctgcttggattattttctaacaaggaagtagggttgttcatcaaaaccgaaaaaccgtggtttaaattcggaccgcgacaatccgaaccgctatagaccgtaaccggggaaaccgtttttggtggtccggttaatccggaccgtttaccgcataatagttcggttgcggttcgtaataaattattaacagttaaaccggatcagaccgtttataaaaaataattgatttattatatatgactgtgtagggctgtacagaaattttcgtaaaccgcccaacccgaataacccgactaaaccaaaccgacaaaaccgaaaaaaaatacaaaccga

SEQ ID NO: 71345 - DNA, 954 bp, Cannabis sativa
ctttggtttgtgactctttttctccaaatgaagttgtagctattctttctctgccttggcctttacatctaacgcgtgataagctgatttgaggtcatgaggattcaggtttatacagtgtgaagagtggttgctggtttgcgcttcataaggtgggtcttgatagaagaccttcttatatttattatttgggttagtggaagaaactttgggagctcaatattcctcctaaggttaagtcttttgcttggcagatttcttctaattggattcccactaagaaaaatctcattagtcatggtctcttgaatgatggtgtgtgcccagtttgtgatgaacaattagagactatacaccatgctttatggggttgttcttctcttgctcagtgtcgtaagctttgtgattttcaactgggtgatccacttgcgtcctgtacatatttcttcttttggttttatagcttcgttgtaaagattgcttaatttaaatttagaaattagcagattattagggttttattatggaaattatttattaatattaaattaattattagtgatgatttatttgaattcaaaatgcattttatatctcatatatagaaatttcatatttttgcatgttcagtgcctgccaacattggaacgtggtgtatggctcagtagaattacatcttagtatttttgtatagcggggcattttaattatacattaggaatgtcgagagtagtcgagaatttagaaatttcctaaaatacccttaagtgactttatgacttttggcttaagtgagggcaaaagagtctttttgccactagtagtttgtcctttagtggacttagtttatttgagcaatttaatattttatgctgatattagttgaattaagtaaaagaatattagttcatttgcatgaaaaggaaaatagaaagttagcaaaaatctcatttc

SEQ ID NO: 71346 - DNA, 631 bp, Cannabis sativa
cgccattgccattggccccgcgaacagagggagaacaagaggagaccgtggtggtggagaaggatgagggatggagaagagcaggaacggcgcgtaaaaaggcacgcgccatccgagcggcggagggtgagggagattgtggtggtcggaagagcatgaaggaagaagtcaaaccggccaaaccacacctacgatttgcggtgtagtttgggtggtttccacgatttcaggagacagtttggagaattatctatacaaaatcaaaaagaagaaaaagaacaccaaccataacttaattcaatctcaaatcaaatcaaatcagaacatgttcattcaacacgcaatacaaagtacaaaattattaatcctcagaatgaacacacaatattagttagtaatgttgaaggaaagcatgagtgaggggtgattgaagttgaagaggagaggatgggtaccataccagaggcagagagtggagagtgagtcacggttgcggtgaccggagagggggaagcgtcgcagcagcaggggtggtgactggcgagtgatgaaacctacctaggcttcgtctttgggctttttggggtattgggttaggtctgtttgggttctcatgataaatgtcattttt

SEQ ID NO: 71347 - DNA, 926 bp, Cannabis sativa
attaaaactagaaagattcttagaaggagaattaatggcagtggaaactcgcagtgcatcagtatcgatatgagtaatttgtaatcgtaactgcaaagcccaattaagactgtgaaataaagctttggcctccatttcgtctgatcgaaaacaaccctgaactggtttggagagtgcagcaactacagttcctgtatggtctctaataacagcaccaacacccaagatcttgaggtcatagttgacaacagcatccacgtttaatttgaagcctgcaaaggtcggtggagtccatggaattggtggtttcggttgctgaactgctgcttgcacaggagcagaattattaaaattgttgcagacagtattttgcttttggtttctgagctttgatcgcatataattgtccaaatactgagaagcaaaatcaacaatagcttggctgtttttggggacaccaccatataacccgatttctttcatgctatattgcccacatagtacacacaatagattcaaaatcttgtcgagagtgtatggtggataaatggattatgtaatcaccattatacatattataagcatgtgtatggtcaatggtgtacttggtaagtttctaaacctccttggctgtgttgcaattaaataaggcatgtccaatagattcccaagcattgctacatagtgaacatatagccgaatcaattacttttcttctgcataaaccagtagcaaccggaaaggcattctgcataaccctccatgcaaaaatcttaacctttgaaggtaagttcaaactccaaaaagtcttccaccagttgctatgtgagtttgagccaccagtttctctttcctctaccaaattttcagccaaatggaaaccagaattcaccgtgtagcaacctgttgtagtgtggtgccaaatg

SEQ ID NO: 71348 - DNA, 973 bp, Cannabis sativa
  modified_base (35)..(39): a, c, t, g, unknown or other
agtatacgtgcctcgcacgtaattttttgctagtnnnnntatatatataaaaaaaaaaagtggatgatcataaagtagcaaaataataaaaaaaaaatagaaaaagtgtagggtctttctcacctaaaatgataatagaagagtttggagtttatttgcaatatgggatacatgagctattctatcaaaacttacaaagtatcgaactaaaatataattaaaaatcatcattttagcaaaattatcttgagattcacttttcactcctaaaattattaaaacgcatatattctttcttatcattatacttttgttgctttcgagctcaaacaactgctaaagatattgaattctgaagatgatttattttatccatttctatagggttgtgaactcttatgaattagattatgacatcacataggaaacacacaatgaaccttgaatttgtcaagcaatttacaccttagtcttcttgtgaagcgactgtgcaacaaagtcttcttgaatttgttcttttccttagtctttagtctattcccttgtatctacttgcccgatctcaaatagctgagcaactttgaatatatgagacttgggtatctaataaaaaaaacttacatgagaaaagtaaatacctcattaatagctaggtgttctgttctatttagctttatgtgatatcaataagcctgaaatagccccccactttgctggcagatgcaagattgaacttcttgaccaataaaagctctagagattaaatgtcacttcaacaagaagtctagaggttcataattccaatatgagaagaaaaaaaaaagagtagcataatatatagtcattgctcaaaataagtcatattagatgcattaatccatatagatactaacccaataaagtaaactatttacttaatttattgattatattccatccccaaattgagtattcttagtagaattccatcatc

SEQ ID NO: 71349 - DNA, 1138 bp, Cannabis sativa
tttcgtcatcctttcacttcccgagcctgcgtagtggaagaacttatgaagattttattgacaataactggaaataatgattcgaaaacaccccctttattaacgaaaactcgtagaaaatgagatcacattttccttgctaaaattctgtaatttttcttcttgaaggacaatgaagggcagaccccgttgcattacgcgacaatgtgtgagagagaagccattgctgaatatcttgtgaagcaaaatgcagacatcaatgtaaaagacaacgacggcaactccccatatgatctttgcgaatcaaactggccttggatgcaacactcgaagaaggagtagtagtattcagttatataaaagaaaaattctggttgtatatggccatgtacaagaacagccaaccctttaatctcatgatattatactaatttagagcctcaagttttttctttttctcttttctaaaaaaggaaggataaggttccactggttcaatagtagcaaaacaaatatgttctttcattttctttggcatttgcaatagaattgacacgtgtcttttcctcaactgctcaacttgacatacttgctcttatcaaaagagtacttggtccctactctgtagttaaatgctcaaatttgttgaaccaccatgtaattgtgctctctgttttagtgtgtttttgtttctgtaaagattttcgtttgtaataaaatggtagtttatgtgtggaaaggtataaataaataaatatagcattattttgttgattaatgatgaatccctattattagcttggtttgggtatatctctggctaagatttctaaacacaactcaaatcaagcctagccggtacatattgtgtgtgtatgtatatgaatgtaccttccaattttaacggtcaataactgtcaatacatggccatgtctgtttctcccttaaagcccagccctattccaatcccaatctttgtgatgccctaattaattaacatggcgaaggcagtgatctatgcccttgtggcagctgccttcgtcctcctcatcaccttaggcccttccgaacaccaccacaacagcagcggcggtggccatagccattttggccgcgtaaatcgtcgattcgggaact

SEQ ID NO: 71350 - DNA, 1136 bp, Cannabis sativa
cacatggtttacagaatattttattagagcatgtttacattttctactgtgaactaaaatctctaaccttttctactgtgaagtagtatctgagctttttcatggacttcttctctgtttagaatttgttaattaatctcatagttattggtgttttacatcgagtaataatactttttccccctctgttattaaattgttgggattacctgtattaggccttaacctgtattgcatttattatgttaatcttttttagatctagatgaagattatacaattctaaagtttcaatgtatgctatgctgcaggtcctgttaataatattgttattgttagacagccatatacatgttcacaaacatccaatcgaaagcgcggatcattattaccgcctttggaaaaatatgtaaattcaactgacgacgaagatacagatactaaaactgtcattaatttccagaagacaatcggggattctatggatgccacatacctcagctcttttgtggttaataatcaaatcaaagaacttcaggttttatttcttggcttaaacattgatttactgatactgatcaataatgttattctcccgtgccctttcaaaccgcttctcttgacttgttccttttgtttaatcatcttagcaacaaggttccgccagttctgaaatggagatggagagactaaagcatgacaacaaaaaatcggtgcaaactattcagcagtggaagaaaatgtatggaaatttgcatcagttttgtgtaaatgagctcttggaggaaggtgcagaaccttgcaaacttgtgggttgctcgaacaagggctgaggtttgagacctcggtttcctaatcccaaaatattgtggggttaggcgggagctgtgcataagttggaaagttcccggcttaggcgcagctcttaaattttgcttgagttattttttaacaatgttagttataagaagtacatggttgtagaatgaatgttccttatttataattgttttaaaactttaacaatggcatgttttaccacccaattgagaagggtctttttttgtattttttccactttggcctcgttaattatgggagacatttttatgataatatagtaatttttattgttt

SEQ ID NO: 71351 - DNA, 693 bp, Cannabis sativa
ttttttctatctaggctctctctctatttctaactctagtatttacaattatgggaatagaataaattagcaaacgatgaggagagccttaaatactaagtgagtcgagatagaaatgttcaactttaaaacattgagtcctaactgtcataacaaaaaaattattatttttatgaggtatttttagttgcttgagcccaatagaattttaccaactataataattttgatccaatagttatagagaccataaaatgcacaccctcacaagacaaaatctattcctgcaattgaatcaacaactaaataagaaaaagagatgtccatccacaaagcatgaataactatttaagaaacatctcaactagacattttacaaacattagcacaatatatatttcaagttacaattaaaattaagtaatacagtacaacctctatttaagaataccatattcaagaataatctctaatttattataaaaaaaaaatcaagtcccgatttgggccaattataaataagaacaacctctacattgtaattagttataaattttctaagtcccgtattaacaaagtatacctctgtataaaaataattacatcctaataaaatacatacatatattttataaaattatttatgtagaattacttattttattctaaattgtaatatatgtataaatatta

SEQ ID NO: 71352 - DNA, 1077 bp, Cannabis sativa
  modified_base (82)..(85): a, c, t, g, unknown or other
tactaaactttatatgtgtttaatttcattgttttagaattcatattttgatgttagtgaaacatacttggtagtaaatctnnnncctggtaaaatattttcaacactttgcatgtagcttatgtgttatatctcatttacaacttttgattttcttttctcgtcagaaaggtttaatcaaacgtcatccatgattttttttttattttcgtttctcgtctgaaaggttcaatcagtatatcatgtatcatgtattttaaagtggtgcgtttgcaatatatcatgtatttctagataaattctagttaatcatacacatatgcccctcaagtaattttaaagaataacattttataattacttggaaaaataattaactttattaatgtctgaagttcaaagtattacataagaaatattagttataacatcaatttacttgtagtagggtcgcaaatgttccaagttccaatagctctttattagcgagccattcagccgagtaaatttgtaaacctcggttcctactatttccttgataacataaggaccctcccagtttgggttgaatactcttgctgatgcatctctcgtatttgcaaacactcatcttagaaccaagtctcaaactttgaaaagcctctttttcatccttttgttgaagtatcttgttactcgatgttggtatgttgcattagtaatctgcgactcagtacatttttcatcaagtagattcaaggacaaatttaaaagttcttcgctttcttcttgattataaaactctcgtctgtgagtcgagatatttacttctacaggcaatattgcctctgagccaaatgctagcgagaatggagtatgttccgttgctgtcttcttagttgtcctatcagcccaaagtacttgaggtagctcatcaacccatctacccttggcaatgtctagtttcttttggatactctccttcaaggtcttattaacaacttccacatgtccattcgcctaaggcctggatactgacgagaaggttttaattatcttgttcctttcacagaaatcagtgagtaattcaccattgaa

SEQ ID NO: 71353 - DNA, 1621 bp, Cannabis sativa
tcttggaaatatatcaagttccactaagaattccttagagaatttatacttgagttctaatcaacttggtggattgattcttgatgactttaaaaacacctttccgtctttgactaatcttcgtcttgataataatcagttggaaggtcattttcctaaccgtttgaaaagatttcccaatcttaaaagtctagatataagtcataaccaattggttggattgttacctgacctttcatcaatgccaaatttggaaagtttcgaagcatccaacaataagtttagtggtgcttcaagagagagtattggaaagcttgattctttatatttgttagatgtctcttcaaattctctcactgggtgtatgtctcgtgtgcttaatctgcaatgttcgagcttaaagtacttaaatttttcctttaactcagacatatcattgaaattcgattccaaatattatatcccctcatttcaattggaaaccataagtttggcttcttgcaagttaggtcctaaatttcctaattggctccaaacccaaacatatctcatacagctagacatttctaatgcaagtatttctggtcctgttcctaattggtttccaaatataacttccaacttgaattatttaaatatgtctcacaaccttcttaacaacaccttggccaactttccactttcacaagaagttgatgtaatagttgacttaagttccaaccaatttcaaggttctatcccaccttctcttcttgttaatgcaacccgcttgtatctctccaataacaagttcaacgaattcagttcttccctatgtgaagcaaaagagcgggacaggtcaacacaattacttgacctttcgaataataatttatttgaaaacattcctgattgttgggagaatttcacacaattagttgtacttaatttaggatacaataagttgtttggaaatatccctaactctattaatatgaaaagtattaaaactttacaattaaggcacaataacttctcaggaaattttccttcctccttgaaatattgcacttcacttctagttctagatttggggaacaatagattggaaggtccaataccatcatggattggagaaaaattaagcaacttagtttttcttagtttgaagtcaaataaatttgatggaattataccattgggtctttgtcagcttactcaaatacaaatattagatttatcttctaatgatttgtcaggagccattccttcttgcattaaaaattttacttcaatgattcgagtaaataattcaaggatgaccattccgtcagatgtgagattttctgaaggtccaatgccagacatgagcatttgtagtcattgcagttataatgagtatacattttcttatgagaataatgcatcaatcacatggaaaggggcagaacatgaatatgtgagcattttgggattactaagagttattgacttatcaagtaataaattgagtggagagattcctaatgaagttactcaactctctcagttgggtgcactaaatctatcaaggaataatttgtttggaaaaattcctagaaagattgggaaactgaccaacctacaagtgcttgatttttcc

SEQ ID NO: 71354 - DNA, 1496 bp, Cannabis sativa
atgcagcctgtgtttccaggaatctgtcaaggacaatacaaatctcagaaccatccttgagaaattgaggttattggcatcctaaaagaaaaagaaaacatagcttttgattttctatgtttgattacacaatattttgctaaatttggtgaagctagaaagggaaaaaaaaaaagaagaaagaaatacaagtattagttgtgagtaaagaaatatgaacataagtatagaagaattttgacaaatgaaacgtttttcccaatagaacatgtatggatccttagtgtataaacagactttaatgatgttattaatctattaggtcgtataaaagttctatgaactaactagtttcattgttactataaaaagaaaaatatactaaatggaagatagacaaactgtgacattaaaggtgtagtgcaataactttgcaagaaaataaccacaagattgtattcaaatacactagaacatatttaaatttacttacaagaatgccctataacaggaccactagctaggcccagtcatacctttatggttgtggctgcatagttcagacagccatatgtaatgcagtccactggagcaacatttaagaacattctcagagttttaacacataacttccaacaataaactagcattcctgtgacacttgttatttatctaagtttgctataacaagattatgtgctacattttggtaatgtttaagcatcgaattgatccaattcgaaaaacttgaagtagatggtaaattgatgctacattggtagctgctagttattatcacaaagattaatatttggaataggctaattagaatttttaacccctgaacttagacatgtaccaaatcatgccctgaacttttaatgtcgttaaaaatgtcccctgaactattgagattattggatttaaggacttttttttttccaattttagtaaaaaaatctaacatggatgaaagttcagaggccataatttagtacatgtcaaaattcgaggggcatgatttggtagatatcaaagtctggggaacatagtttagtacataaacaatcactcaaatagtaaaattgaatgaaattacataaaagtccttaaatccaacaatctcaagagggcatttttaacgaccttaaaagttcagtggcatgatttggtacctgtcaaagttcaggggcaaaaatcctaattagcctttggaatatgtaattgtacgtatgaacaatgaactgtaatttcagtcttcttatatttaacaagaagtaatcaagttagggtattccaaaaacagtgttaaaattgagtttctttgtaagatattattgcttgctccattttcactcatcaaaagacagctttgtacagcgtttcactaacacgacaatatgattactcaactctcatgaatttttcattattatttgttaaaaagggcgagagacttgattacagaatacgagtactataataaatataaaatt

SEQ ID NO: 71355 - DNA, 1610 bp, Cannabis sativa
attgatgaatgaaagacaattacaaaatctctttcctagcttttcgagacagtcaggtaaacacttcctttgactagggttgccacatcagcagttatatgtacacttaggtttttttttttttgtttttatttcttctagaatacaatttaagtggcagtggtggtggtgtaacagagaacctgatttatggtatattttatagagaaaacgtagttttggacctttggtaatgtgttttgaaggacagagtaactaattggtgtgtgtgcaatatgatttataggtgggatcaaagcgcaagagagagtgtgattccgatgatgtctctcaaggtgctgctcgtgctcaccagtttctgaaggaattctatgatttgccaatggagaaaatgaatgtaaggcaggttttagagaaaatcagcaagatgaaagatgacttgaaaaaggatgcggtgaactctaaatggctccaacagctaatctagatgtgatcttgaattatatgtaaacctgtggtcttgaagcataggtagccgttattctctgattttgacctttttgtaaagcttatcctgtaaatgagtcatttccatggaagtgcatccagtctctaccccagttttgtggctatatggagtcccagttgaaacatgagactgcagcctactttagctgactggatttcttactttagaaagctagctagttaaatgtgctgaggctgacattatagcctatgtctttcttcttctttgtcttcttatatgaaaaagggagcttccggggagagtttaatgtgcccattatggctatggtttttcgtggaagtaaattatacttttcctaagagtattagtgataattgtgtccttttacttgtgttatttcctcttctaaacctatcattcttatcttgttgactgaaagttattttaagtcaggattattatagtgtgattcagctttcttattatatcataggatcaaaatgtttaatattatctctttattacaagttttcaagtgtcaattattaacaacaaacttcgaaatgttgaacaaacagaaggaattcttttaggtagtaatagaaagctgatacaactaatatggtagaactcactctagtttaagagaaaagggtggtatatactgttattccatacttcaatgtgggatcctaacaatacactcctcttttagagccggtgtctatggcggctcatactatagtggcctactatggacccaatacataggtcgcccttttctcaagttgcctttaatatagatagctccttttgcgatgtcaatctcacttaatggtgcatgacactgatactacttgatgttaggagtgttggaattttatgcttcaaataaaatatattctaatataattagatttactaattaataaaagatcaaaaaacattttatattgcatgatttacatgattatatgtttaatatatagattctattaaatcctaaacatatagttattcacgattatagtgttgtctacactttggaatataatgattatatgcttcaaaatatttagttacactatttatcaaagtactggatttacactgacgtgat

SEQ ID NO: 71356 - DNA, 1356 bp, Cannabis sativa
cgatggttgcgtgatagttgtccaggaagcatggattctgggttaaatgtgtgtgtaagtgatatttgtgtaattttttttatttgggctgtatatttgtttactttgccagttggaagtatttttataatattgttattttttttggttaaaattgaaaaaagtcctaatataaatatatatatatatatttgagaggagaggagaggagaggagaggagaggagagggaattaaagataaatgtgtggtttgtggaaaggggggtggatgagcatgaggggatatgcctccaataatttagtcacgaattaaacaaaacaaggggtgttgagtcatggtccgccaacgttaggttggtcgctttcaattcttaattagtggcggcacaaccttcaatcatatactctaccctcacacacctcaccttaattattatatgtatatttcattttattactattataattgtaaaatactaccccaacttcctaagtctttgattgttgtcatgcattatataatatatataaataatgcatattttatatagtaggaatttgctagagcagtactgtgattgtgatgatcaaattaatcaatatatatatttgatccttcgtgttggcattttatataacaaggaaccccatgattatttcctcgtatatattattgtatattacccataacgtacgttgcgcatatatgatcatataaaatatgagtatatataatgatatgggtagattaacataaaaaaaatgtacacacatcccataagataaatataatatatatgtaattacctccaaacaatggatattatatgtataatatataatattatgtaattacctccaaacaatggatattatatgtataatatataatattatgtataccctccataattgagggatatgagctgaaagagctgatctgtctataaattttatatgtaatcaggattcaggagtataatcacaaacactggaggagagagagagagatgaggtatccattatttgttacacatagaagaaaaaaaaaggtatttgatgctttttgggaactaattattggcattagatatgagatattaaaataattaaacaagtacactactgcctggctctgcgtgtaacacttacaatggttgcgttaaattcaagtaattttataagataattagtaatttgaacgatttttgtttaattttagtaaaaaaattctaatattgatgaaagttcaggagcatgatttaatacatatattaatatttaagagacatgatttggtagatatcaaaatctaggaagtataatttagtacataaacaatcactgaaatagta

SEQ ID NO: 71357 - DNA, 841 bp, Cannabis sativa
atatatgactaataatataatgatattattattgatgatattgagaaggccaaagaaaagctcccatagcaaatttcctcttgtggttaagattatcatcatcatcatcatcatcaccaagattggtaggcaaaccatattgtgtcaaaagcaagtcaagcttccactcagccataatctcatagtctcttttcttgtatcttgggtagtgaagaggcatctcaaaatcactaatcttcttcttcttcttattctcatcatcattattattatggtgatttccaatattcccttcttcttggattttactaactctttcttcctctttactcattgtttttcaacctttgttatttcttgatcactaattcactcaaataaacaaaacaaaactgccccccctttatttatagatgtgagattttgaaacaactcgagtggttaattatgatataataaaagaagtaaataagtgtgatagatatgcattattatttatttcttgaaaatgaagcatattgaattttgggggagactatttaatgttacctaaataaaatgcaactgaaattcatggttgagcttgggtttaatatttattcaaattcaatgaatgagaattttagtgttgaaaagttgtacaatgctaaatgttataaagcactcgtagtatttactatttaatgtaatattactattattatacttaaatattgaatctcatataatttaatgtaataaactttaaaaatattattatttattatatgacgatatctttaaaaagccttcgttagaaaatacttataattttattgggatgcactatataattataatt

SEQ ID NO: 71358 - DNA, 1520 bp, Cannabis sativa
ctctagttgtgtttgttcaaccttggagactatgtttttcgttgtctcctctgacctcaccggaggctccgtgcctctcgacggccgactctcgtgtccctttatctttagtgcgacatcgtttctcgccgaaggttcccttcaagtgtgcttccatttttgctgggttttgtccttgtgtcattttctgggcattttgggactttcccaatttgttgtgagacgagagttggctcctagtagtttcctaaagttctggtcaaatcgcttcatacaagcaattctgatcatcagccggtctgtttatattttggaggcctggtagatgggagtatgaggacttttcggtttagtgcggcttggactagagatttatctagccgtttgattgttgatgaagcttggacctctacttcccatgcctggccccctgctaaactctttcgaagaactggtgccactcgagtggcccttttgagatggaataggtctatttttggcttggttgatagatagataaaattgcttttctttgtttcaaactcttccagtagggtctcgggactggcatgaggagcattgtataagaaaagagctcaacaaagcactgaggcgaaaagccctttcctggaaacaaagatctcgtgtttcttggcttaaagacggtgacaagtgctctagattatttttctttgtctcaactaccattagacaaaggagaaacaagattgaaagttcgtcgaaccgtgatggtagttgggtgtctactcggggctagatcagtaaaaagttcattgaccattttgctcttttatttgggggtaactctaatagtgaccgaatctccttttcacatctggttatcctgaccccctctctttagctgagaaatagtgtttacttgcccatcctgatgatgaggagattaggtccacaaagctctaggaccggatggtatgccagtctttttctataaacactactggaataatgtgggtatagacttttgtaatattgttcggaacttttttgaaactcgaaggatgtatagaggctaggcattaacgctaccaatgtggtccttattccgaaggtgcctaatcctcaaaaggtgtcccagttcaggcctattgctctgtgtaatgttatttacaaggtaatatttaagattattgcaaaccgtgtcaaaccgatcctcctagaattgtgtgccccaactaagcgacatttgttcctggtagaaacattcatgataataatgtccttatccattccttccaaagaaagaaaggaaatgggggttgtttgctattaaaattgagctggtcaaagcttacgacaaattgagttggagttttatcaatctagttttaaaggcttttggtgttccggatcccttttgcgagttggtaacttaccttaaattgcttttttttccatcttttttattttttttaattatcccataaaatatattttcactacaaaaaagatcatctttagtgacaattttttagtca

SEQ ID NO: 71359 - DNA, 757 bp, Cannabis sativa
aatgaaatggttaatgagatatctgcaggtaggaacaacaaattagggattggtgtacaaacatcaagatagagaaatcactgttgaaagattcagtgattcagattatgcaggggataagtatactcgaagatcaatatctgcatatcagtttttagtatgtggaaactgtgttaattgaaaaatacagttataacccgtggttgctctttctactacatggaagttgaatttatggcagctattgacgtttggattcaagggatgctgaaagaattaaaaatatttaaagacactgatgtaatcaattaattagatagccaaagtgccatatacttgtgcaagaatcccatataccatgacaaatgtaaacacatagatatcaaatactttttcataagagaaaaagcatcttaagggcaagtcaaagtaaaaaaaggtgcatacagatgacaatccaccaaatatgggaatcaaggttgtaaggcaagtttgatcattgcaaagacttgtttagaattagaattggctaatgcaacacgttagataactctgaactccctagtggcatttgagccttgttttagttctagtaagaaccgaggtaattggattagctctcactagaactagtgccacatatgttcatccaaaccttatattcagttggtatttagttagacgtatagttagatctttagtttattagctgtcattttgcacttaagtttgttactaagcttctcaagccatgttg

SEQ ID NO: 71360 - DNA, 933 bp, Cannabis sativa
  modified_base (588)..(592): a, c, t, g, unknown or other
tttttcaacttacccctatattatatatattcttatttttttattacatatattatatattaattaaaaaataaaaaatattaaaacaccctaacttttccttaacttttcagtggacgtttgtggtggccatgctctgtatgattccggcaagggattcgtttgttttgggcgtgcttatgaacaccaaaggtttggtgaagcttattgttctcaacatcggcaaggagaagaagataattataacatgtttatttattttttaaagagttgatcgagttgaccaggtcaacccagtaaacctttgacccgccaacttgctaacccgtcaactcgatccctattcaggttcagattcattcttttggactcgaaacccagccagaaggtaactagttacctcatatttttttttccatatttttttttttaacttttttaataaatttcatggataattacataagacactattttttgtaaaaaaattacatttttacgtttaaagaatatatatatatatatatattttttacatttttacggttttttatacaaacaacacgaaaacaacaagaaaactatatnnnnntaacatgaaaataacatcaaaagaacaacaacaaaaaataacatacaaattataaaaaataaataacaaattaacaagagtacaacataaaaagatcatattttttataaataaaatcaaaaaaattgtaaaactattaaacattccgtaaaaccgtatttgtgttatttttgtgtatttgtgaatccctaaattttaccataaaataacttttttgataataagctttaattttacaaacttataccttaaaatccataaaaattgaaaatttcccttaaaaattaggaaaatttatatagtatactaacttttgctaattttttacaaaaatactgtca

SEQ ID NO: 71361 - DNA, 687 bp, Cannabis sativa
aattccaccatttaataagaacttatccttctcatcaattcaaaaatcccaaaaatcttttgtcatcaccttcttctcagtttctgccacaagcactattattatcatcatgtctttcaatcccaaattattttgtactaatttactattgctgtcatggaatgaaaagtttcctcactatatatattgccttctgatctaagtgaaaattgcatgaatatcacttaaatattgtatggaagaagaaaaaaaaaattagagtaaaaaattgagactaaaataccaaaatgcaagaccaaaataaaacaacaaaagagatacttcatgaatattaaaattatttttaagatgtggctaaatgctgggtagctaatacattagattgaaaaatatcagtataaatatggcatggcatttactaaatcatgtgccattttgggtttacaattattgcattttctcattgaatcaaattcatagttctctataatatacgtcaaaaaaaaaaaaaaatcatggttctctgaaaaaacgattgagaagattcttggaaaaaaatctcacggattaactcttttaataaagttaattattttaaaaaaattaatcaataataatataaaaataaaataatattaaaataactgatattgtgttttaacttttaaggactcattataactccat

SEQ ID NO: 71362 - DNA, 2657 bp, Cannabis sativa
aacacagggtccaattggtaacttttgtaaaacagagagtccaaaatagtatttacccggaataaaataacggatacagacccaaaaacagggcacctctaaaaaacacacgtacttaattatttggaatatcaaactatatagatatatgtagcttgtttcttttattgagttaactcataattattactaattttttttttgttctcacatcatatatttatgtgaatatggcagaagtactactgttttcattatataaactattcaaacaaaattttaaattttataaaaataatgatattgtaacgataaaaattagcactctcaatattattttccttttccgtaagttaaagcactctctagaagctagatcgaacaaaaatgatatgaatctccccatactgtggaaatccctaaatatcgtcatgattagaaagtgattctctttgattggtcacgtgatgataagacatgagtgcaccacataaatactcgacatatatattcaccaaaacagttatggcatctgtatttacgctcaataattagccattaaagaaagcaatctctcaacttttatgtatgcatcggtatgttttgttaaatttcactgatataattgaccaaaataggtacattcatgatatatatatcggtattgattaattccaagcatggtctatatatccacattagcttcgaaatgatcttctttctcaattgaaagtcattttttcccctcatgttcagtgttgtctttttcttgagtttcacattttcccaaagcaaaccatatatgtaagtagtacagaattggacaaaatttacaaaaacctcacaaccttatccttcctggattacacatggcaaaaacctactgataagcctgaacacagatcaggacagaaattctttgttggtttcttcatgccgtgactgaataaatcaattcagttccaccttcaacttctagttgtaatactctccatttctaattatacgtatataaatgtatatacatcatacaacatactagtagcaatttttctcaatgaatgaggtccacttatagttttattattattacaaaacaagtcagttggcataattctataagacaatttggtgctttctaaaccacacaaaaagatgatctagacgtttgcatagatcaggaacagagctcaggccttagtatatataaggttcccaatactagaactttttcttcacacaaaatttgacctgaaatacctctttttatcatagtgatgttggaagggaaagcagtgattggagagacagatatgttgcagactatgcaacaggatgcgcttggtttagccgccaaagcacttgatgttttcgatgtcacagaggccacagagatagcccgattgattaaaaaggtaaaatcaatgttacattgtgctaagattgaaattttcatgttttggtcaatcaaaacatgtgacatatctgtgaagaaagttttgaagatgaagatttcggcctttatgacatcttcattatttttcatcttgattgtttggttgcgcaggaatttgatcggttacatggagctgggtggcaatgcattgtggggacagattttgggtcatttgtaactcattgttctggctgtttcattcattttagtgtagggagtcttgccatattgctctttaaaggatctgctggttttgatgctgaggctaaccaatttccagccatggagtctgtcaaagcttagaagtttcttttctctttctttcattatgttatgctcttcttgtatccccttgtattttcagtagagactacaagaataaaaaggaaaaaagaaaaacagagaatagtattagattcaaagttctaaattccatttacattcttttcagagctaaacagtagcccacctaatggtttaagcatatatggagagccaaacccaaacaaaataattaattaattaattaaccaaggcatctaaatatattgaccatagatagttcgcaagagttttaagctaaatggaaaaaaaaaatgcattctaagaaagaatgatgtaaaactagtattgggataaacaatgaaagttgtctctttgtacttattttggcccttatgagagcttagcggcctccattatttgattggtcttctcttcgttctctcataagcaaataattaattatacgtaaattctaaattttaatcacatgtattacttattaagagtgcgttagttgcaaaaagtcctacccatatgccaaagtcttctttcaaagtcataactactacgaagttctagactcttccttcgagttatgctaaggtttcttcgtgcgccaccatgattcagtcgtcggcgtcagcgccggcactcagtgttttcgtccgtccaggatccgtaacccctggtaacggttgctctccactacagtccactcgaagcctcttggttcatgccgttaacggcttcgcacattagcagatcgacccaacaatcatcactacctacttcgccgctctacatctagacctttctcaagtaggtattgttagacaatttatatgtataaactgaaacatatatgattaagtataaaatgcggaattaataaatcatatatgcactataatttaag

SEQ ID NO: 71363 - DNA, 1928 bp, Cannabis sativa
atagcaatgctctaaaataattaatacaaacctgtttagtatgaatcaaagtcattaatgcaagagaagtctgcaccaaatgtggttggtttcctttagtaggagtgtaaacctgtatgaaattatagaaatgtgaaaatataattaatgtgattattgaacattttgaaaatatagaaattgattgtaacaaaatttaatagaaaaaaattatatattgtgctagaatcctattcaatttcttaaaacaaaaattataatacttttagtcctaatttagttacatgtgtttttatttttcctaataaatttgttgtgattaaaagtattgttttttatattaaattttcttttattttctttaatatagtcaaactaacacaaggaatagtaatataaataaacaaataagaaatgtattaaaattcttggtaccttattagtgcaagaagtgtaacattctgcccaaccgccgtcttctctttgtattttgagtaaaaaatcaacagctcgacgaacagcttgacaattagagtaatgttttccaccggcctttaaacctctaacggccatccatgtaccgtaaatgaagcaaatcccccaacttccgtaccaagaaccatcagtcgtttgtttgttttcgatgaatttaacagctttggtaatgaaattctcaatttcaattttcctatggtttggatgtaacttcttaaatagatttaatgcttctattgaggaagcagtacattctacatatctacattatttataacacacactcataagtgttagtgtataatactatatatatatattcatcaactactaattaataatagaagacattttaataaaattgtaattgtaataatactaataataattttacttactcatattcaatgacaacatcctcaatgaactccattggattaagccactataatataatgataatatgatagttaagttataattttataaagaaaaaaagttgattctaattaattttgattatatgttttgtaaaaattataaattagatattttattttattaaataatattttactataatatatcaaacttgaaatactttttaacacagataaatatagaaaatataatcagtcttatcataaagctttacatcgtattattattaaattttattttaataaaaaaaaaatcaactcaaggtactatattttgtattatcttagaaaataaatagtcaaatttttacaaaacatagagtccaaaatattattatggtaaaaaaaaatatagataaaaaagagatttttgcttaattacatacttccaatattttcggagctcctccttgttcccaaaccgttaaaccgccattttcactctgattttagatacaaataacaattattagtgttaataataatagagtaatgatatgtgcattcaaaaataaaagtatatatttaaaaaaaaaaatgaattaatttatgatcaatgttaatatattgtaggtaatatcacctgtagtgaaaggatgagatttacagaatcgtacaagtgttccacatccataggctctccaacaatattaggtgacatcattgagagcaaaaggcaagactaacaaaaaaaaaacaaatattgtaattaagaaatctcaacttgataaaaataaaataatttagatatagaaattagggaaattactcatatattatttttttactttttttttaaaaaaaaaaaatttacaatttaggttgttccagtagtttttgtgtgggttggtttaactctataatttttttttacttttagtcataacaaaatttattactaaaagtaaaatagtcgtcactaattataaattatcaaaaaaaaaaaaagtttgtgactaaaggtattaagcacaaaaattacaatttgttgtg

SEQ ID NO: 71364 - DNA, 1185 bp, Cannabis sativa
  modified_base (105)..(108): a, c, t, g, unknown or other
cgctgcaatctaaattacaacaaaaaatcgtacagaaacccctattgcaactagcgttgcaaccactttagaaacctaaaccgtaaatttaaaaaaaaattaaannnntagtatatgaagtaattctcctaatttttttctattccaactacgatactaaaatttactccaaacaatatttttattattatattattttattacactatcccacagtataatattatatatatatataaatataaaaatttaatcataaaacacattatttgaatacaacactataaacccacatatataagatagtattaagaattttattggagcaattttaaatataaaagtttaagtataaatacattattttaatagaacactataaacccacctatataagatagtattaagaattttattggagcaattttatatcaaaactccattatctaaacagtcgaaatttctcgaataaattttgaaaaaggaagccaagtagaaagtcttgtcttgattaagggttgactataaactcaaaggtagtgaacaaataaatctttttacacaatcttactacaacggtaatcttaaatgttaattggaagaaatttattagtgacaattataagataccaagaataataacttactcaacagccgtagccaattgttttgtagtagagaatgaaggaataagcccaaggtttgcagcacttaatccttctgctgagggaattgtttccgcagcctaaagaaatcaaatctaatttatcaatgaaactgaaaatcttcatattaaagcaaatgggcaatataattaaccatatggggaagagaatttatacagaaactcaatgacaaataaaaatatgtaaagaattggttgacatctctcacctttagttcgagatcatttttcatattaagcatgtacaaattctcatcatagaagggaatcatggttgaattttcaggtttctcgatgtcttcgactccttttcttccaattcctaatgttttgggttttggccttcacttcaactgcttaaattcattaaaactaaaattaagagcctaaataataataattaagttaatcgcatttaaaatgcagagacaaaaaactgtgcaacactctaatgtgttttgaattccttgaaactactaaattaaattatgttttgagtt

SEQ ID NO: 71365 - DNA, 1443 bp, Cannabis sativa
aaataaataaatttgaatgtataattttggtttgtgtatttgtgaaattttgtataaatgggtaatagaaatggagaaaaaaagggtataaatgtaattttagtgaaagttgtgaaactattattattattattatataggtctcaacacaatatataggggtgttagttttgttttgtttttgtttttatttttattttttgtataaagaaagaactcaatatatataaaatggatttgttttaatgaattttgatcaaagtttaaaacagtaaatttagtttgattatttgattaatctaattactattaatttaacccttgtaaaatcaaaattaaacaagacaaaatatgtttaatgtcctttatcattttaaatttacgtttgatgaaatcataatattttgttgctttatgctttttgacatttgtatactaaaatttatatctatattttgaaaagaaaaaaaaataacaaaaactacttaaaattaattaattttctttttatatatttatgtttaatttttatagggttttacttatttttttagaaaaagaaaatgttattttcaaattgcttaacaaaatgaaaacaatttcgcaaagaaaaaaaaataaaaaatgacagaaaaataacaattcgtatttttgtaaaaaacaataaaataaatttatatatataatttgtaaaatctataaaaatatataatataaatttgtaaaaatgtaaatttttttatcctctttagctatttatgaaataatttaatttttagaaaaaatggattcaaatctgtatgtagatgcatatattttaagatttctttagtttattatgtacatttgagcattggtataaaatagcaacgcccttaaattttagttaactcattttcgtgcatgctgattattttgttacgtgtttgaaaaacaaattactatttttagaaataatcttagctttccagttacattttttaatactttttcattactatctttcattgggaagaagaatataaatttattatatatatttatatatatactaacttaatattggttgatatgaaaaggtgtctgctatttttagagtaataaacttagttatcttattaaaagtctttttcattaatagatatgttaattatttcaatcgaaaagtaatataccgaaagtgtaaattttaccaattatagctcaagaatgtaaactcaaaacaagtggagtcaatttttttgttggccatattcacacactttttctcaatttaatttgtggtataaatacttaagtttaacttttagttggagataaaaatttaagattaattttcgacggtatatctaagaaacttccgtaagtacatgattgttaagtgtcaagtcaatagtcacatgacagttcttgattagtataggtcattaaatttttattttt

SEQ ID NO: 71366 - DNA, 1423 bp, Cannabis sativa
tttgtaagttgcaaaagtctatatggcttgaagcaagcttcaaggcagtggttcgaaaaaattttccacagctttgattgctgaaggttttcagcattgagcatctgatcattccctctaattactcaacacaaagcatccaacattattgttcttcttatttatgttgatgatgtcatcatagcaagcaatgacatgaatattgtgcaagctttaaagaccagacttaatgataggttcaaattgaaagaccttggtgacttaaaatattttcttggactcgaaattgccagatctagtgctggtatttacttgtcttaaagacattatgcccttcagcttcttgaagatttaggccatctgggttgtaaagctgctaatactcctatggaagtgaacctaaaactcaatcaagatggtgaagatgctcttgcagatccaaagctatatagaagaacaattgggaaactgcaatatcttacaataaccagacgtgattcagcttatactctgaataagttaagtcagtttttggttgcacctagagctacacatatgaatgctgcaataagagcccttcaatatgtcaaagtaacacctagacaggatctattttatgcagtaaaaacagacattcagcttcaagcttacacagatgctgattgggcagcttgtgttgatacaaggaggtccacaactggtttttgtgtgttccttggagactcattaatatcatggaaaagcaagaagcagagtacgtattgagatcctcagttgaagctgaatacaggccatgttgaatacaacttattgtgaattggtttggcaaagagttgaaaattgagcatcctaggcctgcattgctgtattgtgacaataacgctgctcaacaaatagctgccaatctagttttccatgagaggactaagcacatagaaattgattgtcatcttgtaagggagaaagtccaagaaagggtcatctaaactgtgcatacttccagcaaagatcaagttgctgatatatgtactaaagctctattacctagtcaatttcaagtcttaaaagataaaatgaggctttgtaacatatacactccaccttaagggggagtattagatttgtaaggtatcatggttagttggtgagtttggtacaaacttgttcttctattacaattgttagttagtcttcttcttcttcgagcttgtatataaagcttcttactatactctattttgagttatcaataaaagttgaattcattttctcttcttttcttctctgtattttctttcttcctaaaactaaaatgatcattttcttttttaattaatatggaactttggttgtatacccaacaatcttctcctcaaacaaataaccactttggcttccatcaaaggatcctgcatcagttaac

SEQ ID NO: 71367 - DNA, 1168 bp, Cannabis sativa
  modified_base (1125)..(1130): a, c, t, g, unknown or other
tacccataacataattggtcacttaattttgtatcacactttataatagcatatacattatacatatgtgcccacataggatttaaatccaacacacgcaacatattaaaatatgatgagtttcttgcacaattaaatggtatctcattctcaaacaagaatctcccaatatctagacaaacctaacttcgatgctctttagcacctgctagagtcattttttgggtagcaccaataatcatctcatcatctcttttcgtcttcataaatcgatcgataggtcctctaacacctctagtagtaccagtgctgctaggacacgagttgttgaagtccaatagactgaatgaaatgggaatggcttaccagtaccactaccaccactgttaaagtaagctccacaatccactttcctcataatttctttgagctgcaaattttgaattttgaaagtttttcaaatattgtttcatctcatccttgactttttgaggtactttagaacacggtgctgcatctttgtgtgagcaagtaagatgttatttcattctcttcacccttcccttaataaccttactacaaaagttgcacttcaaatacttgtatcattttctctgacacttcaatttcaacactatacttccaagcagggtcctttcgtaatcctttattttgttcattcttactcattctaacttaatttcagatcaaaagacaaatataggagaagaagagagttatgtgaggagatgaggaactgatgtgagaactgaaggagaaagagatgtgttgtacccaaaagtgaatgttttaatatttatactcgcaagtgcacgaatcgtttcggaatataatgttcatgcaagtacgaggtcgaacccatgaaagttgactaacatcaaaagaaactatttcaaataaaacaagaatattctaacttagttttaaatatttgacgggacttattttagaaaaaaaaaaaaaaagacaagtaataaaaaagattaaagatttattttaatagaaaagatttaagattaaagatgagtaaatataaaaatgtttttcaaataagatgtgtaaaataagattattaagatattagaatccacaaaatacaagttnnnnnntatttataagtatgttgattcccaagttttagatatag

SEQ ID NO: 71368 - DNA, 1743 bp, Cannabis sativa
ggtctaatggagagacttccaaagaaaatacaactcccaaagttcctaatatataagaacaagggtaaaaccaaaaagagtaacaattaatgtgggtccaaagtctaattctaaccaattcaaagtgaaaaatatccatgttttgggtgtgataaaattagacactatgctaaggattgtaattgcatagaaaagactttaaaggaggtaatgctatcgaaaggatatcattactactcttagtgaggtgaattccatgcaagagaaagtaaagggatggtggtatgatacatgtgtcaccgtctatgtcacacatgataaatcattgtttaaaacctttaaagagataaagggtacgtagctatgagatctaaatgggtaatgaaatcaaatcaaaggtactatgggaaacattgatgtaattttacctccagtaagaaagacatattgatgaatgtgttttatgtgcccaacatgattagaaacttgattagtggtaacttatttgaaaaacccgatatcaaggccgtttatgagtctggtaagctcatacgtactaagtttgatgtatttttgggcaaggggtactcttgtgggggaatggtaaaattgtgcatcaataatgtaacttttaatgtatgattgaatatgattctctattttagtggcatcttagataattagctcacattaatttttctactataaaagaattaaataatgtggcatgattgattgtgatataaaatattataataaatatgaaatttgtgtaaaagtaaaaaatattaaaatatctttttcaagtgttgttagaaatttaaatttggtaaatttaatgtataataatttatgtaagttaaatgaaattttaactaaagacggtaaaatgtattttattatatacttatctatttattactctcttatatatatttcatcactcttatatatatagtattacatatatattatatatctcaactatatatatatataatattttatatatatatcactttctctatatatatacacattatattttagatatatataagcgcttttatattctcatttcttctatcctttttatttgtattttatgatttgaattgtaaattttatttaatatatagtccttgtaattttattgaaaaaagttgtaattagtttgattattttattcatcttacttttattcttccattataatatttctagtatatttctatcaataacatgtcaaatttcagatttaattatcttctaaggaaatagatggatagatcaattttaattaaaatatattatatataataatccactttttatttcaagtaaccgtttcagtaaacgggataaaattaggtttactaatcaagaaatgttagtttataacttaagtttacttacaagcctccaataaactcaaccatatatgcaaccaaattgggaagagagatgtttgcattaacattatttatactaatatatgtagtagtagtaaatagtaattagcatatatatagccaaattaatgatcatactttatactatatatattccccatgaattaattaataaaactatatatatagtactacaaattaagatgatatgttagctgtacgttaaaatttgaaaggaatcaattcagctttcagactagagtgaattaaaaaaataagttaaaaagtagtattagagatggaaattagacggttaatgtacggggaatgc

SEQ ID NO: 71369 - DNA, 1162 bp, Cannabis sativa
ttaaactctaggtgtattatttgtgttatatgtgaaatatgttatttttacaatttttgctcggcgataacggaaaatgcgatggatatctagtttaatcacatgggtaagtttagaatcttatttcttagtaggatatatgtttgaggaaataaaatactgagattgagcggggttatggtttttgaccattttacccctagctgtgaaaatgcttaagattaagcaccaaagggcatttagtcatttaaggagatgattagttggcttccttttggtctttgcagctatcgatttaatagtttcagctggctattttgagtaggaattaaaaaggaattattaattatgaaaaataaagagaaaaaatcaaaagaattagaaaaccctctcccttttcctcactcctcttcgagcctagcaagaacaaccaaggatttgggactttggattgaaattgtggtggtgttaagctgaattcaagtggtgataatcaaaggtaactctagaactctaaccttgtgtaatttgaaactttgaattttagtttgattatgctagttggtgatttaagggttgttaaggtttgggtgaagtataatttggtttctaagtttaaattgggtttatttgatgatctagctgttggtttaggattttggggttgtggatgcacaagtttgagtttgaaaactcaagcttggttcatccacgacatgttttgatttagtgtgattttctgtgtttttctagttagaatatgttgtgtatacattgtttaggtactttggaaagtttggaggcaattggacaagttttgagcaaattggtgagtttttggggagaacttgtataaacaggtttaccggtttaccagtacctgtaaaaccggtaaaccgattttggcagggttccccgaaaaaccagttttctcaatccctgtccatttcagtgccgtagttggctgtttccctgtttcctgagatagagtaatccctagagactttaacagagccttgagtgtagactcaggtttcccgaattagggttttaaacatgtaatttacccggtttcactgtgtgattagggcatccatccagcacgagactttctgttcaggtcggccaacacacttgaatctggaaaggagataagaactgt

SEQ ID NO: 71370 - DNA, 721 bp, Cannabis sativa
tgagccgcttggttagcatttctcttaacatgagaaacagtaactcctgagaagaaggataaaagacaactaacatccataattaaatcattaaaactagataggttcatagacggagaattaatagctgatgagacacgcaatgcatcagtttcaacatttgtaagctttaattgcaattgcagcgcccaattgagacaatgaaaaagtgctttggcctccatttcatccgatctgaaacatccttgaactggtttggaaatagcagcaacaacacttccttggtggtctcggacaacagcaccaatccccaaaactttcctttcttggttgacagcagcatcaacattcattttaagcccagaaacacacggaggggaccaaggtacatcagaattttgtctctgagaatgaactggtgcagaaccattgctggtgtgtacgttgcagtgaacatactgctgctggtttttagatcttgcccgattaaattgctccagatatgcatttgcaaaggatgcaatttcttgactaggcttagataaacctccatgaatgaccttgtttctatcatgccaaatagcccacatggtgcatactatcaattcgaagtcttgtttagaatgtaaagatgataaatggatcaaataatcaccattgtacatattatgagtaagtgtgtgttcaatggtgaatgtagtttctctccaaacctttctcg

SEQ ID NO: 71371 - DNA, 1150 bp, Cannabis sativa
  modified_base (35)..(41): a, c, t, g, unknown or other
ctcaaatcttaattatactctgctacagaaaggannnnnnngttagagatctaagtggaaggagaaattccaacaggtataagcacggggatcgcaactccaaattctttcatgctactactattattaagaggaagagaaatttttttggggttatttttgacaatggggtggattgaattgaaggccaccaaatctagggtgtactccacatctttccctacttctccaaatttgggtttttttatccaacatgtggttacaaatgagatgaatgaggctctttcgaaaattcattctccctccgagatttgggatgtggtttggtcttttccagctcttaaagctctgaggcctgatggcatgcctggaaaggatcacttggatatagtgggcaatgatgtagttaacactgttattcagttttttgaaacaggtgagtttgttaagaccttgaatcaaagttttatggtgctcattcctaagaaacaaggggcacctgcttttgatgagtttaggcctataagcttatgtaatgttacgtataaagtcatttcaaaattcttggcaaatcattttcccctattttaggtgatattatttccccatttgagtctacttttatttcggggagatagattgcaaaaaatagtatccttgcccatgagattatggattcttttaattaaaggggtggcccgtgtagctatgttggccttaaacttgacatttgtaaggctaatgttaggattgagtggaagttccttgagcaaatattgagatcttttagttttcttggaagattcatttccctaattctaaagtgtgtctcctcagtttcttactctgttctcgttaatgggggccctttcagacaattccatcctaagagaggattacatcagggtgattcgctatcaccgtatttgtttattaattgcagtgaagttctttctaggatgttattgaaataggaagaagaagagtggttgcatggtttcaagatcaactctttatgtccttttatttctcacctgatgtatgcatatgatacttttattttctgtagagctgatttgagagaagttgtttctattaagaactgcctagaggacttttgcaagttgtttgcgtaggttatcattgtggg

SEQ ID NO: 71372 - DNA, 1648 bp, Cannabis sativa
tcaagtattttatcatataaaaataatgttgaaatattttatcacactcataattatatgtctttataaacctagaattacatgtaactacaagattatgagaaatttgaatagttagagcatctttaatagagtatccaataagtggtgtaatgctacaagttgatattttgtaaaaaaattatttctctaataatttgttagaggttataccaaatttgataaacgttaaaaatttggtaaaatttgagtattatgtcaaatttaacatacaattaatatacctttttatttataatattaccatttaatattaatgagcgactttaatatatttttctaattataatattataattatatttttagagtatatttaatttatttatttcatcaatttacatctttttttttttgagagcgcatcaatttacatcttaatttgttatttttcattggatcacaattacaataaaagtagtattacatttattatttcatatgataaatttaacaaagtcttttaattattgaatcaaacttgattatgtgaattgtgaagatagaacggtggtagtagaacacgctgtctcaattctcaaacgggtgagacactattgggtagaagtgtcaaaagtgcatataccacacattgaaatttttaattttttaatttttatactgggacagaatttttttcaaaaatactgtgtaaattttatattgtatattgtgttaagttttcattattgttttactgttattttttagttgttccactattatttttagctgttttgttttgtattcaaatgttattttataagaacacagtatttttgaaaatatttccgtgtgacagtatttttgtaaaagttaattcaaatttcaatatttttgtaagtttctctattaattgattgatgcatgatgcatttgacaattgaggttctacgtatcaaacccatctcacttacatgtgatatttctgccaacaacttaaaacaattctaggtgggtttgggcttcacttaaacaacaagttcatgtgttatttataggacaagctgctcacattattggccacaaactcttttttagccttttagaattataaaaatctttttaaatgtgtttagataaaagaataaaaagtttttttattaaatttaaaagaggtttttataaaaatactaaattttcaacaaaagtttacaattttaatattatatagaactttttacaaaaatactcattttataaaacaaccataaaacaacaaaacacagaataattaaaacaaccgtggtagaacaaccgtgaaaacttaacacagtacacagtataaaacttacattaagtgttgagcgctctatttttgcatgagcaaatgagccaagaattttcaaccctttgcaaccaatctgaataaattaaacccgcttgagaagatgggaatagtggttgttgtttactacagagatatacgttcttgtagttgaaaaggtactataattattgttttttcttttcacttttattgatctaattattgtgcatggtatgaaggatttgatccctggacatatatttactgattattgagattagttatgttaaaaaaagttgcttaagaataataagctga

SEQ ID NO: 71373 - DNA, 1396 bp, Cannabis sativa
atttaatttgttcctctttcagatgtttttaatcttttaggaaaaaattcgttgcttgctgctaataaaagggcgtatactttataaaaattggaacaataaaagaaatgtagcataagaccaggaaaggttccatggattagtgttgtgatgtgtatttcatatcatatccataaaaaactaatcaaaagaaagtctcattccatacaattagaagtcaaacaatcaattttccttttagtttcaatattttattgcttctttatgtgaaaattttgttggtgagaaatttcttagttaataattgtggttggctccttaattgaggcgtctttgtaaagtttataattatttatcttgtcttcccatgagggtatagaatatatttttgtttctgtttatttctttcaataccatcatgaagaaattacttcaagaattctaagagcatttgaagattgaagatattttaaccttaatttgggttttgaaaattgtttagttctgacaaatcaaaagaaattacttccaatgcattttgactcctgatcacgatgaggcaaaggacaacaacaaccacaactcaggtggtggctcagacagctcctcatctgttgttgtttaagtcggctcacctaacaaacttgataacatgatgactactgctgagtgtgtcatcatgagcaactacttagatctaattttcctcatcagcaaatatatcagctgcagattctcggctcatggttgctgctacagccaataataactcatttacttagtcacccaagtcaatgaattttcttctccaacaacaaaataaaactcaaaggtacaatcttagaaattaaagttttgattttgatttttgttaatgtctttatgtcagtacttaattttgttttgtgatataattattataggtctgcagtaacatcttggattatgggtgtagatttacacaaattttgaatgcattctcaatgaatggtggtgtgaaccagcatctagacaaatctacttgacttttccagctggtagaatttgtagagaataggatgtttctaggtattttaggttttttctttgtttattaacaaaaaaaaaaaatgcttttctaaacagaaaattgttctttttctaattaagtttttgttattttttcagtatgtatagtaagtttaaaatgatagaataccaaccaaatagaatgtttgactttgtgacctaacatgaatggttttgaattgacttagtcaaaacactaatttgatttttgctgttaagttggtattagacaagtaaattaatgaagtacgtacgtgcctcgcacgtaactttaatctagtatatatatatatatattactagcaaaattacgtgcgatgcacgtata

SEQ ID NO: 71374 - DNA, 1929 bp, Cannabis sativa
ccactgaatatttgtttgaggtaatcagaatgaaaaaatcatagacagtaatagtcttacctcccttgaaatggtaaaatctggaagacaaaaaaaaaaaggatgtaagctggttgggaaaagaaacaacataacaaatatagtaaatgtggggagctggaacataacaagagaatatccaggagaagacatcaaaaatgaaaagaagcagaacaattaaaaaataacagtggaacaatggagaaaaactgaacatatattgaagcatatgatactgaagaaaataacttacatacaaatttcattattttcctattactattaaaaataaatcagtacaattataattgacaaactgtgataaaaaaaaatgaaagaaaacaacagtaaaacaaccttaaaacaataataaaataataacaaaataaatcagtaatagaaaagggtaagttagagaaagagggtggacttagaagtacggtagagatggagccaatgctttgagaccaaagagactgaagaacatgaatttagtgggagtttttgaaagatttctacaagaagttcatcacagagcaagctctccatctctcttacacacacaatcacactcttatctttccctattcttcttcttcttccttcttcacatattcttttttttagttacctactacaaaaggagatggttagcttttatttgggtaatgttgtagacttggcaaaaaaagaaaaatgaaaaagatgatgaacatgggagaaagaacttaaatacattgaaaaataaataatgtgtgtgtttagtgatttgctcaagaagaatatatatatataaacacgtatatattattttgggaaggaaaacatcacgtggtgcgttgttgctcaaattaaaaaataaaaataaaaaacacataaaaatgtgtatgagaggtcaacatcaactttaatcatcattttttttaaaaaaaaaactaccacaattttcttgggaaggaggagatcatgtaatgggctattgctcaattttttttttaaaaaatgaaaaacataaataataatgtgtattagaggtctacatcaactttaattaacatttaaaaaaaataataaaaaaaataaagaaaataaaataatggcgacaaaataacatataatggtaatgtacacagtatacaatacataaaaaatacagtaaaaaagtaaattctgccatacgacagtacaaaagaaataaattaaaaaaaacagtatgtggtgtaaaaactccaataaaatatcaccttgatagtttatttaggctcattgtcattggtattgtgcttattcaattaatatcaattatttaattaaaggttaaatttttctcttttgagtcttctgtgagagttaggagaccatggtagtgatacgacgtatcagtcctcccttatatgaaccaccccaattgtaaatgcccatttaccttatttaaataattgtattaggctaattatattagtttaacctaattaaaaaataattaccaacataattaattttttattagattactttaaaattaatttaaaaaaataaacttagtttaatgaaatatattctagatagttatttttagtagctaatttatatttttttctaatatttaaataagtagaaaaatatattattatccaagttttcattaatcaaacacgtggcacaatcaggagaaagagtatggtcacaacccgaattattcaaaggaaccaagaaaaagaatggctcccggacctggaaacaacgagagtcaatggcctccgggagtaacttcctttggggaagaacccggaaggcggtaatgttagacatttatttgtatagactaaaacatacatgattatgaataaagtgcggaattaataaatcatatatgcactataatttaag

SEQ ID NO: 71375 - DNA, 659 bp, Cannabis sativa
gtacaatacattttattctaacaatttagatgtgatacaaaataaagccccactcaaccatttttatggtcagcaaaccatattttttaaggtagtcaacactatgatatggtgcgttatcaatgcttagcagttttttatattgtctattaaataaaatgtaacagattcaatattaaaatacatcgataacagtataatactttttgtgatacttaacaccttaaagtactttttaggatttctctattataatttactagcatattatttggatctctaataaattaataactataaagtaagttattgtccattttcctctcatagaatctaaatctacgtaaagcataaattcgatcttagtagaagtcctgctggaattagattcttcgttctctccatacatcttaaataatttataacccaaaataatgcaccctagctaaaaaaaagacatttctttggtttcataattagtgatatatttttctgatatggctcatattgtaacaagatacaaaagcaaaaaagttgataatcaataatgtcatcaatgacattttttgggccttattttcaaaatatatatatatatatatatatatgaaaaatatcaaaaagaatatcgtgtcactcaaactcacgatattttgtat

SEQ ID NO: 71376 - DNA, 1033 bp, Cannabis sativa
tgataataatatcacttaaaaattattacacaccgaatatatattacatatattacatgtaatttatgttaattgtattaatatttatttaataaatattttatattttttttacaagtaataaatattttatattgtaatttatttgtgagtgttattattggagcttctcttttatctcatacaaagtcaatgagagaaggtcaactatatgaacggttctgattgttttataatataaaatatttatatatatacatataagcaaagcaattcgtacaaatgtgattaaatcatggtacttggattttattattattattatttttaaaaaaaaaataatatggaagtgaaattaaaaagttcagttattatttgtattttatttattttattttttcattccacaagaatatttataaacctatataatccataattaagttaattaatataaattattaaagcaatttataaaagcaaaaaataaaggcatgcatgtgcatttgtattacacgttacaactggaatagtaatttacatttatatatataatatatataaaaaattaattaataataaaaataataaagaatttttacaactaagagaagaataataacctaatagtataacaattataggagaaaattcttagatagtgcctcacttttgtttttattgaacaacaatatttcaaattacttaaaattctacacaccttttaactaggatgcactgatatatttttatttattttggcatctaaaataattttttagtcaaatttcttttatggttattttcgttataattatttaagatattttacaaaattttaaaaaattcagaaaaatttaatacatcgaaaataaggttcaaacagtgtattacatatatgactattttattttatacgcatgtaaaataaattgtttgaacactgctttttatattgtattttttttcaaaattcttaaaattttatatgatattttaaataattacagcatacacaaatatggaaaaaaaa

SEQ ID NO: 71377 - DNA, 1347 bp, Cannabis sativa
gattggatgatgcccacccctatagctctttattattattattattattattattattattaattaggcttttataaccattaattgctagcaataaagggtcttgaatttctttcttttttcttttcaaccatcatcaatctcttctttagacttgaagaattttttggccttataatgcccccacacaaccatgacccctcacccacctaggactcatattgtgatcatagtgggaagagttcaatgggaagaaggttctctcttcaaatattttgcctttgtgattgtttaaaataaaagacaaaacacatgtggaagaggggaagaaagattagaatcctatgctactccaatggttctcattgtattaaactaatacttttagagtttggaccaataattgacaaagtcacttgaaatataatatatgtttatatttcaaatttttttgttaagttgttgtgacatattatagattgatggaatgtttatcactataaagaagggtaagaattagactagtaccttatttgtttatcaagaggataatgtgcatgatcatgactaaggattggtggagctagcttatgtgtgtttgtgactagggggaagggtttatcgaatcttttatgtttacttttttaacttttttcttattaaacaaacttgtcttgggattggtgtttttttttgtgtgtgtcaatagtttctcgacacctataatagtgacttgggaatcttacttggcatgtgtgtagtgggtatttttgattttggataataggttagttttgtaattaaagactttaattttatctttaaattaggttagttttaattaaagattaaattaaaagtagttttttcaaaaccccattaaaggggggaaccacatggagagtttttttttttttgaaataatgaaaactttcattaaagggagttgcctaacaaacaaaagaaccaaagttcatacaccaataggtaaactaggttaccaaactttagcactctcaaaagataaaaccatttgagctaagttatgagctagagtattagcggttccataacaatgtttaaagctaacaacattgaacactataggtaatagctagaacatcataaagcacatttgatttcacattaacaattaaatttaagagaagctcaagcgatgaatacagtcctactcgaatcgccactacttcagcaaccgatgctgtcaacaaagcatcaagaggaacccagatgaaactctattaagtaatgcaaatacaaaatataattcactttttgtaaaaaaaaaagtctattataatagtgtatcaaattgtgatgcaaatt

SEQ ID NO: 71378 - DNA, 1017 bp, Cannabis sativa
ctggtttaaatagaagtagtagaatttgtttgtaaggacgtgagtacaaattgggctaagttgcagttgtagctgattctattaagttgttagagtttctgtttttctttctgatgtaaacttgagcctctagacaatcgtaacttttttttaatgtaatgcttgagcttaatatgataatttattcttacagttattaactctaaataacttaataatctagattgacaagaaggtaaatttgatgtttggctaaaaaggcttgattagaaaaattaagattctcaaaatccatcatagtatttatataacacatatatatagtgcattttctttttagattcactacctttctcactttatatgaatgtctttcaaagtttgaaaagattcttgaataaatatggatagattataaaaaacagctttaagcaacacttctcaaccacttgataataatataatttgttcattccaaatttgtatcaaattgacactttgaccaaataagcaacagatacctaaaaaaaattgtgacacgccacctcatgaacatccaaatgagagctaaaacataactatagttttcaaagttaacaagttgtatttggattgtgacaaaagcctcaaaacatagcttaattaacttaattaagaacaatcaaaatggtaaaaatagtaatcaaggtctctgcaaccacaaccgatcctatatgtgttaatgagaattgggattaattaacacttctaaaataataaaatcacattcccatataataaagtaacaaatcatgcaataagtaaattattatttaagtatatataacatactttttttatattataggttaattaataataaggacatcagatcaaattaaaaaggcagttcttgtcgtttatgtatttatttatccgttgcctaagtccccaccattatttaatttattttttatttttacaataacattattaattttttaattatatgtatgggatatatgtataatggaacta

SEQ ID NO: 71379 - DNA, 1344 bp, Cannabis sativa
tatatatatatatataacaattataaataatcaagtatatatatatatactcgtaccccaagttaatggtgttgattatgtccctatactattctaaagagcttacttctgtgagctactatcatggattttgttttttttttgtcagagagctcttattaagcattggactaccatcgaacctaaatcaaaccactatcagaccttctctatcaacctcaaaaatttaaattttagaacctactattgaacatatatcagataccatcggaccgacttgaaaaaacaaaaaaagttgtagagaatgccagattgctgtgggcttgtggtctacgattgtggtctctattcatggggatcgtctctccattcgcagttgaggatggagattggcaagagcttggaaggattgaaatggagtcgagagggtcaatttgattgggcttttagtgggtcgagtggtattagatggtggcagtggtgttcgatggtggcagtagtcgtggcagtttggttctcttgaagagagcaagcgagattagagggagagagagagagagacagaagtaagttgaaaaatgggagggttaattttggatttaatgaaaaattgatctaatttaataatattgattcactaatgaataaggaataaattttgacctaataattcaatagcttgtaaattaagataatttatttgagttaatattttaaattaggttaaataaataatctaattgaatgaatacaataaacatcttatattcaatatgggttttgtaatatgtaaaacccaatagtaaacttaattaggatttatgtgactctaattagtttttttttttaacatgaaatatcaacttcattgaaataaaacattcaaattataaaattggcattataatctgctaggacattaacatcatgaatgctacgatcagaatagaaacaagagtgtctagccacagagtgggcaactttgttttctgaccgtttaacaaaacgaagactaacattaggtagagaggataaaagagttttacagtcacgagtaatcaaaccaaaaatagaagtcatatgttggtgactgaaaactgcttagacagtaagtaatgtatcagtttcgacctctaccgcattccaacccttgtctttgagccaacttagtgcttccttaactcccaaagcctcaacaacctctgcagagaaggacccatagaagtatttagccacaaaatcaatgacattaattaccttccgaatcacatgcaacaatgttgtacccttatgcattttcagtctcaaaagtaggactctaattagtttgttatataaagaata

SEQ ID NO: 71380 - DNA, 998 bp, Cannabis sativa
gatagttttgtatgtgatttttaagttaaactttattttgtatagtttcatgatttaatttgcgcattaagacccgacaaaatggtttcctagttattgtttattcttgtgtatatttacttgcttaaactgctggattcgcaaataagttaattgacgattaatttgcgcatgaagaaccgatatatatttatctcataatatagattccctcctaataatgctctttagttttttttatcacttttcacattcctctctccccttcctctagctacaaattgggaaaccaaagccactcgtaactccgatcaagtcgcttatttagctttaggatcaagttttatcgcccttaaaataataaaaatgtagaacttaaaacacaaagctatcatagctctcttaatatccattaagccctgtctaaccagtaaaaatattaatgtttgcgatctaaccaaatattattgagtcctatcaagctattttcaaattcaaatcttttcttacattgatcaagtctaattttttttattctacccaaaatatccttctgctttttccatgtctatatctcatttttagtatgcagtaataccatttttagaaaatgtatatttttataaagttagctaattttttcccaaagaaataataataattaataaataaaaaagctgttggttacagttagattaaaagcgcgcgaaaggtctcaagagacttatttaaacaaacccaactctgttctttctttctttctttctttctctatctaatctctctatgaatgttcaattgtctcccaacaaaaatagcttcaacaacttctcatgatctctttcttattatttctttaattctatataatcattgttttcctggaaagaaagaaaagaaaagaaaactaaggcaagaagaacaacaacatggatttcccaaacaaggttaatctacatttatatatttaatttttgttcttgggattaagtactaat

SEQ ID NO: 71381 - DNA, 1068 bp, Cannabis sativa
aacgcaggggtgagtttgtcactctcagtttgtcaatgagaaacttgaatcttgattgcgtaagtcctttagtcagacagtcggcaatttgttcgtgtgaaggaacatatctgatctcaacttttttctgcagtactttatctctaatgaaatgaatatccagctcaatatgctttgttcgagcatgatacacagggttttaggcaagtgcgcttgcactcatgttgtcgcaccatataacagggacagatggtggtgtaaatttcatctcttgtaacagagattcaagccaagcaatttcagccacttgagcaagagatttgtactccaattttgtgctcgatcgtgcaacaacgaattgcttctttgaagaccatgtaaccaatgcttccccaaagtaaacacagtagcctccaactgattttctgtcatccgggcaacatgcccaatcggcatcataataagcaatgataggcagtctgtcactatatttgatgtgtataccgtgatgcattgtactttttaagtacctcagtaccctcattgctgcactccagtgtacagatgttggacactttagaaattgactgagtttatttacaacaaaagcaatgtccggtcgagtgtgagtaagatattgcattgctccaattacacttcgatatgctaaggggtctgctagttcttcaccatcatgaatggacatcggtttcccacctgttatgggtgtcgggcttggcttgatgttggtcatctcaacacgtttgagtaaatcggcaacatactttccttaggataggtagatacctgtagcatcacgaaagacctcaatgccaagaaaataatgtggttctcctaagtccttgagtgcaaaagctgtgttgagtttggtgatgaacaacatcaattcctttgagtcattcccagtaattatgatatcatctacgtaaattaataccatgatcacatttttggatgtttgtagcatgaagaatgaagtgtctgctcgagaattgatgaacttccaactgagaagtgtgtttttgagttgaacctaccaggcccgag

SEQ ID NO: 71382 - DNA, 1086 bp, Cannabis sativa
gacaggggctgttctatccagttgaatctgaagttaaacttgaagcttataccaatgctaattgggcaacatgtgtaaatactagaaggtcaacaaccggtttttgtgtgtttcttggaaagtcattgatttcttggaagagtaagaaacaacacacaattttgagatcctcagctgaagctgattacagagcaatgtctaataccacttgtgaactagtttggttactttcattgctgcaagaaattaaagttgaacacaggaggcctgctgctctatattgtgatactaaagctgcacaacaaattgctgccaaccctgtgttccataaaagaaccaaacacattgagatagattgccatctagtgagagagaaggtccaagaagggatcataagaacagttcacacatctagcaaagaacaaattgcagatatttgtacaaaggctgtactgcctagccagtttcaaactctcaaaagtaaaataggaatatgtaatatctacactccaccttaagggagagtattacgatatgtaagatggagtgttagttgaaatcggttaggagttagttagaggtttgttatgtttgttgctagctgtcttgagtggtttggtttagtcctgaattgtataaaaccagattgtatttctttgttttcaattaatgaagaatcaatttctggtgttcatcttttctctcttcacctattagatctgaagattaagcaatggaaaaaccagttgcatgaatatagcttcaaagtctctaaacaattatagggtgagaaaaatgtcaaatgcaatggagcaattatcacagatttagtgaaagaaaaaagaagaagagaacacaaatacaagaattttactgaggttgaccgccaatctggagttatgacctcgttgagctagactcagaatatagttcaagtactccgctatacaagaatcaagttacacactactagaaaattgggttttagtgacacacattgagtaactttaaaagtgtatagtgacagttcaacgcgcgtcactaatgagggtgactggaaacacagtttttagtgacacttcacac

SEQ ID NO: 71383 - DNA, 736 bp, Cannabis sativa
gagagagaacctgagtgagtaatgcaagctgttcaacgccgaaagatctagcggcggagagggtttcaagagcaagatcaacggctgaggtacaatgcgtgtgccaacaacctctatcaccgcaattgggcctgggctcatgtttttgagggactatagagacttgtccactatacaaaaactgaagcaataacaaaaacacctcgtaaccaactgagttcacaggtatcacagccccgttactattactattcccacccacaaccctatgatggtggttgtggtggtggtggtggtgcccgtgacccgatccaccaccagaagatctagacccggatgagattattgggtcaaggcccaccgcggaaggaggagggtccggcccacaaaagaatttccggaagaaaagactccgtgcggccagaatacacctgtgtgcgtggactaatcgaccctcaacgctaaaggtgacgtcactgaaagcctgaccgttgattaatagattcaggtaatctaacgatagagatcttagcgagtcttctaagctgttcatgatctcttgatcaataatatatatatatatatagataaggttttataacagaaaaaaaaataaaaaataaaaggggttttgatgaggatcaggtgatgatgaatatgatcaagattaatgggttcatatttttttttttgggacttttttttggtttggaaaatttatgtgagatgaggaaga

SEQ ID NO: 71384 - DNA, 1628 bp, Cannabis sativa
atggatcatccaaaacacaacatgatagtcccaacaccactgattccttttccaccatcccaccagccatacatctacctattcaatccattacaccaaactcaccatctgcatctttttctccttcccctacccctgcacctgtgcctcccatgccctctcatccaatggtcactcgctccaaggctgacatatttaaaccccgtactttcctagcctccctccttcacaatccccatttactggccttctctctatccactccttcctctcctgaaatcgccttgaccattcctgtttggaagaaagccatggatgatgagtattttgctctcaaacgcaacaacacatggtaccttgtacctcgcctccctcacatgcatgttgtggataataaatggctttttcgccacaagttcaactcggatggttctcttcaacggtgcaaagcccgtctcgttgccaaaggcttccaacaacaaccgggtgtcgacttctttgacacattcagtccggtagtaaagccatccacaattcgggttatcttatcattggctgtcactcatggtagggatgtccaacaaattgatataaacaatgcttttctcaatggcacactagaagaggaggtgtacatgactcaacccattggttatgttgatccctcttttcctactgctgtttgcaagcttaatcgcgccatctacggcctcaaacaggcaccccgtgcctggttcgatactcttcgcaatgccctgctcaaacttggtctgcagaattcggtatccgacacttctctgttttttcttgcagaaggcgatgctcgtctctatgtcctagtctacgttgatgacattctcctcactggtaacaattccaacagagtacttaacatcatctcccaactcaacactcaattctatctcaaatcccttgggtctgtcacctatttccttggttttgagacaagtagggggcatgatggtatgcacttatctcaaaccaagtactcactggatctcttaaaaagaactcacatgctagaagcaaaaccgtgtcccactccaatgatccaaagcaacaaacttcatctacaagacagccctccatttgaagatatcactcaatataggagtgtcatcggagctctacaataccttacactaagcagacccgacatcgccttctcggtaaacaaattgagccaattcttgcaagctccaacacaaaatcattggctggcatgcaaacgtattctgagatacatctcagggacaatcggagagggtatacatttcaaacgaaccgctgatcccaccatcgaaagcttctgcgattctgattgggctagctctcttggacgatcgtaaatctacatcgggtatttgtgtttactttggtggaaatctaatcagttggagctcaagaaaacagaaatccgtagctcggtccagcaccgaagctgagtacaggtcattagcccaagcttgcgccgaagtcacatggttacagtctctattcaatgaaactggaattaaacacaattccactgctgtcatttggtgcgacaactctggtgctcgccaacttgcatccaaccccgtcttccactcaagaacaaagcacat

SEQ ID NO: 71385 - DNA, 1220 bp, Cannabis sativa
gggttcaccccattggaataaacaactgagaaattcttattcacttttgttttctctcttcatcttcttcttcttttcttcttacttattttatattattctatattattttataacagaacagatattttctcatcccaaataaactaataattttgttatggtggtaacccgatatttgaagggatttgttagattttttaaattatcactcccaaatgatcccattcgtgcaatatcaaaaaattccaaaaaaatagtgtgtctatgtgcagatagtagccaagctggaatgaatagtcacaaacaaagaaaagaattcacgtgggtatatataactgaattattccaatcattgatatatttttcaaattattattatactctgtacaactattcttgcaagagccaagagggacattcacgtaatgaatgtatagagtatatactactactactattcaatgattcaaaatctaaaagattcttaaattattttcatcaatgattattgtaaattatatagaataaacctcagtgaattcttatgggtatatagtttttgtaataactaactgcagtatcaaatcaaaaatgtatattttctcttataaatgagtagtttatctagccagtcacttcttttaacagtgtcatacatgtgccacctctaattatcttctgtcatatttcttaatgcatcattgataccaccctaaatgagaatccaacaacagcaatgaattgtataaaacaaatgaacgaacccattaatacagagtcaaattaagtttgtgaggcaggatacaataataccaaattatcacactcaattcacaaatctaatttgagactcaataaactatttaaatgtaaataatcaattttgcttgattcaattacatggttatagtaacaatgagtggaaagatttaaaactttgcaaatgtattttaaagtgctcaaattcataccaataacaacaaattgacatgctatctacattaactgaaatataatgcataacatggacttaccaatctataaaatagaatcacagtatatggtgggtgtggatttaagaaatggatgacaatatttgagaaacaacccaattattgaagtgaaatataaacaaactgtgtagaacaagtgaaacctattgtccttgttgtgaattccagataatttgcagtccagagatgttgaaacattgatga

SEQ ID NO: 71386 - DNA, 574 bp, Cannabis sativa
tgaaatcactctcctccttaaactctgtactgtcaagcattttagtcgtttgtctctgattaagaccctttcccaggtatggacttcccagtgtcgattccctgtagtggtctctgagcattcagagggtctttttcttgtcacctttggctgtgaaggtgacaaacgtaggattcttgatggccagccatggcattttgcccaaagtctgaccatttttgccgctcctgattcctcttttcctattactccggatcaattgcattacgtgcctttttggattcagatatatggtattccgtttaggtgtaaatcgtacgagttggccaaactcattgctactggggttggggatttaattcaagttgacagcactactgtcaaagatggaactggtccttacttgagggttaggtttctgctagatgttaataagccaattaggaggggtattcacataaggtttcttaagatgggtagagaattcattaagtggttggattttaagtatgagcgtttatcggatttctgtttttactgtggtaaacttgaccacactaagaaatactgtcat

SEQ ID NO: 71387 - DNA, 937 bp, Cannabis sativa
cttgataactctgagcaagacaaaaatgaattataggaagtgaagggatcccttgaaattgatgctcgctagagggtaaataaaatggctaatcgttcactttacatagcttgggttgtcaataggaatatggacctcattttccttggtgctaataccgagaagatgctagctcactttaaacaaattaaacaggaagatcaaggaggcactaaagatgaggagggagctgaaatagccgagggagaagaaggcagagtcccctctaggtctcccactatgtagacctagtttaatttttaattttgttgaacaatggctttttggctgagacaacatcttgccttttatggtattcttatttatgtgatatattttgtttcgttggatggccaacttagctctttacatttacaacatatgctgctttaatatatactttctctcaatctgttgataaaattttatccaagtttggattttcacaaattaattatggtccatcgcacataagtagacttaatttaatggttacataatgttttgtttgaattctatctcgggattccttactcgttatttcatcaagtaaaaagtgaacttaaatattttaaacaactaattacttgattatttttaaacattttgctcaattttgtgcaagtggttaatcgtcttattcacacttttaacttatatattacttatcaaaacttcagtgtagagtttcgtttataatatttactaagcatgtcatgcgagccgttatttacttggtcgcattagcttgatgatgtttgcaagatttttataatttcgtttttacaacaaatgctattgtcattcttgcttataataagatttcaatgttcgattttttgctattccggactagctttaactgaatattgtatcttttacaaaaataaataaatta

SEQ ID NO: 71388 - DNA, 1927 bp, Cannabis sativa
tcaactgaaaatatttttataatactattactttcttttgttaaaccttcccgccgtaagtaatggaattaatattgattataattaaatacatcaaaatcaaattaaataatagcaaaagagaatatgacaatccagttgaaatgaaaccaattaatatagtatgaagaactgagtactatcgtgttctcaattaggaagaaaatgccaatacccaccacttgtttggtcaaagagaaaatcacatggaaatgattaaaggactaactgatcatttccaatcctaaacaaattttaatgatttccccaaaaaaaaaaaaaaaacgctaaatttcaatacatattctaattttgtgtatattatatattcagttttttctcaaccaataaactactatacaccaagaaaataaataaataaataaatctttcactcaagaattttctatatataccttattagggtaactagttaccatcttagaataaacaattactttatttcctaaatctttttaataattttctaataaaatatttttttgaaaaaaaaaaaaactataatttggtaaacttatgcttaaaagcgataaaaataaaaaattctctaaaaataaaaattattaagctatttattttaaaaaaatatatatatatatatgaaattttttaaaaataactaaaaatcagaaatatgtatttttaaaaataaaatattttttgagccatatgctgggtagcccttagggataggtacgttttgccttagcttagacgacatgattttttttttttttaaatgaagtcatcatttattaaacgaatacgtctcttaccaagttcggtaacagctcaaccggaatagtgtctaaattgaaaagacgattagggtgagatataaagatccttgcaaaggaatgagctgctacatttgttgatcgtttcacaaaataaaaagaaacattacgcaaagtacttaatcaatttttgcaatcactaacaactgtgctaaacaaggaaagcataaccattaaaaaaattgtattttgaaggaaaatttataattttactgtcacgcgaaattttttataaaaatattgtctttttataaaatatccgtaaaacaacaaaaaagaaccattaaaataaaaatggaacaactaaaaaacaaccgtaaaacaatcgtgaacaacggtaaaaacttaacaaagtacaaagtataaaaacttacaaagtattttttttaaaaaaaaaaatctactttacattaaaaaaaaaaaaaaaaagagtaaaatagttaaaaatttaagtattgagtgtaaaaatacatttaattaatctgatatcaatcacatacattttatttatacaactgaacttactcaaactaaggatctaattttgtttaaaaactagtattgaaatttagttgattaaatttatccgtaagatcacggagatatgataccaaaagctattggtgtcaatggttgcaaaaaaaaaaaaaagaaaaaaaattgacagctacactattgtttagcagctttttacagtaacaaaacgacacaagtctaacaagaagacgacaaaactactttaagcttcttttttttcttttttaattagagagataagtaatactctatggtaagaaagagaatcaaagtcgacgtgctatttatggatactgataatattgtatatattcttctgtaattgcttaaagatgtttttttttattattcctaatttgtgtcaaaggactttcttttaatctttgtttgacattatttactacaagtgctgcacatacaaacagaagttaaaaatgcttgggcagaaaatatacaaaaaggagccacgttggttctccctttttctttttatgaacaattgattcagagctttaatttttacaataagactt

SEQ ID NO: 71389 - DNA, 1762 bp, Cannabis sativa
  modified_base (1570)..(1570): a, c, t, g, unknown or other
aacccttgtcctagttcgagtctaggtcaaaggtcgaggtctgaatctgtggatcagtcagattataagatacattccatgcttcgattatataaaatgtcgaattatgtaagaacatgtcataacttggcttgaattatgtttgaaccaacttatgtgaaatgtaatgaccgcttagttttattatgagaattagtagataatcagggcttattatcatgaatagattttaatttattatttttgcaattacagagatatatttaaattctaagtgtattaattatgttatatatgaaattttatgtttttcatattttatgtccggtaacaatataatgccacgtttggcctatagagtcacttagatatgatttagtattttagaattaacggggcaagatagttagatattcaaaatatcgagattactcgggattatgattttggactatttcaccctgagtgtgtagattactctttggtgattaagggtaaaagggtttttactttttcttatctttagtgtgaattagtggattatttggttaaacttttagttattatcttttaattaataagctaaaatgataatggttaagtctttttctcttaaacacaaaaaaatagaaatccaggcgtcctttctctttcttagcgttggccatagaagcaaccaaggaaccagagaacttcttttctaattctgagtaattcaaggagttttccgtaaaataaacttagtgttgtgatagcttaactcaaggtgaccttctcttcctcttttctctttgaactttctagtgaaaattagagtttcatgcatgttctttggtttaaggtactgttcgaattagagtttcataacatatcagtaagagcagtattagtgtacataaagtcatactaaataccgatagatatatatttggcaaagtaaggattgacactatcacatcggtacgactagagtactgactataggataatataggataatattatggtcaatcgtaatgtcatgtaaacgtgccaaatttaatacgcattggacgtgggatagggttgtgattgggtgcatgacacctagatataattcgatttatttatgtattattattatgctttttttactgagtctattgactcacaaatattatttacatatttaggtaaaggcaaaggaaaggctaaacaataatgagctcgagctaatgaagattgtacatatcgaggcggttagaccaagagtgtgacagtcactagtcctgtgatccataaggggaaatatcgggtaagctgtgtaatctcacaccgcctggggaaggtcaagtgtgatgattctaagactgtgtaggtatgggactatacagttgaagatgacttaaatagattgattggtactactcatatcaacaagctgcatcttatttttcggtagcccattacaaaagaactccacggttaagtgtgcttgacctagggtaattttagaatggttgacctactgggaagttttctcaagaagcgtgcgagtgaggacaaaacacgctggaaacactcgtgttgntctgtagggtcagtcgtcaatctaggaagcagctagagtggcatactcgtgtctaagagccatgattcttgagtgtaagggcctagtggaggtttgaagcggggacgttacaaatggtatcagaggcttgacccagccagaagtgtggtcgacgaggacgttggaccccgtaaggggggtgattgtgacagt

SEQ ID NO: 71390 - DNA, 810 bp, Cannabis sativa
gaaggtgtaccagaaactaggttacagctcttatcggaggtaagcggagttttctcacccggtgttctcacagctttggtagggtcaagtggggctggaaagactactttgatggacgtgctagctgggaggaaaactggtggatacatagaaggtgaaattaagatctctggctacccaaaagagcaaagcgcttttgcaagaatttcaggatatgttgagcaaaatgatatacactctcctcaagtgacagttgaagagtctctatggttttcttcatctcttcgccttccaaaggaagttagccaagagaaaagacatgtgagctgcaacctcatactaatattcatagatttatttgtggagtaatgtttttaattttgttttaatgctgtataattatgttgcattacaggagtttgttgaggaagtaatgagattagtagagcttgacacactaaggcatgctttggttggcctaccgggtagtacagggttgtcaacagagcaaagaaagcgtttaacaattgcagtggagcttgtggcaaatccttctattatttttatggatgaacctacatctggactagatgcacgagcagcagccattgtgatgaggactgtacgcaatactgttgatacgggaaggactgtagtctgtaccatacatcaaccaagcattgatatatttgaggcatttgatgaggttggttaactttcttagtagaatacaaaatgctattaagtttatttttttttttgttcagtgtctaactaattttgatgaacagcttcttcttatgaaacgag

SEQ ID NO: 71391 - DNA, 1239 bp, Cannabis sativa
ggcttaattgcaaaaagaaacttaaaaaaaattattatttatttcttgtattgggtttttcccacttccctagtctctcctccacgctacgctactgtgctccctcaacttcactccgacgagctccgtttctgctcagcttcacttcttcatcttcgtctcagctcaggtaaaaacagtgatgttttctatcatagaaattggtccaaaaatcatggttactgtatataatacttgttcacattttgttttgtgggttttggattgacagtgttaatggaggtcgagtctccactgagttacggaatggacccaagtgatgacgaaagagctgacctcagtatttctgagctcattggcgacctcaggacggcctttaggccctccgattttgacagggttgaggagatttttgtcattaaagaaaacaagatgatggaacaaattagggatttggagtctgacaaaatccgacttgaaattgaggtcaagaagttgaagacagagaatagtgagagtagagttttgagagagaattatgaaattatgagggaaagagtgaagatggctgaagagaaagctgaaaaaactgaaggaatgttggaacggttactgaaagacgcgaagaagaatgagagagaaaaattggatgagtttgatcagctcaaggagaagattaaggttttagagtctgagaaaactagagctgaggaagatgttcaagtgtggaagaaaagctttgtggaattggagaaaagagtaactttgttagaagctgaattacaaaatgttgtaaaaattgaatctttggttccaaatgtaaaagccatagattctactgagtctaacaaggcaaatggggagaagggtacaagtgaaaatgatcatcatcttccttcacctccaacttctccaatgaaccaagattttctaagtaagatctttgtttgcattgcttatttcttgcaatttacttatcatgcatgtgtttgtttgagttaaaggaaaatgctaaattgagtcataatgtgagtttgaaaggattaaatgttatggaaatgactatgtagtttgtactgataagtgtagtttgacattttcatgagcttccattaatgtccttagctgtggtaggtagggactaatttcaaagaaatccagtttggggtagcaaacatagttataattgttagatgaagtgggcactgcttcagttgggattgacattaagtcaaagaa

SEQ ID NO: 71392 - DNA, 869 bp, Cannabis sativa
aaaataaaatatgaatgttaatagacatgactaaccaatataacttgtgtagaacaaccatttgtgtgaatcaaaatagaataagcaaaaaaagtgagaggaaatccttggattatttgaaaaaaaaaaaaagacttctccaaatatatgtttatatataaggtactaatatatatattctataaatatatattgccatatacgtatatattctataaatatatgtatatgtatatatgtatatatgtatatagatatatgatcagatttgatttgatacacaatcaattacctttaattttctactcttttcaaatagatatagatatttatgtttgtgttccaaattgattggagtaatgctgtgactaactacaatacttgaggaaatgtgctaatatatagtttaataatgctaatgtttaattaaccttttttgttaaaaaaaacaaatggaaatatatacaaaatttgaaattttgcatgattttcaaaataaatatattaaaataccaaccaatcaattaaattaggttgatcgtataatttgtaatatgtaatactataccttaactaatttggactaaaccatttaaaatgagactaaatgaattcggtgtcaataatttagtcaatctgtgccatttataattctatggttctgtggttttgaaattcgcatgtggttcaaagttcaaaccaaaccaaattccttaatcttttctataaacttaatataatttttttattaaaaattaatatttaaaaacaatcttagcataatattaataataacttaatattactttaagaataactatttttgttgttatttattaattacgtcttataaactttaaaaagtaaaa

SEQ ID NO: 71393 - DNA, 949 bp, Cannabis sativa
tatttatttgaggcaatatttaataatgcccgcaaactgtttagtgaaatgtgtgagatacaagtgttgattgatgatgtggtgattgtttcattatcttttctcaatactactcaataaagatgtacatgtgagtgaatgtattttgtgcatataggaaaattgagaagcaaagggctgaaaccatatacttgcaagtgggacatcactcattcagctaatgagttgcgataggcttatgaaaatttagaaaatggtgaaaaagaatagtgagatagacaatgtatcaatagctagaaaaattgtggctcgccaagcatttggaaaacttgcatttctcactccaagagatgattcttaaggtattcttaattatgttttctgtccttacagtggtttttccatctattttttagatctatataaaaaaaaaattagttataagttccctaaaaatgagcggtttagcttttaaaagcatgtatcttttatggacacttaatttaaaatatataagttagttaccgaattgtcattggtatttctttaggggttgagttttccaaagtttgtgcacctctgtttctttcaggaggggacactttggagattctacagctcttcgaaaagatggctgagatctactactaaccaagttatttatcgttgcttgtagctcattatagtaaagacaatgaagctcattttagctcacgtgtacttgcttcgttgtattcctctatttgttcataattttatgtggaatatctggtttagttagtggaaagatttattttgtgtttcaatgtgcttcttttttgtcccctaaatgaattgaacttcgtaagtttaatcagagttatatttataggcatttttttagccaaagtgattgtttgaatgcataatgattgaagacattggaaatatagtattagcttgagttaaa

SEQ ID NO: 71394 - DNA, 1057 bp, Cannabis sativa
  modified_base (998)..(1030): a, c, t, g, unknown or other
ttccaagcaagaataagcccacctacaccgccaaccgcaggaacaataatattaaaataaaagtgcaagcttttcagagaacgtaccaaaaaagcgtgatcgtttttgagttcagaaatgaagataaaatcaggcgagcacgaccgaaccagggctttaacttccagaactgtagaggtctgccccgaccctctacagttccaagcaatgcctctcattgttcctgtggaggagggctttccacctcctccataggggtaacaatgtcaacaggagcacctacaacagagcccaaatcattaatgagaacatgattctttttcgggatagcaatatcagccagtctagccttcttcttccaggccgagagtctcttggattggtccgtagagactggtttatcaacattctgtgagcgtccagcagagagattattggtggacactggggtgctctcatcatccataaacggctcattcgattcaccaaatccatcgttctccccagacactaccggattgatgccgcttgggccaacaccacgagggaaatcccgaaccacacttttcactcttctcatggtccatttcggtacaattttcaacaaatgattatcaacgtctagccgtctcttcttaactagggtggttctttcattagtctctgaagatggtggaacaccaatgtcacaatgacccgcttttctcttaattggtccctgtgaagcgaaagcagccagttcttgaagataacctttttgagcttgaaatttttttgatagggacctcttctcatcaagatgatcagaatgatcttggcctagaatagacagtttcgaatcactttcaccatctgagtttatcacactatttttatctctaatattgatgtcattcggcccactgcctcccatatcattgttattctcagaaaaaatctgagtgttaatgttggtaagatcaattctcagcccacttggtgttggaatttattttacnnnnnnnnnnnnnnnnnnnnnnnnnnnnnnnnnttaacaacctaaatatgaacttttaaa

SEQ ID NO: 71395 - DNA, 1116 bp, Cannabis sativa
tctgaataaaatttggtatttcgtgctatggtttgtgccttgtggtggtattttcatattcagagtgagaaattcttctcatgtttatgttcttcaattatttttaatgttgccaattgccatatattatcaaggtttaggtaggatccccttctaaacaaagtgaaaaaaagaattcaactttttgaatgaaaatgaatcatttcatttaatcaaatatcatctaagaataatgtcctttgaaacaacaatctgactaagaataatgccattcaaattgtaaagtatgatgtaatgagtgaggacgatgtctgtcctctgaattacaatctgaataagaataattttacttgaattgtaagtatgatgtaattctacttggctatgaacctttattatttctaactctaatgttaataataaagcctcgaataatatgaagctctgaaccttaattattattgctcgagagaattttcctctttccaggtttcactttcaagtggcgtcggtggagtttgattacacccaattacatggaactagattatgcgttctatccatattgatataatatatgaagtttgaaaaacagtattttatcattgtaaatcacacgtagtacagtagtactagatcgatcactacaaaatatctagtgtttctacagttaccttcatttcttgggtactcctttcaattgctaacaaataaatcgtatatttttcatcctttcatcttgtcgaaataatggaaccactaaattgaaaagttgccactataatctagtttggatttcagataaataaactaaatcgtatattccaaattttgaaaatgatgaactaagacttgagagattaaatttatggcgattataaagggtttataactaagacaaaaataactgaaaatttatttagtatataaaagaagaagaacatatctaaataaatattggctaattaagatttctttctcacttacacatgtatcaatttatttagtattaaaattttctggacattaaaatttattccatttctctttaattttattttattaacctaacgtgatagttgtttatgtattaaaatactttttaaattttgacat

SEQ ID NO: 71396 - DNA, 1521 bp, Cannabis sativa
ctatctatcaggtcttaggtttcgatttgggtttgggtataggtttcggtcctggtacaggtttatgtctcaggtcccaagtcaaggtctgggtccatgtctcagttcgggtttcggtccgagtttgggttcgggtttggttcctgttctagtcccaggtctgggtcctggtcgcagtacaggtccaattctagttttgatttcaattctaggtttggctttgtgttcgggttcgggtcgacgtccgactccttgtctgagtttgggtctcggttcaggtttgatctcggtaagggtccgagttcaggtccgggtcccaaatccaaacaccgactactggtcgggtccatgcctcgagtccatatcccgatcgtagtcttgggtccttgtcttgttctagttcaggccccgggtccctcaccgagtcttaggtctgggtttggtgttacgtctagggtcccaagtcaaggatcaagtctcaagtcccggtctagggtcaggtcctgggtcccgttccttgtttcgaggtctaggtccccatctatgtttaaatcctaggtcctagtttagtccaggttcggattcagggcccatgtcccgaatttgggtcccccatctaggtccggatcctaggtcccgatttttgtccaggtttgggttcaggttcagatcccgagtccgggtctgagtccaggtcccggtcagagttcaagtccgagtctgggtccgagtcttagtctgggtccctatcaagctttatgtcctgcttcgggtttgggtttgggtctcgggtcccacatctcggttcgagtctaggtcctggtctgacttcaggtttgagcttgggtcctatttcgaacccaggtcctggtcccaagtacgggttcgatttcaggttcgggttttgtccttgtataggtttgggtttgggcccaagttgtggtcccggttgcattcttgggtcccagtctagtttcagtttaggttccaattttgggtccatggccctggtctgggttcgggtctaggtccgggtcctggtctggatccgggtccgggttcgggtcatactcttaggggccatttggtatgcaggtttcatttcatgggaataggtttaacatttcttggagagtgatgaagggaattataaatctaggaaagcaacattaccgtgtttcgttgacattgcaatggaatgtgacaagccttgcatttcagatctagaaaccgactacgggtcgtgaccaagccatgcctcccggatcccgggtccagatctaaatcccagtttaggtctcgggtcccgacctaggtctaagtttgcgcccgctttgactcttgggtcccaggtcccgatcctaaattccgagaccctagtctcagtccaagttttggggcccaattctcgggttcgagtccaacatccaagtttgggttagggtctaggtcccagtccaaattatggtctaggtctaggtctaggtctcgactcacagatccgggtctcggttcctagtc

SEQ ID NO: 71397 - DNA, 910 bp, Cannabis sativa
tcagatggagttgtacgaaggtagaacagaccccaaggcccacatgtctaaatacatctgattgatgcaagtagtgaaggcaagtgatgatgtaaaatgtctcttttttcattaaatttatcaaaatatgtcgaagattagtggaacagattatctcctagatccatttgtaactggaaagatctgcaaatgatgttcaaaaatagtttaaagtcgtaaaagattatgacatggaggtaaccttgttgaccaatataaaacaaaaattgggagaaagtctaaaaaattatatccaaatgatgatggacgaaatagccaaaacaaaggtcaacgatgaaatgaagttggtggccttaattttagaaatatgtaccagatccctgttttatggggagatttgtaaataaaaagatctgatactttgttagatttctactccagaactcaaggcttcataaatttggaaaaagcttatgttcatgcttatgaagtacctctagaattattaacaactgtcagtagttcaactctgactctctaatttcctgctctaactaattctcctccaattgtgtattcttgactcaacagtgtacagacccaatgtcttaggaaaaacttccacacaaactagttacattggctttggggttgcacaaacttgatgtagtgttgcctcaagacaaatgagtcaacaaacgggtgttctagaatcaaatgtgagtcatttcaggaacaaaagaagtactaagaatctgagttaggctaaagctccaaagaaggggaggactcatgaactaagatattttgagtatactagctttgtggatacttggaaaaatgtttatagagaaacttacaacatggtccattgaaagaagccactgcttatgtacaaaggtggaaggca

SEQ ID NO: 71398 - DNA, 2149 bp, Cannabis sativa
tctgagggataccggatagagcttggttcctgactttcacgtctttgggtacttggtgaagatttttctcttatttttcctagtccatgaggcatggcttttggatgcacgtaaatgcctaccgtctctatatccttttgatggcgaccattatctcttgcattttcctattttcctatttcagtgctgctagttcagcttcgtgatcagctgcttttttcctcagggacaataactcaatgtaactgccatcatcataggcgtcatattcttcttgattttcttcgtactgtatgcatcattgtttcttcttttcttctacctccacgtctactcgtgaagttgcttcctcttcccccagttctctgagatcttggggggacgaggttggcgtctatgatttctagtctccaccattgtactctgaatcttcttatacagctctcaatgaaagcaccaaaatgtagaccgagatttttggcaactaaatcattaatgcactaagagtgatttaaagagagtaaatacaagtatttttatgtagttggggcattaatgagccttagtccacgagcctctgatatttaatatgcaagtatctcttacagagaatgttctgctcttttttttaataatatactagagtgaagaaattccaaactaactcaccctaaatcctcaataaacaacaaataataaactatacataaagtaaacataaaaaacaaaaaggttaaaattataaaattttaataaacaaataaattgcaacaaaatataatccaaacataaattatataaatataaaacagaaaaagaacaagatctcaccaaaataaaccaacaaacaaatcactaatagtcctataaaatataacaataataataaaaaagaaatgcaaccaaacaatttaataaataatcaacataaattacacacaaaaatagataaaatcacaatttgttaaaaaaattagtaatatatataagaatctagatttaaaaataaataaaaattattgaaataattcaaaaaaaaacaactataacttagataaaaaaaataaaccaaaaatataacacacgaaataatagaataaaaaaatatttatatgaataattataacattaaaagaaaaaaaaaagatgctgaaagaaaaaaaaaatcaacataatatatatatatatacaataacacaaaactatattcttcttatctcattttttcttcgcaatcacacatttactcattcctaaactcaaagccttggaaccaccagagacacacattgataaatcatttttagctctaccacaatcagagagaggcaaaggagaatgatagatagacgagcgaaggattcccattttagctaatgaactaatatgatcagaatgagaagataaccaaaccctaaccccgatatttgcttaacacatgtaaaaagatttaaaatgaaaataaaaaagaaaatgaaaaattgaagaaaggaaagatacaaatatattagtaagagagtcttacgtgattgacttgttgtaggcttctcatgctaacatcacgcgcgcgcaaatagagaagagattcaacaaaaaaatgggccggtaatgtatgcaaaaaaaattccaaactaaaaaaacgttaaaaaaaaaaaaaagaaacagcactaaaacaacaacaatgcataaacaaaacttactcacaaaaacaagattatttttgtaaataatattcaaatttaggtgctacatgataatttcttattataaaatttaatataattttttggtttaattatcactaaataaaatacaaacactttgtttgtaaaatataatattcattttccaaattacaataagaaaaatagagatattattctaagaatttgcaaagaaagagattggttttgtacctttattgggcggttggatgacaacgacgactactaggggtgttgatggaaatggtggcagcgaagacggaagtttgacggtggtagcgaaaacggaagtttgacggtgacagtagcaacaagagtcaacggtagcaacaaaaataggagtttacattacatttaagtagttactaagagcacttccaacaacttttccactctatcctttaaaatatctcattaaaatttta

SEQ ID NO: 71399 - DNA, 1575 bp, Cannabis sativa
aaaggttctaataacataatactattaatacacttacacattcacctgttcatgatcattatcaatcaaaattaataatatggataatttttaaaaagaaaaagaaaaaaaaaacattgaacctataaatctaaggataactaaaaaaaaattagcaaaatataaaattagaaagagaaaggtactggctataaaaaaaaaattgaggaataataatataaaaagattaataatgaacttttgtattgttagagggttgagagaaatattaaaaagaaaaagaaataaaaataaataatgaacatataaatctaaggacaactaaaaagaattagcaaaaagtataaaattagaaaaagaaaggtgattataaaaaaatttgaggagtaataatatacaaagattaataatagacttgtttattgttagagggttgagagaaacatcaaatgaaaagtaattaggtttaggattttgtagtttaggaaatttaaataaataattaagtagatatttatattaataaattaaaatttaatatgcatttaagaaaagagaaaaaaaaattatattaggtacatttaataaataaaaatttaatggagatttcaaatgagaaaaaactaatattacgtactttattttttttatatataattgtatataaatattgattttttaatttgtatatgacttaattaattaatgaatatttatttatcaaactaataaaaaaattaacaaaattagagaattaaggagagaataaataagactaattagagagattttagagcgtcatgtcaccgcttcatacttctccttaatatatatagattttcaaaaaataactattaacgtcaagttgtccatgagctattccctgtctgggataaataatcgggattcgaatccattggccgaggttaccagctttaattaacgtctatatctcttctttgaggtagttgcattcgttggtgatgtctctcacatatactcacattcttactttggtcattttcttgcattcttccttataacattcttagaggcttccgataatggaccatattacatgtttccttataaacattctcctgagtatagatcaaactagtgtacttggcgtatttgtgttcatattctttctttccttttttagtagcctcgttttggttctgactctttccacccctcttgttcctgaagtggctcacatttgattctggaacctccatcttttgtgtcgactatctaggagcgatactacatctgggttaggccgctctaaacccagagaaattagtctacgcaggggcattcccagagacattgagtccgtagactgtaggagttgtaaactgggttcccgaatgcatgacgaacagaacgtaaacttatggagtgtaagtgggtgttgcatctggtggcgttggtacaagagtgactccaaaagcttgcatataagcatcttctaaatcgatgtgctaggaatatattaccaggatccagatttactaacaagtatgttgaattaatatcctaagtatgaatatctctaaaacaatgaaa

SEQ ID NO: 71400 - DNA, 1043 bp, Cannabis sativa
tttagaggttattcttatttatgactggcccaaattgggactagatttttttataacaaattagaggttattcttaagtagagtattcctaaatagaggttttactgtattaacatatttagtcaatctgagagttggtttttatagattaaaaaaataattagacctcatggtcttttttttgagatttaagcgtttatatattacaatcatacataactcaagactcgaacccaggacctccaacacacacgcaccctcctatggccacttgagctacctcaagtggttaattagacctcatggtcaataaagtaatatttactactattactagtatagaggtagcctcatagtaccatgagtgatgcatacaggatggggaattcgcagggagcattctcccgtcttctcattctcattaaagattttaatcttcatctcccacttattcttcattgggaataagacggaaaatcttttaataaaaaataaagtttacaataaaaatttaaatatataaaattattaaactatataaaaactaaaatattacacattaattattattcaataaattaattattatccaaaacataacttaaaattcataaagaaagatattaatgtactaaaaaaaatataaacataaattataaattataaattattattagaaatattaaataaaatactaaacgggtctccatcggggcggggatgggaatcatttaacattcgagaagaaaaggtaacatctgccctcgtctcgtttctcatttaaacaggaaattcccgccccattaggagctcatccccagtaggaaatgtgcatctctaccgctgacactattagtcaaagcccacctagctacgttatgtatatttcaagtcaaaattactaaatacatccgagttaattacttgcatcatcaacaacttcatcgttagcaatttaatttaacgacaaattcattttttttaataagggaattattccatatactattttttctaataagttttatcaaaaaaaaaaaaaa

SEQ ID NO: 71401 - DNA, 694 bp, Cannabis sativa
aatttattatctaatgattttttttaattgcataagtatttaatgctaataaaagtataatttttttctagttatattaattagactaagattctatgtttttgagttgagatgaaaataggtagtatgaatattgtctaaattttctgttaataaagtcaaaattgagtgtattaagaaattgaatgaaaattatacttttaatcttttgtaaatattaaatacttatattaaaaaaataataagtagatttatgtcaacacaaattttttaatatttgtactgtaatttagacaaattttccattgtaaaagtaaaaccatctataccatcgttcacttcacttgcatgttttttttctctattaattactttacactaagagcatctctcatggttaattgttttggaggatgcttattatgtggattgtttatttagtaaaatacaaaaatgttatactattagagataaatagatgctatcataaaaaattgtattaatctcactacatagtattgatattatttttttttaaaaaaaaaataaaaattaaaagtaaattaatagagtgataatatttataattaaaataaataataatgtgtgaaattataattatcatattatttttatataataaaaatatttttaaaattaaaagtgtcataaataatatgaaaaaaaaaaaaaa

SEQ ID NO: 71402 - DNA, 881 bp, Cannabis sativa
gtgttaatgatagaagtcaattatggagactaagtgatgaagaacacataaagatgtcaaggagaatttgatgatacataggtcatcaaaaaattatacaatttactagtataaataattttgaattaagattcattataaatagtgtctaatttattagagatttttactagaaattatatgaaatttgttaaattagctgcatattgttgagtttaggaaggaattagttgttgagttttgaattcaagcaaattaaaagagataatttatcataaaaaaagaaagaaagaaaaagagataaaataatgtatcaaacgtatccattttttgtgttaaaaacataaaataaaagtaaatagatcagatgttttgttttacttttttatttaaaaaactatatatatatatataaaaaaaaacaatatcatttgtttcctttcaaagatgcaagtttttagttaaattagtagattctagttatgatttgtttaattcttgtcattatatataatagattatttcaaaattttctattaatatgtgttgtatatatgtcaattttaataaatcatttattaccgagatcattattctggaatgtgagaattagagcgattgttttttttttttggatggacttggattggaaagaggagagtcgtgcactgtggtctatgatgagagtgtttccttggatagggatttgtttctcaagaagaatatactattagatattactttacccccaatttattagaaatgtgaatcatattaatgtgtgtacatattataaaccttaaattttatttaatttaattaattgaaccatttgttgtacttaaattttatgaatctaatataaaaattaataatattat

SEQ ID NO: 71403 - DNA, 617 bp, Cannabis sativa
taatttaaatatataaataatcaaaatatatgtatatttatatgaaagaaaaaaactaaaaatcaaatttaaaataattttaagaaaatggctattaccaaaatgccaaagctgtataaaagccataaaacttctatgacaacggttattacataataatcgttgtcataaggctcaataacagcagttattaattaaataatattcattcgttgccatagacttatgatgtcggttatttagtaataattgttaccataggattcctatatagctatggttgctaacctcattaacaactcctaaaacggctgtaccaaactggccctttagcaaccaacggcaacacagatgcaaattttttcagaaccacctcaaaaggctttaaaaatagtgcagtaagataattataaaagttaacatataaatttttaaattgaaaaattaataaataaattcgtataagaaaacagaaactaaacatcagtattattaattgtagtcacaatttcattaattattagttacaatagggctaacaataataagtttcatacatatttagaaaaagatgacttattaaatacaaaaggatatatctttttcaatgcttccat

SEQ ID NO: 71404 - DNA, 1211 bp, Cannabis sativa
tttatttattttaatgaaaatattaatcttactgttagtactgaaaggagggctttttccaaaatataatttacttatatagttaaattagacctagcaatatttttataagacatctcaatattttatatatatttaattattattgttataattttagaaagaaggcatatcaatatgttaggttccttggtcattttatcctattcatgtagatctatacctataaaaaaagaagagtaattctagatacttatttataacacacaaagtatgtaataataaatattagtcatgagatcgtatcactttaattataataattaaaattaagattaattacatataattgtgtgtaaaaaatgtataaattttagtgtatcccaatcatttctcataaaaaaaactactaaaatacattttaaaaaaattgttcttttatattattttttgtttacgatgaaaaactaacatatatttaaaattaaaaccaataaagcaaagttctacatttatttaaacatgctagctagtaaaaagaaaatacattaataataatggcggttatttttgtcctataaggcatttttacgtgtgactttatggggtttgtctcttgtatttttctcaacggctcttgagttttgcttttcttgttaattggtgtggtttaccgtttgcgtggtcttgtttctttggtaagatttgtgcaattttatttctgcgtgacctagtaaggcgttgttcttttttttttaacctgaatgaatcattttttcaaaaaaaaaaaaagtaataagaaataactatttatttagtaattagttgtcttttcaaaaaaaaaaaatgttcataattatatatagtaattatgttttattatataaaaaatacaatatatatatatttttgacgcgaatacaatatatatttagatagtagtgattacaaaaaagaaataatttgtctctggtatagtttctccaaatgaaaaaagttttcgaaagttttttcatcttccttgaaagttagttgtctcctggaagagcttttccagaaaactaacttgtctattcggaagaagtctcctggaatgatagttatcgtctggaaagatattcatggatgtctatcatatccacctggaacgagtcttctccggatgactagctttttccctcatggaagagagtctcggatagtcaactcca

SEQ ID NO: 71405 - DNA, 816 bp, Cannabis sativa
tactatacagtattactagggtgggtagtaattacactgcatagtaattacagagttgtttccaaacagacccttagaattgaaaccttttcaccagtggcaatggaacttagatcagattttttacttcaaatatgcttctccaaatgaaacttgggctgtcaattaaagtgttattattttttatttaagtaaatatttatttttcataatgcatgatctttatatctttatcatttaaaattattgtcattattgtatctcaacagttgttatcatcgtatctcatttatagtcattatcattgttattatcgtgtcttacttatagtcatgcataatcgttgtcatcaccgtatcttacttatactcatcatcgttatcatcgctgtatctctcacttatagtcattagaagaaaaagttatgatataaaattaaaatcttaacataagaaattataaaataggttttgtatattaaaattgaaaattaaattatatattgaaatttatgttttaaatatatttttaaaattaaaaattcaaaattttatctccctttctattttatttttattttcaactctattattttgtaaagtttttttgtttttcattttctgttcattctaaagtcaaaaaattaagtacgttttttttcaactctattattgctattggactctagtgtctagcaccttttatagatggcgttttacgattggttactaatattccttaaaagttatttccttaagatatatgagactctatacttaattatagagcattgttattgggcatcagtagtgccta

SEQ ID NO: 71406 - DNA, 1019 bp, Cannabis sativa
gtacaaacaagacaaggctaaagtgtataagagttcaagcgaggccttttccattatatcaatttgaacaattccaacagttttaaaacttaagttatgtattaaaactttctgaaaaggattccaggtgagtctttttcccttttgggaattttggctggaaacgcttttactttctaagtctgcattcatctaaccttaagaaggaattcaagcgtacttttcctttggaggaattcggttgaaaacatatcttatttcaagttttgaatgtaaatcacaaaaccatgcatatttaaaattaaggtaattattcatagcacaatgtacattttttaggggcacacattgctaggcatagtaccccccaagtgagctgaaaagtttggatgtctccaacttcctggtcacttgtttaaaacataacttgtggcctttaaaaaataaaaatatataatgtgaaatcaaatgtaaactatttctatttcatgtcattatacctgtaggttgtatctgaagaaggtaattacttcaatattcgcacaaagcttacgggattttatcaaggtttggtcacctttgcctattggtagtaccaacgtaagtggtctacattcaaggcgtgagggaccctgatccatccattctcttaacctgaaaagttccctggccgaatttcttaaaaaatataactataactaggtttttgtgacattccaattagtaacatttgtcataaatgttacaataatagtaatttaatgacatttggtcaaaatgtcactttaatgagaatatataacattttaatttgtggcatttttaaaaaatgttactataaggatattttgccacatttgagcagaaatatcaataatttgtaatatttaattttaatatcatataaaaaatgttactaaaatatatcagtaatgacgtttgtaaaaaatgacacaaaatattaaatttagtgacattttgaaagtgtataaaaaataataattacgtctttagtttat

SEQ ID NO: 71407 - DNA, 1943 bp, Cannabis sativa
taatatattgaaatcggatcggattgaattcgattcgaaaaaagattaggtggggcggaatggagctgattcaaaattcaataagtatctaaatgttttaaattagaagtgattcgtcgaatcgaagatcttatctgctctaactaaataattttttttgacatccctactccatagttgaacccaaaaaatgaaaactcataaaatcctaccttattggggcatactaaattaaagataaaataaataaataaaatatcttgtcaagtaaaaatatcgaaaatgtaaaaaatatctttcacataaataaatatcttccatatgatgtcttttagcctcttgcacaaattttacttgcatcgcaagctgaagagtaaagcagaagtgttgcacacacccctagaaagtaatttttttattattaagtagtgcaaacattaaaagagaaatttcacattggtataattttgaaaagagacaacaaccaaagaaatatggaaaaagaaaagaaaaaagagatggaaatatgcataaagatttcacgtgagagagagagggtattattttgtgggcctatttccagtacagtgagccgttggatataattggtacagctggagcctggcatggccttgactggtttaaaattaaaatctccattctcaaacttctttagctttcaattttctttttcttttcttttctttggcttttgcggataacatttaaagcggccttccttacagactgtcaatttggtgtgactgaaccacactttgataattgtattgattggatgatttcttctgtcagttgagttgcagtagcagtgggtatatttatagatcgatcattaatcatgaataatgatgcaacaaggcttaagatgattaccatatttcatcacattttcagggcctatataataataacatataggtagtgcactttactatagtgctctataattttacgtggggtcctcacagcttcatttcttatgtctatttttctttagaattagagagtagttgaagttcatccaaaaatctacagagaaatttgactaggatgtataaaaagcaaaccaaaacacaaactttgtaacacacgagatataaccaaactttgaaagtgtacgtttcagtaaagattttactatgaaatttaagccactaattagcgaaacattaatattagttagaaaaaactactgcatcattatgtgcaatattttaaatcattacttaatttcgtataataataagagtagtattacttttgttgacccttttattttggattccctttaaggcttttagtagtttgagctgcattgttcgttattttataattggacagtgacttatgtctactttactctgtatcccaatattgcattttacatgtgagttctaaaatactactaattaaatagactagagcttttctttatgggttcatattttacttttattttatcgtaatatagagaaaaataaagtagaattacaacaaagtatacaaaaattaattaaaaaaataaaatagtagagatctgtagatgtaaacaaaagtatatattggtggtagagtagagtacacgcataatgacgttaacatgtcttatcgatcatgatgcctttagtacttacagtctctcttctaaagttattattttctattatggcttctattattgttttggtatgtgtattgggggaacattatctactcacctctgtgactatccaatcaaatacttacacgtagcatgtgattgtaggatgcggacttgggtccttgtagttggtgcgtatctaagggtttagcatggtagaagtggtagaagagggagcacgtgaaaattgagatatgggtttatggaggtgacggctgttttgttgaaaattggaagcataatgccaaaaaggaaagggaaa

SEQ ID NO: 71408 - DNA, 1563 bp, Cannabis sativa
  modified_base (37)..(42): a, c, t, g, unknown or other
gtcacatttagtcacaaaaattatgttgtgactaaannnnnntcactaaaagtagcagtttttggtagtgatggaagcttcttgaaggttttcaaaggcttaaccacctccgcaagtgaaaatatatatttattttttacaatttatttattactatttaattgtaaatatagaaccaaaaggaatatttataaccattctcgcagaatgtcgttgagtgactagtctaaccttaggcatatataaagttataatttagatctagggaatggactgaattcactttctgagcagccacatacttgagatacaaaccaccttattgtcttctgtgaagctttagtaaatattggcacagaacaagttgattagttttatagtcaactatcattggagataacattaagataaaacttataaagatcgatctatatgaaggaatctcattgttgtaatcatcactcaaacacatttcttgagaatataattttagtgtcttgaagtattgatataataattaaacagcaagtagattagcatgttactataaaacttaggtgtgataatcttttactttattaaatcaatttccaatttgacgacccatatagtttgactctagtccacttatctaaaaacttttttaattaattgatgaaaaattatgttaatatatatataaatatatatttattgttctttgttcatggttcattttcacgtacatattaacatagcttgagaaagaaaaataaatctacaaacatatttttttggatggaaagcacatgttttgttagcacacatgtaattatatttattatttttattgatttttcgggtagcgagtggtattgctgcaagtcaagattcgatgggagaggagctagaaatgagtattggactactagcaggaacaacaatcatttccctcacattgatttggggttttgttgttgcttttggcagccgcgacctttcacactccccaattagttcatcatcacttccacttcaacactactaccactcaaaacctttcacattaacgggtaataataatatatgaaatattgtaatatgcacgtactttttgcaagttatatataatggtcttgattcatttaaattaatgcatgtatgtatatatttatacaggttatggtataactactgatattgagacgaatgtgactgcaaggctcattctagtttcactcattccatatatcattctccagctgtcaaaagttcacaattcatatttttggacacgaatcatcattttctttctctcattatttctgttatattcctcgcactttactgcatctatcaggtaatctaatattctacacactacacgctacacgctacacgctacacgcatatatacatatacttatatatatatcatatttgtatatatattattttagttaatactacttttatctcatattttataaaaataaaattgtcactagacaagaatacaatgaattatgtggttcttcaaccttgttgttccaccacattagttaaactagcggaatagtcttc

SEQ ID NO: 71409 - DNA, 835 bp, Cannabis sativa
  modified_base (782)..(783): a, c, t, g, unknown or other
ttcatagtgtatatatgtttgattaattccgtacttaatacttaaacatatacatttcagtttatatatataaatgtctaacattattgtctaattttttggaagtaattttgtcccatgtagatcgcgataagaattctgcagcccaattgtgaattgttgtgtgattttaatcaccacataaaaaaaatttgaattgaaaattttgaaaattttaaattttcaacaactatgttattacccaaatcaaatagggattaacaacattgaatagactaggtcttgtcactataactgcatgtattcacaaaaaaaaatgagttgaaatagattagtattatttaattattactttctatagtaaaacattgaaacgactaagtcttgtcactaaatcaagttaagttttccaataatttagaaataccaatccaattaggtaaaactaaaaaaacgtttattgctttattaagctaatattaatattctttagaagaataaataaataaagaaataaggttgttaaagttaaaccttttacatcaattaaaatcattcattgaatattattttttttttctttttgttttttatttttgtttttattatatcctaatataaaaattcttcaaaataagatataaacttaaaacattttatttatttatttttcataattccaaggactaaatgcaaatgcactaccttcctcatgcttgctagactgaatttttatttatttattcatttaattttgaacaaaatataataataataataannataataataataataatatctttaagcgaaataatatcccaaacaatatcta

SEQ ID NO: 71410 - DNA, 2521 bp, Cannabis sativa
attagggttttgctaatccattcaaaattccagggtgttacactttctactacattgcgctcaactttctcaaccttaatagattttgccttgaagcctttctcaatcttcccagaggaagttttttgaaatttggaaggcctgtgactctcagcttttggagattcgagtttgaaagaaggtttatttgctaactttccattttgtatatctttgcttgtttcttttatgacaatgttcttccatatctcaatcaggtcggttgcaagagtttgtattctcttcctaggatgtttggtgagaggtcgaagatgcattctaacctgaaagagagcatgtaaataatcaaatccaacatcccaactttaaattgaaagaagttaaatcagagatactgtgataagcacaaatatgattctgtgacatgtaacattagatgagcattaaaaaagtcattgaacacgaataaataaataattaaacaatataacatatttgtttaatgttcaacagtataaaaggtgaagcaacatccagggtaaaaatcatttgctaatagaaatgacttgtttgtcccgaatactaaataactttctcatgaaatatcagaaataaattaatgtaattcaaaaaaaaaaattcttaagaagaacaactgcctaattatgcaccttttcccttaaagatctgattattttttcttttcttattgtgacattttgtgattaatcaaacttggctgaaacttctgcactcaacgacttaaattgcaaatttcaattggaaagtagcgattgaaaacccaaatcgttctttatgcctttccttcaattgcttttttacctccatccgcgattggaatctaaattagaaaatagcgactaaaaccaaatgaagaatactttgtaaatatcaaactaagtcctttctcagaggactatccaaacaagcttcattagaataagaaaaaaaaagactttttttatttcttttttaattttccatcggtaatttaagcaaaaaattccattgagtaataataataataatttagaagaagaagaaacctgtaaagaaatgaggccttctttttctagagctttaacctgagagccgatattgtcatagacctagagaaataaaatgggaatcctagcaccccatttgtcctgaatcgtcataccacatttgatggtgatgagaccaggccgcctagaatttgggatcatgatgttggcattggcttcaataatacgagtggcttaatgggcatccatcaatgaatcagattggaatttaggtgtggagaaaaggcttacagtcgattgggggtgggagtggggtgggagtgagatattggttaggcttagggcttttgaaactaatcgtaaagttatagaaggattacaaatggatggtataataataagttaacggcgttagtgataacgttaacaaaaattaaaaaaacaccattaagccaagaattgttgttagatagccactttttatatataaagatatatttattaattattattatacacatatatatatatttctctttttttttgactcggtcaaaccgagtctttacattctcccttcctaaaagaaatttcatcccaaaattttaaagtacaacctcaagttgaaaattaaacatgtgaggatacttcatataaatcttagactctgactcccaagtagcctcgtcgtctttgtgatttttccataagaccctgacacttttagctcttttgctaagattttgataggttgttcttcataagtcacatcttgaagagggatagcctcatactcaatgacatgtgacaaatttggggtatacttcctcaacatagacatatgtaacatattatgaacatgggccaaccacgctggtaagtttaatcggtaagtgacctccccaatcctctcgataacctcgaaaggtccaacatacctcggggctagcttacccttcactccaaatcttgtaacgccatgcctaggagtaaccttcaagaagacataatcaccaacattaaactcaacttcccgtcgatggagatcggcatagcttttctgatgactccgaactgtcttaggtctttcttagattcccttaatctttttagtggtactagtgataatctggtgtctaatagtgacatgctcatctggttctacccaacacaatggcaatctgcatggtctcccatataaggcctcataaggagccatgtctatacttgcttggtagctattcttgtatgtgaattccatctgtgacaagtgttatcttcaaccacctccaaaatccaaaacacaagagtgaagcatgtcttcaaaaatctgtaaggtcctatcagactgtccatttatctatggatgatcggcaatactcaagtgaagtccaatttctaaggcttgttgcaaggccttttaagaccttgatgtaaatcgaggatctctatcaaaaacaatacttgaaggcattccatgtagtcgaactata

SEQ ID NO: 71411 - DNA, 735 bp, Cannabis sativa
aaaaaaaaaacattctttgaacgtaaaaatagtgtcaaaggggccttttccttttttttttttttttttcaattagtgtacgtggatgcagaggggcttgctgtaaaactatcttcactttgtacatatattaaaaaattagtatttttgaggtaaaaataattaatgtttaaaaaatgtaacattttaaatgtataacttttaaattttttaagaaaacataactaattgactaaagcatgacatctaaatgcctaacttttttatttgttttatagcaaaaatatccaaaatgctaaaattaatgttgtacttttactataattttaaaaaagttaaaaaaattcaaaaaaaaaaaatacaaaaaaaaaaaaaaaccctgaactaacactaaaattaaggaaatatttgtttaatagatataatatttttgattaaaaaggtttaaatgaaaaccaatagctaaaaatattcaaaaagaataaaataattattaaaaaaaatattcacttgttattttcattaaatatatctactctttaatatcaaaattaatttatactattatatatatttttataacttaaaatatattttttattaattttggttaatgatatcagtaagaaaagtacattttacactttgggtactttttgcaaaaaaaaaaaaatatgcaaatgctatgtttaattaattgtgagtacacattccattaaataataataataataa

SEQ ID NO: 71412 - DNA, 1108 bp, Cannabis sativa
cgaaattttattatcaacaaataagttgtccttgtcaacttcttttaatgcttttccaatatcttgaaatgttttcaggtgtgtctcttgtcacaaattcgccatcaaaatcttgtcactttagaaggattttgctatgaatcaaagcagcaaatacttgtttatgagtatctgcccggtggatcattggctgaccatctttatggtatgttaatgtgaatccattaaagcaatttcattgatctattttctgatatgagttgcagggcatccgttattaacacatatcaagttcatttcaggtccaaaaagccgaaaagtttcgctgagctgggttcgcagactgaaaatcgcagttgatgctgctaaaggttcctttcttttccataactataatttgaatttctgaaagaacaaagatctcatatgaagaaaaaaaattacatttcttttgaaggacttgactatttgcacaatgggagtgaaccaagaattatacaccgtgatgtgaagtgtagtaacattcttttggatgtggagatgaatgctaaggtttgtgattttggcctctctaagcaagtgactcaggcagatgcaagtcatgtcaccactgttgtcaaaggcactgctggctatcttgatccagagtaagattttttctcaagtttgtatactctgaaataatgatatgaaaataagaatggaatataaaaaaataggagaatgaaaatcaaatttaaaatgtataaaaatggtcatccttctatttcaaaatggaatagtcattctaccaaaataataaaaagtaataatttaaaatgcaaccaaataaaagaattgaataaaatttatttcatttccattttgttttattttattacttccaaacaaacaccacctatcagtaactaattgatgtagaaaatatataccattgatatattgagatttaagaaataatgtagattgacaatataatactaacttactgaatcttcctacaaaatcttaattggatcgtgtctcccatcaaagactttaattaattaaaaaaatttacacttctgcttcaattaaatttcattcacacagatactaagtttattaa

SEQ ID NO: 71413 - DNA, 1585 bp, Cannabis sativa
gttgccactaaaaataaatttttttgcttagcgtgcttacaatgatgcgctacctgttgctactgttttgtttagaagaaaaatcatcacggatgcttcttgcaccatctgccaccaagcatgggaatctattggccatgcttttttcggttgcaaatatgcaagagcaatttggcgacactcaaaccgtgttcttgattggtctaattcgtccacaatgtgcaagggtgactatttagttcatttgtctacagtatacacacaagctaaaatggaacaactatttttcaccctttggtcaatctggtcggagaggaaccaggtggtacatgggcacaaggcaaaacctgccaaggagcttgcactttttgcaaaaaactatctgcataattttcgcccagcacaagcaaaatccaaatacaacaatggcacttcagcacgaccattctctttggcagctactaaaccagtcccatggacaccaccaatgcttagaaacctaaaattaaatgttgatgtagcagtctattcagtaaaaaaagtaattggtgtgggggctgttattcgtgacacctttggcagtgtataagatgccctttcaaaactggttgttggtaattttgcggctcacgaaatagaggtcgtggcgatgtttcatagtttaaattgggcacttcaactcaatttgccaattactcaagtggaaacggatgctcttcgtgtctccaatgctttatgcaaatctacatcttaattatcttccttccaagatttaatttcagatatttcttgtcttcttttcttttccctaatgtgaatgtaactcatgtcgaacgaacaactaatatggctacctatggattggcaaaatttactttaggggtggatgaagcttggttttggtcggttgtattcctccgcctataaactttgttgttgtaaatgacttatcatcttaatttataacaaaaattttattctaaaaaaatcacaacaaaataaatggggatagaaatctagtagtatcatcttttaatatgaagagtgctaacgtcaactttctattacaactatttagttaatcttcttactcaaaaatatatgtctaagtatttttttttttattttttttatggcggtgttcgttatagttacaacactatttttataaatttttataatatttgtagtgttaaaaatatattataagtattttgaacacgcgtggtatactgaaacgtcaaaaattttattttcggtactgtaaattgttcaaaatttttaaaaaatttacgagataatactatgactataagaaaaattaaaaataatattcaattatataatttcaaatataaaaattgactattttttttttatttaagcgtttatatattacaaaagactcgaacccaggacctccaacactcacacatccacctatggccacttgaactagcctcaagtggttatataaaaattgacttataggtgccgtttggtaatacttttgttttttaattttttaatcacaaaatggaagtaaaacttttgtttttaaaaaaattatttttgaaaaataaaa

SEQ ID NO: 71414 - DNA, 5072 bp, Cannabis sativa
catcccccttcccctttaaccttccagtgatactctgatttgggagcacaccaaatctagggtttactccgttaaatctggttaccacgttagtctctcttcaacctccccacctgatatcccttcttcttcagccccttcgccttggtgaaaaatctctggcatcttaatatcccgcctaaggtaaaacacttcgcttttcgtgtctccaactctacccttccaactcttagaaataaattttgccttttggaaaatagcgcactctcctacctgtgattggtgtggaacccatgttgagtctgtttctcatgctctattcttctgcaagagtgttcgaagtgtctggaaaggtacgatattttatgattatattttttctgctcctcccactattatttttcatgatattgctcataccatatatgttaatttgacaaaggaggatgtagaatcctttctatgtgttgtttggctcatttggaataacaggaacagggctctcagaagacaacctcagaaccagactcatgctatagtgaatcttgcgaattgttttttggcggaatacaaatcagcagcttcaactcaaaaccctcagatttatgcgagcagaaccccctcggccacttcttggacacctccagatcccagtcgcttaaaactgaatgtggacgctgcagttccaaaggattcatcaaaggttggctttggaggagtcattcaaaacagtgatggtttagtggtagcagcagtggcgtcatcttatgcagggggaggggacgtttctactctggaagctaaatctcttctcctctctctgcgttggtgcatcgaagagagctttcccattcaacgtgtggaaacggattgtaaagctatctcggatgctctttcgcaccctagagaagatctttcgtcctttggcgacctaattaatcaaattagggcaactttgtctctcatccctgaggcctatgtctcacatgtaaactggacagcaaatactttcgcacacaaactagcaacctgggctaaagggttagatgaagtagcaatttagattggtgataacccttgtaatcttaaggatttcctctctacatccctctcaaaaaaaaaaaaatgaatgaaaattgataaattatttatgatggaaaagtttaaagtatttttctactgtcgtataaaatattaattaagtagctttaaacattgaaatattaagtgaaatctctgcagatcattagcagcttcaaataggatgaatttgaaagtaattgtataattatcaattaggtactataattacatttataaagcatattaattacatgatattttaaagtataatgtatttggatatatgtggtaattacttataaatttttaactttttttaataaaataattaataattacacatcaaattaataatttttagtacaaaaataattttttttaatattaatattcaatagatgtaattgagtctctttattatctttaattatactataattagatgattaaaaaaacacgtaaaactatataattatctttaattatattataagtcaattttaattctatcttaactttccatacacactcttaaaaaaaattgaatttgtaattgattggaaatattttagaacgaattcgtctaacctacaataaactaaaatatggtgatgatgcaataaacgtgctaacaaggataacaggaacgagtacgttattgatgttattacgtggtgccacaaacataatatattcatactcttacctcatttaatgtcactaattttgaattaataatgttataaaacaccatcactagagttgacataatataaatatttgaattatttaaagttgtgtgcaaagtattgtaatttaaattattgacacaattaaatttaagcagtactccttattaattaagattaagataaagtattaaactagacaaacttatttatttattttgttcataaaaaaagaagaagcctattttttaaaataagtcaaattttattaatttgtatatatatatatacatattttacatagtgatcaaaattatatattaatgatacggcggcatttgtatatatatatatatttttaatttgtatattatgaattatttaacattaaaaaaactgcgagtaatcttatcatactaccatttatactaaataccattttcaattgcaaattaatgtacctgatatgccttcacatatatgtatttattttaaattaatttacgatagtttaatattcaattgtaaataaatatctaaatttaatttttagcattaataatacatacctatgttaaataaattacaacatggcaattcataattggtccatgttattaagtttttagtttttttaaaaaattagtttaaatataccaataaaaaaatgatatgtagataataatttgatatttaacggtcaggtacttacgaagttctaaaaatatatcttaagtattattagtgtcgaaaattaaacttaagtatttatttacaattgagaattaaagctaagtatttatatcgcaaattatcctttattttaatgtatattctttttccaagcttttaatttgacttgttctttccaagctttttaaataataaaataaaaaaaaaatatttaagtttcttaaagaattacaattgtgacgctgttacttgtgactaaaatattatatttagatacaagttgtaattaatttagttttaatcacaacaagtattgtgattaaagatacacttagtcacaacaaattgtaatttttgtgactaatatctttagccacaaactttttagtgacaacatatgaatgatgatttataattattcacaagttttattgtaactaaaagtagcatttttgtaatgaaaaaaaaaaatcgaaaaaaaaaataaaagtaagttttattgtattatttggagaaataatgttgttaaagtgactgtgactgatgaatccactcagtttgtgcactgttttgttagaatggttggtctcaataaagagttctatgtcacttttgtctatggttcaaattctctagaagaaattaaggaagagacttttggactggtttggcccatctcaatcctagtaaaccttggattataatgggaaatttcaatgtggttttcgaatttggtgatagaagtaggggtaatcgaataaccaaagcagagataaaggatgcttccaattgaagtgctttggggttggctgacccattgcacaaaacaggttctttcttcacatggtccaataaccaaggtgctcatgacagcattttttctaggattgatcatgtgttaaagaatgaagaatggcttgatttattccctaactcttctgctaatatgagttggaaaattgtttcggatcactgctcttgtgtagtgtcttcggcctcagtttagaacatagggactaaaccattcatattttttaatctctggagtgagcataaagactataatcgggtagttttggagagttggaggaaggagattagaagtattggcttgaaagcgatctacttgaaatgcatgagactaaaatgcctgagatctttcaataaaaaaaaaccatgggagatgtggaggttaattttgagcaggctaaaaaaaattaccttgaagctaggctggctactcaagctaatccaagagatatggcttttattgagcaagaaattaatgcagcaaaaagattcactgacagtgagaagttgttataaagtttccttgtttagaaaagtaaaaccaattggttaaggaaaggggacgacaacaatgctttcttatatgcttgtatcaagaaaaaaagggaagaaaatagaatctcaagctacttgaatgataactggatcttggtaaaagactatgctaatgtggttaagcacttttaaaaccattttaaaagctatatgggcagctcaaacactactgtgggtacttgggattttcataagttggaaggaagcactctcactcttgatatgcagatctcttcgttgaagccttttactaaaagagagatcaaaaaagctctttttagtatcccaaatactaaaagccctggtctggatggctttagttctgggtttctcaaatctatttggcatgagatcaaggatgaattctgctcagctatcctcaattttttttattctgggttgatccctccagaattcaatgaaacaactataaccttgattcatgagattgaaaatccatcaagagccattgactttcgaccgattgcctgctgttccacgatctacaaatgtatttcaaaactgatctgcttacgactggttgctgttcttcccttcatagtgaaccaaaaatcaaggcgcctttgtgcagaacagaaaaattgttcataacatacttatttttcaagacttgataaaaaaactatggaaggaagattgtctctccttggtgtgccataaaaattgatttgagtaaggtgcgtgacacggttaattgggagttcttagaagcttggttgaatcacctttgttttccatcttggtttgtgaagtggattatgcattgtctaaatggaactacctataacttactactgaatgggagacttcaaggaagatttgagggcaagaaagggctcaggcaaggagatccgatgtctcctcttctttttgtcctagtgatcgatggagttccttaccagaagattaaaccaagaggctcaaaaaggcacatttaggtatcaccccctttgcaagagtcttaagcttattaatcttagctttgctaatgagttaattatattcagtaaaaggacagttactgttgttaaccatctcaaagtagcattagacagcttctgcttagctacagggctcactgtgaatctgtctaaatctcgaatattttttggtggtgtctaggctaagaaaaaaaaaaaagaaaattgctcttgttgtggggcttgaagaggggcagtttcctctcaaatatctggaaattccaatgagaccaactaaatg

SEQ ID NO: 71415 - DNA, 1201 bp, Cannabis sativa
aaaaaaaaaaaaaaaaaaaccttcggcctgccgtaggctccacccgggggcccataatcgccgaccaagggcttatccttcgcatagttcaaccgcccaaacctcatttttgggtgctgttccccaccattaaaatgataataggcattctgattaaaaaaaaaagttatataataggaagtttgtaccttcttttttgttggtatcctcctaccatgtagaattactatgttacccccaatataattttgtttcaagatttttcatattgttgtaaatacacttttttatttgaaaagaaaacataaatacactgcatatatacaaaaattatttcaaggactaaataagagttgttaatgtattacacaagcagttgcctaattaattatggtgagttgttacattaacaaaatttgggatagtgtggtattttatagccatcatctcatgttaccataagttgctaaacttcgattatattagttttacttgtttgataatgtaggcataccaaacatttaagtcatagattagtttctaaaattatttttcattgcaatttatgtagttaatcaattcctctccatcgatcgaatttatagcgtttaattcctatttaattaatatgaacccactttaattcaataataaaaaataatgggaacattataggatgaggattgcaatgggctccagtagaacttatctctggacaatgattgaacatttagttaagattttacatataacaataacatcttgcatatcctcatctaaacaatatagggtgtttctgtcattctataaagattaagttagaacgtccaatcatacagtattataatacttttttttttgaaaggaaagacagtatattataatactaaaaaaaatataataattattattatatagtgctatatgtagacacctttatgtcacacatgataattatataattcaaaatatatatgattgcatacaacactaaggcccaaaacaacctgctgctagtataggtcaatattatactcttccattttaccagtaatcaaacttttctttagggagcagtattcaaatttcatatgccatcttaagtctttaaaataaattcataaaataatcagaaaaataaaagaagcagcagctatgtatcagaattgaagaatatttggttgttttggttccaaagaat

SEQ ID NO: 71416 - DNA, 1981 bp, Cannabis sativa
attacagcaagagaaaggagaactaagttccccaaaccaactctttatctagtcataatgcatctctagctatatattataggctagattattgtcatttctagaaatatggatacagagatatattaaaaaaagttgataaagattcaatgatcttagaaataagaccagagataatcaaacgatcctttcattcatgcttgatcttcagtgcaagttgaagacaatctgtctctatatgagtgagaggaattctaatagttgagcaccactggagcgcatgaaggagagcttgtgcttcagcaaacaaaggagaggagcttccaaccttaggagcagagaaacctactacgatatggccctctcgatttttgacaactgcacctaaacctgtacagtgattatgaacatctagagcagcatctacattcagtataaaagcacctggatgcagttgaggggggactggtggaattctagctaaagtgtttctattggtggacactgtccatgtccttactttggaagtgctactggattaaagagattgagcatccttgtattcctacaaaatattttttacaagatcttctatatttgtacaagggttagttttattgctgaaaagggaagcatttctttgtgaccatatatatcgtccaactaacgccaaggaacagactaaattcatccttactaaagaatcaaagcccctaagaagatatttcttaattgcagtataaaaatggtaaaatgaagtttctttccacacaaatttaattttggaaaaacctattagggcatgagaaacagtctcctctttgcttctacagaaggagcaatttgggctatcaagaatatactctcctcaacaaattgaaagcacacgacaaaacatgattaaaagccttccaaatgaagtgcttgatcttaggaggatttcgatagtccaaactgacttccaccaaggctttaaacagtcatgcacataagactataagaggaaggggaacctgaaacgataacagaaaacagagctatcaaggtgatatgcaaataatttttttaaggaatatatattaattcaagcccaaaaaaataaataaatacatacatttaaattttacccttcggaaaataataaaatatacacatttaatattaacttacttcatggaatgtgaactaatatatataactacaatctttaggcaagtaattacatatagacaactaaaataatattttctacaacatatgaaatttggtgatgaaataatcattgaaaattaaaaaaaaaaaaaattagctaaattttcaaaaagagatatattaattgcttataatatatcgataataaaaaaaataaatggtccactattacacattatttttacattaaacaattaagttttataattttagaacaacaaataatagaaatatgtgaaagaaagagtattggtggaaattacatagccaagatgaatcaaaataagagagtgactatatgaaatagaacgagaaaaaactcaaaaaaatttcaatgatttatgaatttcgaaaaatcatcaaaaaatagttttaataattttttaactaaataattacattaaattaataataatattaaacggagtcaaaaaaattaattaaaaatcataaattaaattttaaccatgctggaataaaaatcatttaaaaatgacgtcaaagtgcagtgtgcacgtgcccccattcgctgttgccgagagtgggattcgttggggaggggtcatcttctacttcgagccagttctgaagcggatcacgcgacctggtttctaccaggcgggctggaacaaaattcaagcgattaaacgcgtgaaactgacggggaaaaaaagggtttggatcgggattggatttctaatcaatctatagttttaattttaggtataaatggcgaaaaaggtttgatttgattgtgttcaatccaaaa

SEQ ID NO: 71417 - DNA, 876 bp, Cannabis sativa
tcgggaagcacgatgttgggatacaaactccttgctaaattgtttgcacaaagttattgacactgggccaatctcttgaaccatttgtatgccgcaccctatagcgtcaccgcaaagcccttacacgttgccttgctcgtgactctcttcattttcataatttcaatgaaagcatccaggtggtactttggatcagtgatacttttgtacagtgatatgttaggcactttgaaatagaggggtagctattcgaactagatttctcttgaaaagggcaactcatcatcatcccagctaccctcctctgatgcagttgtggctatccttcggtagagattttccatctctttatcaagctcttatctcctcttgttcaacttttcttgcaggtcttgtggagtgcgtctcggacctcctttgtggtgatgcatggacaacatcggtgctctcttcttaatagttttttttgttgagtttctccctcaagtctcctaggactactttcaaatcggccttctttttttgtgaagatggattcatgtttctctaggatttttccttgacggtgatgcctctggtgtgttactagtcgagtattttgacagtccttcatcctctacttgcccttacctctctcggtgaccctaggctccctgtgtttgaataaaggtgcatccgcttgcccctttaagagtttatccaacaccttttacatattttccaccgtctcttccaatcgtaagttatccatcttcagctcgttaatttcttcattgtgcacgcgggtgcgagagttggatgtgacaaagtagactcatttttccttccatacccttggacgtgtagtcctgggatctttctgttgggttttatgcc

SEQ ID NO: 71418 - DNA, 1513 bp, Cannabis sativa
atcaccattggcgctgaacgatttcggtgccctgaagttctcttccagccctccatgatcggaatggaagctgctggtattcatgaaaccacatacaactctatcatgaagtgtgatgtggatattaggaaggacctctatggcaacatcgtccttagtggtggttcaaccatgttccctggcattgctgatcgaatgagcaaggagattactgctttggctccaagcagcatgaagattaaagttgttgctccaccagaaagaaagtacagtgtttggattggaggttctattttggcatccctaagtactttccaacaggtaattaatgtgtcatcacaaagatgtatataataaaaaatttgacatgtgtattgaaaagttatctatactaatatttgttgattttttgagtgtagatgtggattgcaaaggcagaatatgatgagtctggaccgtcaattgttcacaggaaatgcttctaatcatgaaaatcaaaagttggattaaaactaacactactacacacattttgtattacagagataaatgcttttaattaagtggctatatatagcctctttgtctattttattttaattttttcattcatgtttcctacttttattttgaacaatctttcattttttattttttttcttcacatgtgaaaaagttgtgtattgtatggtattcatatggtataattgcaaattcttttttttttttttttttaacatacttgtatcttaattctaagtgtgttttattgcatgttaaaaatttaagcattatttttaattactcatttagtttaatttgaataaaaattatttattttattgctagcattataatgcccaaatctttaaaagacataaaatattgtgattggtgtaattttagacttgtaattaaagagcaagtctttcatgctttaaattatctaagtaatagatctatgcgaagagcaattactttgtttattttttaaaatataatataaatatcaaataaaattataaagtgaaacaaaaaatcaaatttgtaaatagttcaagaaatatcattattttgtgtaggttccatacaatgtgcatcacgaaaattaattattattttatataaatatttagtatttttaattttgcttagtttcaagtcctcaaaattaatacatttttagtttatatgggaattgcataatataaatcattatcttttaagaagaacttaaaaactttcaataaaacagaaaatacagagtttgggtacaaagtaatcaggccaaaacagaaggtaaagaaccatttcatgtacactcattgtctaatcctaactttgccttcgcatgatggtgggctagcttattgctatctctcggtacatgaactctaagcaagttgggattgaacaacaatgagttcttaatacaattaacaacatcactaagaacagaattattacaataaaagttgtttattttatccaccacacttttgcaatctgaagc

SEQ ID NO: 71419 - DNA, 1318 bp, Cannabis sativa
taattaagacattttatgaaaaagacaagcatagttgagttgtcgatcatttcttaatgccgtgtacaattagcaaatataatatattaattaatttttatttctcactactatttattaatttattataaaattacattaatttcctttaataaaaaatatatattacattaatttgacttggaaattataagctaaagatatacccatattcaaacattaattattagacataaattatgaaaaagtcagagatttattttccaatatatattcaaggatatccatttaataaaatgtttatttagcttattactatactgtttatgctaatatatatatatctctttacaaaaattatttgactataaatatatattaattattattatataattatagagtagtagattaagtcaaattgcgtgctttcgatattttatttaaatatttaattatattatatataaatatgtgccttctatatagtatcgttaacttttcgaaatattttaaaaatatatttaaaatttattgaatttgaatataaaaaaattttatttttaatattgtaaattattcaaaaaaaatttcaaaatttataataattatattgtaaattgtatataaaaaattataattagcactttttttttttttttaacattatctattattattaataattattaaaaaaaattactcaattcaaaatgaggtaggttaaggagatttttaattttcctttttgaaggttaggttaacacggattaatatatctttggtattttatctaattttattagataacccaaaaataaaaaaaaaagtctttatttaaaaaaattattattatttttatttttatttatttaaacggtgtgccatgacgactattgttccatatttcatcacaaaataagtcaattaaatactatggtttttttttttaatttttaataaaataaattaaaggataaataacatttaaaactctttgttttgtaaaagttattaagactatctattttgttgactttttttgtcaaaataaaacataataatgattcgatcaaaatgtgttattacaaaactaattatattttatgtatctgttcgtattaggaattatcttaaagtttgttatatggtaaaaaaattattaaaaattaagttcaaaatcttatttttacagtttaaaaaatacagaatttattttattattataataaatataaaatataaaagagtaatttgcattataaatatttaaatttaactcttagttgtaagttgtaaataaataactgtaataata

SEQ ID NO: 71420 - DNA, 1333 bp, Cannabis sativa
ctctctctctctctctcaatttgtcactctaacttttctctttattgtgttatgtctatcttattctttctcttactcttctctcttattcttctctctttactcttctctcttgtaaaatgagatgattagtcctttttatatagaccaaaagactcgagatacttattatcatatttgacagttaaattagttaatgaacaactaactaattaaccgaatttgattggggatttaaagaatgatacctcacactttaatacaattttcttatggatttggttttattattacctcttgagtattctgaaaattgagttcaagatacttattgtcagttgttaaaccttcgagccataccaccattgaaacacagaaagatttaagtgaagaaacaaagatgaacaaagatgaacaaaggtaagaaccagagagaaagaacagagaaatgtaggagatgaaagaaagatctcgttgatatcaataatagcatagctatttatacaacagatcaatcaaggaaatatctaagacagttagacaaataacagattgcaacagaaagtaataaccgaattgacagactgtaactaactgatgcaaccgaatgagctggcaaccaactgtaatctaactgtcattaggatcctcattagtccttaacaaagtggatttgcagtgtggttcagctactaagacaaatttgtgcacatgtcttgttgacatgtctaggcacttaatagtacgttgcatctagttagtttcctgttatgtttcctagttcgagtactatatatagaagcctatcaccactattgatttttgtactgaacttaaaagtttgatatatgagagagttggagggagtgttaaagagtgtattgtgtatttcactaatgcctctctctcatgtgagctaaattataacggtacgtgttaggctaatggatcttgtctcgaattgtaaaatctctttggagattcaataaagaaaccaaccattgttgatgaaggttgttttatcatattaatctctcactctcttcttattttgattttagcttggtcattctaattctcttgactgcattgattgaattgttttcttggtatagtatcctgcaccacaaaaattatatattcgagtagtaatttggtctctcattattggagaacattgtcccagatagattaaatgtaaaagtattgagccatatataagaacatgagatactccactcataaccaattggttttgagatggaaccccatgattcccatcatggtatcagagtcatatccttagtgcatgggctttcgatccacacctatc

SEQ ID NO: 71421 - DNA, 1201 bp, Cannabis sativa
tttctgatcttttattaattagtaaatctgattatattgtaatgagttttatttaaggcacaaaacccaacaataagaacttcccaaatttaacagtaacatatgacacatgtgaattaggaaaccaattatacaaagaaaccagattaaccctacaaaatggggttgaatgagtagccaaaatatccttcctttcctatagataatcatcccttccagttaagactctacccatcacaatttgatatgggttaaactttttcctataggttgaatttttcacagacttgactttaaggacctggggaatagtagaaggaccaaatgggatatgagtgccccttacaaaagcactaatacagtctggattcccctcatctaaaactgacctatctaggttggaatggaactatcaaatcaaaatgggatgaggagccaataggttgtacacaatatgaacccatttcctagtctttaagaatgcatgaaactcgggaaagtcatctaaaataactatgtgttcataaagcagacctatctaggttggcatggaactatcgaatcaaaatgggacgaggagccaacaggttggacacagtatgaacccatttcctagtctttaagaatgcatgaaactcaagaaagtcatttaaaataactatgtattcaaataacaactcacgaactccaaaccaacgttgataaacagaagcctttgcggcatagacaaaacattgaatagtagatggatcaatagtggaaactggtcttttaggcacataaatgtttttggcctttttaagagagcgttgataagtgggattaacaagaattttcttttagggacagtggccttttcgaaaggagaagaaactttttcttttccttttgatttaacaaaaactttagatggaggatgaggtggtcctataggttgtgattttggacagttgggtggagaagttgagggaactgggtttggtgaggatgtaggttatacatgtggcaccaatttttttggaagaacgggtgacacgttttgacatattggatgacccataaatataattagaatgagaatcatttttagatagagggggagccttaccttgaaaagtacgaggcttttgatcgacttgaggtggtggaggagacgatggcaatggaactgataatggctgatatggaacaatggccaaac

SEQ ID NO: 71422 - DNA, 689 bp, Cannabis sativa
tttttttgtctacaaatcactcttacaagattttgtgggaagcacatcaaatcaaataagattatggaaaaaaaataatttatttagttatttttacgaactattttaccaaacaatctctctcacaaaatgcccactaataagaattgattaaaataaattttctaatgatataaagcaacctaaatataaatttgtttatacgtataaaagtttgtgttattaatgaggggtcaccaagtgttcaaattgtcatacaattgccgaataaaataacatattaaatgaagaaaaataaaagggaaggctatctattaggtaaccaaccaatcacagcaaatgataataatcacagcacgactttctctctctctaggcgtaagaagcttttaaaacaaatattaaatattaggaacttttataagctaactttcatagactgtcaattttgtattaacctcaaataaacaaaacaatttaagttcatttattgcctatttcaaaaagaaaattgttaaagatattattagtatctaatattatactgctattagtgtaattaaatattaaattttatataagtttaaaaaaatattactaactaattgtaaaatactcgacacttttttcagaaacaacaatgttatattcatattttgattacgtagagagagaaagtaattcttgtt

SEQ ID NO: 71423 - DNA, 774 bp, Cannabis sativa
ctcacttgttcgaaggaaaattataactgattccacatggtccatctgcaaacaagcttgggaaacaataggacgcgctctatttagctgtaaatacgctaaagcagtctggagatctcttaactacagtttcgattggcatgcatgtacttcaatgagaaatggtgattacttgatccatctttcatcggtttataataaagcagaaattgagcaactcttttgtacactttgggcgatttggactgaacgaaacaaagttgtccatggtaagaaagcaagaccagccaaagatctagccgtatatgctactatttttctgcagaattatagtgtagctctacaaaaaaacaaaaactgctgctgctacttctgtaattgtgcacccaaactagacttcccaagtgacatctgctctcattccttggtctaaaccaccagttggagcttttaagctcaatattgatgcgacagtcaaggcctctacatacactacttgtgtgggagctgttctttgggattctaatggacatgtaatggctggtctttcaatgccaatcattggaaactttaagtctcatgagatagaagctaaatctctcttccacagtctcagttgggctatccaacagcaattgtttttcattatgcaaattgagacagacgcactaatggtggccaatgctttgaaagctccgttcaggtcaaactcagaattctcatatttaattatcgatgttgttagtcttttatcttttttccctaatgtaaatg

SEQ ID NO: 71424 - DNA, 607 bp, Cannabis sativa
aaaaaataaataaaggaaaatgtagagaagatgcatgtcattttccagttcatgagtagtaaagtactctatgcatgtcattgaccccacttatttgcttctctcttaatttctgtcattttcattgtactatttctttttttataatcctacaagtactataagtttttgagtgtttgggtttatttggtcccttccttgcttctgttttccgtgatcatgtttttcaatttaacaacttaattaaagtctttgttttatatttataagttaccaagtgaatatgttattactagtatatttatgagaaatgttaaagactttattaccaccaaatgtatggtattgtgttttttttttcttttctaaaaaatgtatatggtattgttatttattagtgtaatttataaatatttgatcccatataatataatttaatttaatatttattatagaatgtcattaattattagcaaaaccatttgcttcaaactagtgttaagcaccactaatacttaatacaaataaaccaacttcaatataatattcaacactttaaggtattaaataatactaataatttagaataatataagttttacaatgg

SEQ ID NO: 71425 - DNA, 1859 bp, Cannabis sativa
tacgtactcagatgaaagaccctggtgcgattgcaaattggtcagtaacccatgttgattggtctgaaggcaagtggcatcctagagcttatagggctcaagatatttcttttgagctcctcaagaacattacggtatatatctcaccaaattctaaatcttctttttttcttcttaacaaaaatgttattaattaccaaatatataattttaataagttaacctaaatattaatttcaaatactaaacactactatatctctaatacacttaaaaaaatctataatatatgccatttttttcactaaaaaaaattatatatatatattctcacattaatttcaagagcatgaaattgaaattgattttattactaataattttacttctattatgtaatcttttaatattaaattatttatatgtgtatcttttttagagaatttatgtctatatttagctctaatcttgtgttttaaaaacaattgttatcataattttataaaattaaatctcccaaaaaaaatattttatgataaaataatacatattcattaaaatgaaagtactgtcgaacagaatttaaatttcaaaaaattatacactataattaaaggttaaaaaagaattatggactaatgagcattttttttgtcaaatgctaatgagcaacaatgagcatgttattaattaatgtgtgactttgatcatgttattaatttattttaaggacattattggtgcttaaatagaaagtagtttataaaatggaaagaaaagagtttaaattttctttttttttaatcaatgaatatatatgagtaaatattatttcggactctatttaacaaaataaaaaatttaattggtaacttttacaaaatatagatccaaaataatatttaacctctatatatatatatatgtctacatttattgattggctatcatacattttcaattggctgaggagagtggacctcacttaatgtttaataaaataatatatttttatttttatctttgtaaaattataatttttatgttttatttcacatatttttatatttattttataaaaaaaaatatttttatttttatatatttatttatgtcccaataaaatttatatttttcttatctataaaaaaatatataatttttattaatagatcatgcttgtagagaagaaatatttttaccccccctaacattcacattcaacatattcgttatgatacttattaaataatagtcatataattttctaatggagaacacataattacgtctaattttgagtgtgttttaatcattattcttattattaattttttttttctctccaaaatttataagtctattgatgagagcactcatgtcacaagcgacagccaggtacaaaatcgacctcataccattattttcagcaaaattaatagaagaaagagttttagaagaaaccttcatttgtttatgttcaattatatgagaattttttattaatattaatatcatctatttatatatatatggtgcagaggacaataatgacaagaccttgcttgtggaatgggttgcagagaccctgttatttgtttgccagaaagttttaccctgaaactcttgataaactaattaaccttttctccaattatgctggtgcctagattcaatttctttcttcttcttcttcttcaaatttttacccaccaattcttttgacaattaagatatatgctatttctgttggagtggttacatttgttcttattctttcaatgtttattaaattagattttttatttgtttgaaggtttaatccattacaagatttattaatacgaatatatatatat

SEQ ID NO: 71426 - DNA, 1167 bp, Cannabis sativa
ccaaaaagttttccaccacgaactttgtaggttcgaagaggaagattgatcctgctcttccaatgttgtagcaagatggaaccccgatttaacagtataaatccctgaagtggtacaatgccatattaatctgtcagtatttgagaaaaaactcagtggaattgagagaattctttcaatgtcaagttggccaaaatattgatttagtaactccatgttccactctcggttatcagaaattaaagcagccacagttaatgatggggggccagtgtatgtgatcgggaagaagtctgtatgtcctggtatccacttgtcaaaaccacactgaatttgatgtccattaccgaccttatatcgcagtcctttaagcagcagttcgcgtccccaatggatgctttgccaagtaagagatggagagttaccaagtcgagcttccaaaaaattattatttgaaaagtatctagcttttaggagtcgactcagcaaggaagtgggcatgtcaaatatcctccaagcttgtttagcaagaagcgcttgattataatgtacaaaagaacgaaatcccatgccaccctcaaatttagacttacaaagtaacttccaccttttccaatgaatctttgaaccatctttagttgaaccccaccaaaagttagccatcatactttccaattgttggcaaaaagttttcgttaaacgaaagcaactcatagcataagttggaatagactgaacaacggctttcagcaaaatctctttcccaccaactgaaaatagcttctcattccaagcattcatcaacttccaaacacgttctttaatgtggctgaatagtacctttttatctcggccagaataagaggggaggcccagatagcgttcatggcattcacttatcggcatgtttaaagttcgctgaaaaaataattgagcagctataggagtgttaggagaaaatgacataactgacttgtgatgattaagcacttgtccagaagcgttgtgataagtactcagaactctcccaatagccaaagcagatgagttggtagcttcgcagaacagcaaactatcatcagcaaaaagaaggtgagaaattgatggtgcacgtcttgtaatttttagaccttgaaggttaccaacagtctcttcatgttgcagtaa

SEQ ID NO: 71427 - DNA, 865 bp, Cannabis sativa
tacaaataacatgaaaataaaataatctattttcaaagggtactataaattggagtatttttagtgtctaataggaatactgagagtagaggaaggtattagtggtcccagtaggagtggagggtcctagtcctggtcagtggtcagtagcagcagcaccctggttaagtggtagggtttggaagtgttaagtttaagtagctgttgttcaaaactagttatgtaggttaagtgttcagtcaccactcaccagtgttgtccacttttggacacaactctacccagccatggtctgccttgtcagattggattggacccacaatctcacatgaatcatcctttgcttgcgtctcaaaattgacctaattaattgttcttggaataattggtatttttctaatgtaaaacaagcctccaattcaaattcaaatttcaaaggatacaagtctctagcacctgaattttggtaattagttagtaatattttatcataattatcaaattaaaatatataagatatgatatttaattataatcatggtgatatgatatttatggattttgtaacaaattaatattgacactctagtattcataaaataattgatccatattataaatatataattaatactttaatataaaaaataataatttaaaaatattataaatatgatacatatatataaatcatatatattctatttttatttgtaagaatttttttaactaatttataagaaaatataatgtaaaataaaattaaacatttctttatacatacattataatttttttcttcttgcattaaattttttattttaacttgttttagaaacataaaacaataatttattttattttg

SEQ ID NO: 71428 - DNA, 2196 bp, Cannabis sativa
aagaaaaaactattttaaagtgtaagaataaaaataccccattaataaactgctcctaaacatgtatatttatatatgtggaacaattctcaataagtattactagttattaaacaagttaaactataaatattaattttaaaaatattaaccattagattttcatctaagaacgaataataaatgtaacacctactaatttaggcatactacaatacttttttcaattactgtgtaatatttgttaaaagggtttaatgaaaatgtgatttaatttaaactttaataaatgtacataaacttcattacatttataaaattcaggatcctgtatctatatttttttactgtacataatcaaaagatgtcgcacaccgactacaaaatcgtgaaccctagctgtcccaaagatctaacactccaggtcaaactttttcgatatgtacaatcatcatcaagctccaaactcattgccgttcaagaacaaccatgccattacctgcacataatatagcatcagtgagtcgagagactcagtaaaaaaagcataaaacataaacatataatcgacatgcggctaagcacctatacacctatcaacaagtcacaaaccatgtcaaacatgtatatttgagtctcgaacgttcttgactatagtacgattgaccataaaaccacatgcactcagtactttagtcgtactagtgttggtagcatcaatccattataagcacaacaagtcataataccacatgcactgagtactctgtcatactagtgttggtagcactagttcatactttcagaagtataaccaaccataatactacatgtactcagtaatctggtgtactagttttggtagcattggttcatactttctgaatttctaaacatatatattcacgatatcaagatgcaatcatatacaccaactatcgttctaacagatatgtcatacatctggaaaccataaacatgtacatatgtgtatgtgtgatattagtcttatctcaatattaatttcaagtgtggcgatcaacctgagtgaaaatagttgctcgtaatcagacaccctaagtcacatttcttgaataaccaataagtgttgccctaacacttttggagacttaaatttaaaactaaatgttttcctgtcaatagatagcatatcaatgccctaagtatcaagaaaacactcaatgcgggtcccacgaaaaggcttaaaacagacagtccgtttttaaaaacagacccccaaattctgcttaaattggacagttcgaaactccattgtctaattttaaaagttgcataactcattaaattccaagccaaaccttaccaaattttttagggtgcctaaaaacatcatagtgaacattttttatgtataaatcttaacccaattcgcagcataattcaagttatcacaaccaagtcaagtttgagttcttctcaaacgtgcataacttttgttacaaccacccaagacacttctaaacaatcataaataaccttaagaagttttttttactcttcctaaaatttctcaacaggtcctactagaaataacaactaaaaactaaaaaaaaccttagaaaacaataaaaacgagctatggtttaccttggattacatggagaagctaggggctgaataccttaagtttaattccagatcgaacaagcttaaaaatggggaagcaactctagtttttgctctggtttgaaggcacgaaggagaggacggataaaggtaaaatttggtgattttttttttttttacttttttcctataactttgacattagtttttgtttttggtttcctttttactttgtttttcctttttgttttctttctaagcagctgatcatcctcaaaaggatgagccatagccacataacccttccaaaaatattgactaatcacttaggtcaaaaagattaaaatgcccttacttccctgctaagttatctcgtaatcctaggggtaaaatagtccaattctgttattttgttaaaccttgatattctaagatgtccaataatattgtcttgtaaaataattgatacaaatttgaatccatgtgactaaaattacaatcagacccattttcagtattaccgagtataaaaatgtggaattatgaaaattcacatatagcattcatatcacacctataattcaataa

SEQ ID NO: 71429 - DNA, 680 bp, Cannabis sativa
gagaggaatagcaaacaaataagtatctttcgcatccataaacgacggtaaatccttacaactaaactccaacgacaatcccgggaatgtcattgtcgtttccccgatttcttgtcgtttactactctcccttataacatcctcatacccatgaaaataataataataaatatcgaacaccatcgccggctgaatccacaaaagcaccgccggcaaccccatttcgccggcggcaagtccagcccaaggaataagaatcgtatacaccaaacaacagtacggacgaccctcgtttcgacccgaaacgatggcgtttctcacagcttcagacccacaacgcctcatctcagccaagtagtggttgacgtcattttccggtttgaaaccatcgtcgtagccgtcggagaacggagcaaaggatataacgcctgatacggcgtcgttttggttatggggtttttcaaagtatgtcgtcacgtgaccagtggcacgtgacacgcatgagtatccggtagttgtggtgaggatggtgacgtcagcaccggtagcggcgagtttatcggcgaagtggagagatgggtttacgtggccttgagctgggtatgttacaagaagaaatcttggccgtgacattgttctgttgcggcggcgcgtggcttttactttctctgttttttttt

SEQ ID NO: 71430 - DNA, 1448 bp, Cannabis sativa
  modified_base (1367)..(1369): a, c, t, g, unknown or other
gcccgatgtaagcctgatttatgcctgatgctggtctgattctaaatctagacatcatgagtctgatggtttgtccaatgtaggcctgatgcctgtctggttgtcctcttggatctaaaactgggattgatgagtttgatgctaggcccgatggggtacgatttggctcgatggtttaaagatttatggcagtttaagactattcttttatcacttttctattagattttttctctaaatttgtaattgcaaactttttttattgcatgtgacaggttcaactgttaatgtgttcattatgtataaaggtaattggaagcttcaacgtagagattgggtttataaccgcactaaaaatttgatatttataagaatgtaagctactcacgtttggttgaccttttgtaagaagaactcgatgataacaaagtgcattatgacttgaaattagaagtgaattacaagtacatgaaattcttaatgtatcgccctaatgttattcgaaatgataagcgtgtaaggttctttttgaccatgcttgcgaagaagctagatgaattcactcccttatttgtcacttttgtaaagaagaatgtttgtatcgatcctagtcccacaccaagtactgttaaggatactcgtagcgaggttgggagttttgtaccagaaatgaatctggaggtgttggcagctgatgtgttacctgaattaaacactatgatgctgagagctgacattgtagcacaaatgtcctttcttgatagttttggtgatggtccagatcctgaatggtatgttaaggccatggtgatgtaagagatgacccagataaagaggttcctattgatgtacctttgaacttgactccactatcctaccaaagaccacctatgccaccaacatagaaaggaatgccctgtagagaaaattgccaaacatctggtactagtagtagttgtccaaacgaaaccagtaatgctggcgaaacaactgatggtagaggtcctagtgatgctagaagaaccagtgaagctagagggaccactaacggtacaggtcctagtgatgctaaagggaccaatgatccttgtggtcctagtgatgctagaggggccaatgatactgattagtgatcaattcacttcttcgaaaagttatggtaaattcaaggagaatttttttacaagagaagacatggaggatcatagtaattatatagcaatgggcggcacaccagatggggagttacatcaaggaatgttttttaaagacaaagagcatttaaagattgatgttgtcttgtatgcaatgaagaaagtttgatactactgtttggcacgttacatgtaatgatacagattgtgggnnnagattaagagcgaagaagaacgtactttataacatgtttgaggtgactacatttgaaaatgtacatacatgttcccttg

SEQ ID NO: 71431 - DNA, 869 bp, Cannabis sativa
tgtaatagaaataactagattatgttatagttagttgagcaacgatgtgatggccatacaacaacaataaaagaaaatatatcaccaatatcatgatgtgttggaagaaaattgaatttacccacaacaaatctattagaaatttcatttagatggattgaaattttaatgttcacatgcatatgtagtaatcgtcttttatacaatctatatctatttatctatctatcaatatatatatatgtatagtgatataaatgaaaatacaaaaaaaaaaaattaagtggcatcttatattttttgtctaactgttttcactatgagattttcatattttgtttaaaagaatacataggttacatgtatattattaatattaattaattttaaaactatcaaaacttttagtattttattattaattttgtgtattttttgtttgggaaaaaatttacttatgtgctattaaaatatatgagtgcactcttaatgggtattacccattcataggtaatattgtgaaaatttgagtttttatacttagtttttctatctgattgaaaaatctctcatttttatattatatgagtttgtgttgtttcattagttgaaaaaaaaaattaaaaaagaagtttttcgaaaaaaaaaaaattaaatttggcttaagtattttgtataaaaacatatttttgaaataatgtaaaaagtgatattttttcgcatttttttaattaagtagctaaattaagttgaaaaatttaaatttctctattattattcgtcattagatcaaaatctaataatttaatatttttaaaattaatatttatagttaaattgtttagtaaccatcaatgggtaatacccat

SEQ ID NO: 71432 - DNA, 1294 bp, Cannabis sativa
ttttaccagttaccagcataataccaaataccaactaccaacttttaacttttgtctttgtcagcacacagcacaaaaatgtgctgggaaaagtgacatttcttgtagtgatattagtgggcttggaccaaataaaaggtagcagcacattagaaatgaacaaaaaaaaaaaaaaattaagaggagttgattgtggtgaattgcaagaagtagcaaagagaaaatgaaagaaaaagaaagggaaatagaagacaaaaactagagagagaaagtggattttgccactttgcattgaagatgcaagtagttgattctcatttattttagcttaaattttaggtggtaaattcttccaagatgctttactagttctgatttggcgattgttctctctaaagtgcttttctacaatactcatttggtgagacctaaactttttctttgtatatctatcttttgagatgatgattgtattattgatccaaaattattaaatatcgatattgttgtgagcctctagttatagtagcgaagaacattgtaatctcattattgaactttggtgatagtgatgatttgagtggactacagttccgtgatttttttccgtattaggtttccacgtaaaagtcttaatatctcacttttatgcttgatttgtgtattttctattacttgtggtgctttagatgttgatatttaatattgtttattgttgtgtttgataagtatctcatttttaacatacaaaggagaaaaatattattattaattacaataagtttttccaacactccactacacttctaaaaattctaacgataggaagtatgggtataattttcacttttaattttttatgaatcagaaagttgtattgctcacaaaacgatttatacaatctactagcgcctcaaagaggcctgaaaaactttacatcatttgctttgtattagctacataattacaattgattaaaccattcattatttacttgggttgttctttttgtttggcaaaacacaaggatattctagttttaatcattgtcttcaattgtttctctatagtagtcgggtctgcctttgaattattccacaaagtttcatttctagcttctcaaattaaatcaggtacaccaaactagcaatagcagctaaaaatatatttttcttgagtaggcttttctttgatctttcaatccacctcaagataacttgtattctagttcaaccacatcttgattaattgtaaacactgctgagagaaatattttacaattaattgagtatat

SEQ ID NO: 71433 - DNA, 2118 bp, Cannabis sativa
tccatatctatcatcaataattaaattgaaacatttaaaaaataaaattcaaaataccttattaaagtacttgaacataaataatattttttattattattattattatatttatgtaaggttatattcatctaaaaaagattgtgtgaatgggaaaaaaaattgagaaattgtaaatttctatcttaatagtttatatataatcatataaaaatataataccagttaagaaattttttgaactttacagtacaataaaaatgaatttaaacaaaaataataatatagcagactattaaaacttatcttaataacacaatatttaggttaatcagtccatcttcaattcaatcatgttgtaaaaaatttcatcatcttattttatctaatcgtactaatcacatccaacaagcattatctatcttttaaataataaataataatagtaatgactaaattttaagtagactaaaatgatgagtaagaataaaacaaagtatgctcactagtcccttcaaagatgctttcagagattgcttttttaaattgttgtacacacctttcttcaattcaaatttttttaggtttttcaattgactacgaaatatcaatgtgagcaaatgagcaaatgacaatatatattaatattttattctattaaaagaaacggaacagaattagaaagaaacggaactgttagttatatcggaaatggaaggtatcaagtgagttttaaaaaaattgaagagatgtcattacctcattattggaatagaggagagacataatattagtgacagaagattttcattcggatagctccacattgtgctcctctccaatctttaatttgcattgttttgttggtgattcttggattcaaatggctcacatatgggaggtatttgtgtattatattggatgttctaaataaagtgttgatcttggatttaatgattatgaacaatgatgattaatatttaatgtgtgtttgaatagctcataatctatgtgatagtttaacatagaatagaataaatatagaacactattaaattttaaataaacataaattattgtatccacaacaaaataaatatttgctataaaataaaaaaaaaaaaaaaaaatgtaccaaatagtatggagtcaatattttatttatttatttattgttatttttttttgcttattatcacaaatagctagatataacatataacaactctaaacttcatgaagaaagattatgaagtcatataatcattgatagttgacgcgcttagtggtttaataacatggtactattttttgttgttatcttgtggttcaattttcagataccaattaatagaagaataaacaagaaagtataaaatgaataccaattaatagaaggaaaatttgaatattcatgcttaatatggactaaaatttgcccactaaatcaaaactttaagatatttgagaaatgggataatttttcttaaaacccaattttaccctccccaatacataacatccctctctctcctctcttctcattttctatctcggccgagctctccactccagcactaccataatttttttttcttctcttcactcattttcaacactactagttgctacactaaactataacactacaactacaatcttcaacagtacaagctcttatatacaaagcatcaatgggtaattaattttttttttatcttgtttgttgttgttatattaagtttcgaatgttgctttgatgcttgatctgtgaattgttgctgttattttactgtttttgtgtgaaaatatttgctgtctgtgaaatatttttataacgattctcttttttgctaacgcttttataacgattctcaagtgtgctagaagacatttaaattacacctactcattagggtatcatcaattttaaccaaattaaaatgtatcttgtgaataactccagtataatactcttgtaaatgtaacccaaatttacttaccaagacatgttcttgacatgctattagtattatccacaagatacaaaagggaaaagtccagatattgttaatgatgcagaagtggcatgtgaaaaaaaatcatattatcaacttc

SEQ ID NO: 71434 - DNA, 1274 bp, Cannabis sativa
acaaatcccacttggatagcgtaaaaatcttatttcgagtgatgaaacaaatccaaatatagctcatttcacttctattaaagagttcttatgtgtttttacgtcccttaaagaccccgagaaagaacaaatcctacctgcaaaacctaaaagtcacattccaaataatgaaacaaatccaaatataactcatttcttatgtgcttctaaagaccccgaaaaatgaacaaatccctcttttattctcaagaacacttacaaagatttgtcactacaaaagggtaatagtaacaacaccattaatctgattcattagccatgtaagttgctctcaaattagttttcaatgaaagaaagactcaaactcaaaacagtatatgtgtacattcaaattcatatggttttgggtgattttgcattgtgcagatatgcaatagctacaagaaagtcatatagttacattcttcaatttgccatttcattgggtcaactctatggaacatttgtatacttcataactgcatttttggatggtgacaactttgccgcaagtccattttactactatgcatactatgttggtgccaacttctcatggctagtcatcccaactctcatttcgatccgatgttggaagaagatctgttcggctgtgggggtggctcaggctcaacctcaatcatcccagaaaaagaccaagactcgttaaagatggtaactttagtttttttttcttgttataataagttatgattcattttgtgagactttgtttttttgggatgatctaataataataataataatattcaatgaagtcaatacaaggtgattatcacttcattcttatgactttgttcatgtaataaattttgattaatttcttgagactttttgggataatttagtgaaatgcaatcaaagtcaacacaaggtgattacttcattttttataccttagagaatcgaacagtttcaccttgcacacttcatgatttttgctaatatgttttgcctatataaatgtatgaaaattttgtattagactggtggttttggtaagggtatagattctctatctattttggtatttagaaaaaaaaaaattctgaataatttacagtgctcaaagtaagatttaagcgattattttccacgcgtattcgaaatcttttgaaaatttactagtcttaaacaactataacatacaaatacttttcttatcttgttttgttttttgtttcaatatctattttttagtctaattttttaaa

SEQ ID NO: 71435 - DNA, 1942 bp, Cannabis sativa
aaaatagtaaaaagtgtattaatgccttttttttaaaaaaaaaatgcattgtaataaaagcaccctaaattctgatcaatttaatgatttttatcattgtaagaaaattatacgattgaagcctaaattcaacaatcatatataataatgttacattttattatgaacttaaattaaattttcagagtaatttgggacataaatatttaattttaatttgattgtagataaatatttaattttaattttttacagtaataatacttaaattacatttttaaaactttcgtagtacctgaccattaagtattaagtttatggctatgtaacagtcctcgattgatccatgtcatttaatttttattttttatttaaaacaatttattaataagaaaatgacatgtagatattaacttaacacttaatggataggtacttacgaaagttctaaaaatataattaagatattattcctattaaaaattaaacttaagtatttatctgtaaccgaaaattaaacttaaatatttacgctacaaattactcaaatatatttatatacctcttgatatatgttatgataggtgagattaggaccaggcatcaaagcagtaacaaatactgcagctgaaatcttacgaggaaagctctccatagcaagggatatgctgagcccacccaaactgtgacccaccagaacaaccttctccgccgcctcgggtgacggcagagatgccatgaaatccatcaacggcttagcatagtcaaccaatgaaccgttgacttgggtgacttggatagggttgattcctgaggctgtgagatctattgttgtgactttgtgacctgtggattgtaataaattggccactttgtaccaacaccaagctccatgaccagccccatgaaccaacacaaaatgactactactaataattttggtattttcatcattattacttggcaatactgttgacatgattactacaataattattagattctagattttgtgtttgtgtttgtgtgtatatataataagttatatatgctaattaatgtgcatgcatttgtatatataataagttgttatctttagttatcacaaataaaatataatatatatgaaaaaatatattattttttatatatttctaataaatattaaataaaaaattgtgtaccaacttttactattttacattggaatcatatgtaatatactaaatattgtatcgaatatatcacatcttttcttaactttttgaaacaattatataacaatatataaatattgtatatagtgtacgtataataggtctatatttccttgtaaatgtcggattttaattaatattttgtaatggataccgtgcatattcgaatgcatattatgagtgaaacaagcaaaacaaaaatcatttctattttcttattagtctgccaactatttaatcacacccgcataatctcattctcatatttggttgtattgtattatattaaattagattatttatcatctttttatataatattatattaaatttgaatttatactaaaatattatatatttagatgtccataaaagtcaatactatatatatttttatataaaaatattgcataaaatataattcaatataatattatacaatacaatacaatataatactacataccaaacgaaccattaataattaattattagtttattatatactacatttttacattttggctttcctattttgtactagtatcttaatggtgttgataaaataaataatttaatccaattcgcacgattcaatctaatttaattcgtaaaatgcggattgcattagattaaaaaatctaaagttcgcacttatacagattaaatgttaattgacatgaaaaaaaccgatctgatttaatctacatatatttatatatttt

SEQ ID NO: 71436 - DNA, 1080 bp, Cannabis sativa
cttagttttcccactatgtttgtctaagaattaagactatgccctcctatacactctttaacaaaccttgtgtctctataaagacatgaggttgcctccacaataggtatatggtgttgcctcctccggcttcatagttcggcagtgctgccatgctatctttatggactgggttacgaaagattgataagaccctagagttggtagcctttttgctttatgcattggaggttttaggccttgtttgttttttggttcagcttttatgtttgcttttttgttaccaaggttttccaccgccatatgataggctccctaattttgatagaatataggcattagaggggtatatgtgtatttgtagtggtttagtggatgaatatgtatggtttgttgggcttagttggttggggtggtgttagtgttgagtggtattttataggagctttgctctagggaaaattttgatcttttgaatggctcattgctctatatgttcttatttttttttcattaaataacaattcccagtttcttccactcaaaaacaccatcaattctacgattttctcatgaacctttagcctagtaaatagttactaggtttagaaattttattctaaccctagcaattcgtttctaaacaacaaacccttatgagtgcagtctcaagggttaggatcaagggtacgggcgcgcccatgataattgcgtcgttgtgcctggattgtgagggctctaagacacatagatagttctatgtgctcattagtgcctgaccttgagatgtggatcatccaaggcacattagcatggcgtacttctccctttcgaacttgggtttgaaatcaaacttttcctaaggaggatagatgggacaattcaggtcaaacctgtcaactcacccgaactagtcaaataccagcagtaatagtttttttagaaaaaaaaaaaacaatacaaggagttgtattaaagattgatgaaataatgcaagcaaaagtggatcagaatacttagaacgagctactgagaaatgttgatattacaaaaacaaaaagtactaccattctttgatta

SEQ ID NO: 71437 - DNA, 1641 bp, Cannabis sativa
  modified_base (1334)..(1336): a, c, t, g, unknown or other
tttatttattttattatatttctttattaatctataataaaagtgatataaaaggaatggtgaccagaacacattaaataacatacaaaaataaatgaggaaattatattatatatccactttactttatctgttttaatttttaccttcattttcatattttttgagacacttttatagatgatgtccctattataccccttacataaatgtaaatcatgtgctacacttaagtggagggtaaggatatattaaacaactcactcataaaagtgggtagattttaatgaaataaaatataaatatatttttgattaatggatataaaaaagaggtatagctaaacttatcccaaaacaaattaactagctacagcagctaccgtactggcgcatgactttatatcctatattggcgatggagtagcacgatgattcaaaattatgttaattatgtgtagttaaataaatttctactaatgcatgaaagtgcatattgtgtttaatgtttggtagaaagatattgatcgatcgatattccagcctttctagtgagtactataaagaattactaagttggacctaattggtgttaagtctttttcttatagaacctcccacgtttaagcttcatattatcgatatataagtcttagacacaaaccaagaccgatcgacttttgtacctaataatttatctgtctatctatataaatataagatttttttttaggtaagagctccatttctactctcactcacaagagcatttttttttttgtttcaattagtttaaaataagggtgtatagaattaaaatgaaccgtgaaacatgttattggttattttatttttacttttagattatttttaaaaacagttattcacaaattaagatgggatcattttactaagtttataggacaaataattattattattttcttttctttttcatttcatcatttctttaaatttagatatagtatatatatgaaatacttttctaggtttcctctaaaaaaagcttattggcatgactacaaaaaaaaaaaaaaattaaccaaatcaaagagtgtgtatacactacaaaaaactgttacttatagtgataattttttaattataatataaattttttgtgactaaatgtgatttttagtcacaataaaaaattatttgcgattaaaacatagtatttaattacaagttattataatttagttttagtcacaacaaatattgtaactaaaaatacattttgtcacaacataataatgataatatataatttagtcacaacttttttaactttagtcacaaattttgttgtgnnnaaaagtaagattttttgtaataaaactaataatctaataacttctttttcgtatatatttttattttttaaatgaaaaatgaagattttgattaaaaacaatgcagaacaaaaaaaaaaaaaaaacaataaagtaacatagtgctcctttcatattttcttatttattttttatgaaaacttaatttattattatttttgaataaaaatcataagatctattaattaataaattcatttaaaataatagaacgcacttcagaggaacagtcctccaactgaacacgacctgtagagaaacaagag

SEQ ID NO: 71438 - DNA, 890 bp, Cannabis sativa
tgaaattgatcaagtaatactgttaatgaccagattggtgtgagatcttagggcttttattacttaaatctcttagatattaaagtcatatatattttttgttttacaatgctcttttactgtaacaagtatgcttttgttagatcgtgtaatcacactcttctctgcagtttattattctcatattatagacgacttcaatgtccactatataaacattgtatagggaaaaagtagggtacatatataaaaaatttcctgtaattgtcgtatgagattgcttcctgctactggtatgttattctcttctcttatatgaataaaaatgttggatgcattatgtgcttcattcaaatatctagattcaagaattggcaatgacaacactgtatttttgtgaagcttttgtttaatataagtagacagaacatagctactctgtgtttggctttatttttaatagcatagtcagtttcttgtaatctaagctaattaggtaattaggtctcattggccgctatgacagctgcaacaaacaattggctacttcctcttgttgctactattataaaaggatgtaagagccactttttcaaggtaggtcttttgaaattgtatgagagagtttagttatatgagcaagagtgttttgtatttctcttcgaggaagtatccatccttgtaagttgttttgtcaataagaagctaaagcttgtaaggttgtttcttcttgttgtaggtatctcaaagggtactgaacaacgtaaattggtgttgtgtttttaatttagttccctgtcatgtcttatttataaaagaagagattatttgaaaaaaaaaactatgcttgaatttgttttgtgttggagtggtttttttttttttttttt

SEQ ID NO: 71439 - DNA, 1674 bp, Cannabis sativa
  modified_base (45)..(55): a, c, t, g, unknown or other
taaaaaatataataattaatttttttaattcaaattttatatatnnnnnnnnnnnatttatattaattatatacaaatataattaaatataacaataatatttttaattaattaaaaggaaaatttataattaaaccattataataattttttacaattatactaataaatccataactataaaattatataatacctattataaaaaaaattaatttgttataacatatctttattaatatataaatatatgttcaaagctttttaagcaaatttgtaaatacagatttaatgtataaataacattatcaattcattctcatataacataacatgcaaatcctcattttatcaaacattatcaattcattctcataagacagtacaatagcattagaaacaagtttacatgtattcaatttgtataaattaataacataataaaagtaaaattaaattaacattgaaagagtcatttcataacccttttattttctttctggattggcggattcctgagttagtaaaaacctgctctgctttcctagttactcttctagcaattcctatctcatcatatagccatgtgtttgcatatgtttgtgtttatattattatataataatgaaagaaactaggaggagagttgcacataaattaaaccaccaaagttcagcatgtcaattcgattttaaattttccgagcatacaaaggttttcctgtgcggctgtgcctactatctattaggaaatctagctcaacatcatcatcataaacataaattttcatatgattattccaactcaaaatcgaaagtggccaaaaaaaaacccataaaagactgaagctcaaattcttctattctcatcatcatcaacatcaaaaacacaaaataatcaaagcaaaactaagcttaccagttcaaagaaaaaagaatgatagaggggagagatggtaacaaagaaagagagcccgtccgtgcaactgtggagctgtaatatgctactggtaaaaatttcaaaactagctaaagcctaaaatgcacatctctacctatctatctattctactaaacactaaatgatagttgttattcgctattactaccatatatatatatatataaatatctaaaatgttttctcaaaatttataaatgcagagcattatacttcctcaacaaattacagtaatgaacacaaaactaaagaaaaataattaactctacttactcaagcattcaagcttaaaaatagaagagatattgagcctaacgtaaagaatggcaaccagaaatttgattttgaatacctgttggagagtgatccggagctgggcggtgcggacagcggagtgaagagagggagagatgagtgaaggagaggagagaggagagtggtggacgggagagagagtgacagtgaggcgcagagaaagggaaacagaagaattagattagggttacgttttattattttgtttgttttattttcatggcatctcacatacatactcatttgtttttcttttagaagaatcacatttgaaaatcacattatgtttgaaaaagaatactttaattatatggtaagggaaatttcaatttttgaccataataatacaagtcatatcaaaatttatacccttccttaatttgtacaaatttagtctat

SEQ ID NO: 71440 - DNA, 1274 bp, Cannabis sativa
taataaatgaagttattggcaaattgaagaatcatctacatattttcgagttgttctaagatgttggatttgtcactgcaggtcctaaaatcactgacccggctgaacttaagaagcaagctaaagagctagtcaaaaactggcctaccgatcttcttagcatcatagaccaaaccccagatgacacaattatcagaacaccccttgtcgaccggtggttgtggcctaccattagcccaccggcttcttcaggtggagtcgtgctggtaggagatgcgtggcatccaatgactcccaatctaggacaaggagcttgttgtgcactagaagatgcagttgttctgtctagaaagcttgccaatgcaatcaaatccggatcaacacaatcagtggaaaatgctctgagttcatatggaaacgagagatggccccgagtgttccctctaaccatacgtgccaatctcgttgggttggctctgcagtgggacaatccaattgtttgttctgttaggaacaattttgtcatacctaagctggttaggcttggacctttgttggagcataccaattttgattgtcaacccctttagaaagcaaagagttttgacttcaaatccttgaataagctcaaacaagtatgtgcaaatgtatacccaataatttattgtaaaaatccccccctttgtgttcaaaatatgatagaatatatatttgattattgtactgtatagaccagtgtagtaaatgcatcaatgaaatcataccaaccaaatcaaacaccacttgttattacaaaactacaataccaataagctaattaatgaacttaataaaaatggatcgaaatcaatattttcagcaaaatttttctaaacgtaatcagacaggcacacaccacccattctcagtaagaagtaaataaaataatatatattgaaaacaaaaagatcaaagatttgtataacaaattaaaagaggtccctattgtgccatccacaaaatctttgttggtggctacatgtaaagatgaggaatgctgttaatctgtgtacaactgctatccacattcacagcaattatatcataactttggttctgccaaaaacaacaaatacaatagtttaatgagaaaaaagaaaattatcagaacaaatatgttttcagaacccatattaccaaagcatcaaacaaacacaagactcctaaaaatataacccactttctttcccctctttcggtttagtaaaacaactttaaaaactaaagttactatt

SEQ ID NO: 71441 - DNA, 1116 bp, Cannabis sativa
tttaaagtataaaaataaaaaagctcctattttttttttttttttttttaccttcattagactccattataaattatttatttttatctcattgttgttgagagcttcttaaaaaaattggttatgatttttgaggtgccaaacagagaaaatgttattatcagtgacaatatctagctctaccatagaaaagtttttttattttcaaccctgaaaacaaaaattataacagtatagttacaatttactagttttttaaataaatcactatgaagtcattaaacgtgtaaaacaaaataatgttgggctgtttacaaaaatacaaagaacttttttttatatatatatatagcatataaaattaattgtaccaaatattaaaaatatggaataaattatcaataagaaagaatactatacaaaatttaaaaatttcatatataataaatttttacttctatataattaaaactaattttttcatcttcatcaaaaaaactatctttttatgaaaaaatcacttaaaattaattttgttaagacaataaattaataaaccagttactttcatgtaatcaaaattatttttttaatgaagaaatcagttatgaataccaaaactcatataaatttgagatgctttgtattctaatttactgtgtggaatattgaacaaatctaatacaatactaaaactaaaaccaaatacaaatttttcagaagctccaagactcgatcatcaactcactactaaaacactcactatctactaagataaaaaataaattagaatgagaatatttgtcggagtatcatcgtcagaaaaattatcgaaaaaatcgttggaattgtcattgttattaaaaagtttccggagttagacattagagttgtcaccagtgttagatgttagagttatcaccggagttgggcattggaatttgagactgagaaaccagttatatttattagttagttaaaaatataacactgagaaacaagttatataagttaaccaaattaaaaacggggtaagttgaaaaataccactttgttaatcaattaatcaaatttacctctaatttcatatttaattgaaatatacctctttttata

SEQ ID NO: 71442 - DNA, 1394 bp, Cannabis sativa
aacttctgtaggtatctggttaaataaattgctacgtgtccctaattggtccaagtcattaaatttttattatttaaacaaattagttcaaatatactaataaaaaaatgacacgtggatataatggcttaacatataacggttaggtacctacagagtttcagaaatataataggtattattaccgctaaaaattaaacgtagatatttataatttgcaactgagagttagacctaaatatttatgtcgcaaattactctattttagttgtaaacatacttttcagtcatctaattaataagacgcgcgatattcagagtttaaaaaaagataaattttgaaaaatatcagtagtgtctaatacttcttaagatgtcatgtattgacacaattaaatattaagtcttatgtaatataatataatatctttatgaaatatcactaacaaattggcaaggcatcatttctaggtggtgtttttgtctaataataatactctttaaaaaatattatgattttttaataatgttttggtacctgaagagtgttccaaaaggcaacacataaattagcagctgccagtaaaaggccaccaagaagccaatactgtggattatttgtggaaaagatgaaaaatttcttggctgcagagagcataggtagatggagagatgatgaagagtttttaataagtggacccttgtacaattccaccattgttgctccaaccaatgatactattgtaccacatacttttgtttggaagctcctacttctccaatctacttttgttgttctgtataataatattaaatcacataaatatactatgtaaatgacctcattgattataacaaaaactaactttgatatatatatttaatctagtttattatttaattggggaaaaatataaatatatacctgaggagtatagagagtaagaaggacaaagatggaaaggtgagacccatggcacaaacaacaattggagaactgtaagataggcccaaaaatgccaggttttgaggtatagtgatcctacaaattaacaaaacacacacaaaaaaaaaatattagtgtaatatataatatttggaaaatatatttatatttacttgaaattaagtattgtgtgttaaaaaaaataagaatggttatatgtgatatatgttgaaaaaacaaattaacaaaacaacaaaaatatcattagctaggtcgtaaacgacaaaaagaaaagaaggaaaaaaaaaaccaataattaaaagaaaatcttattgtttgaataattgattcacctttgtgtgtgattatgtaaatattaatttaataattattatttttttaaagaaaatggagatatataaattaataaaacaaagtctatttacat

SEQ ID NO: 71443 - DNA, 2088 bp, Cannabis sativa
ggtaaaatattcccaacattaagtagtgggaagatccacttggtcaagtttaatgaacaagtagaagaacataaataatacatttcagccagagcttaaccttctcaggattaaaatttattgacataatatcaacaatgtgatatttaatataagtttatgatatcttatacaatgtcaataccggtctagttcaatgtatactccatacatctgatactagaatactttgctaatgccctacgaaggacataccacatatcaatgtgtaaggaaactttatcgctaattatcatgtcagtgtaaatttagtttactgataaatcttgggacttaattttgaaatatatatactcaagattattttccactgtatagacaacactatgatcatgaataaccatatgtttgggatttaaaagaatttatacatcaaacctataatcatgaatgtaatcatgtgaaccatgcaacataaattaatttttgatcttttattagttagtaaatctgattatattaaaataggttttatttagggcatacaatcccaacacaagcttcacagttaatttatgttcaggtttcttaagtaactaattattttcgattaattaagtatttaagtttgaaatgtccaggaagtaagtaacactttctgaaaagattttattcttgagtaaataattaactcatgttaattaaatatttaagtttcaaatttctaaagtaaaaaatgcttactaaattttttctaaataagtccttaaaatactgaggttcaagccaatagaaccatgttccaaggaatacaaacgacttattaaaaataaaaatccgaatcaaagaatttcatcaaaagaccaaaggttcaggtctttggatcaagaacttcagggagctagaaatgagattaaaacttaaaaaaatagataaaatcacaaatatcacatacttaaaagccccgcggtaagggcataaaaattatctctgcatatgcaagggggggggggggtccgtatccctcaaatattaaagatgttaatgaaaaaaaaaagtaagagttggataaacttgggaaaggcatggctagatcctttagtggttgagaattatctggctgaacatcattggagacctttgggatcgcagatttaatcacaaaaggatcgtcaacagctggaagggatgggtcttcgcagttctcaccctcagggggatgttccaagattgaccacctttgttaccctcttggcttcttctactctcgctagttgaaggacttgagggatcacctgttctctatcttcaaagaattgtcgagtttctatatgatatatagagaatataaaaaagattgctttaatgcttctcatgtcctaacctcttggtcttgcttctcctcatctcttttctgaatttggccctccagctccaaggtcattttattggagtctttacaagtgcgacccaatttttgttttgttgagccaagtaaaactactcgaaggcttccatgtgttctcttacctcctttggcattgatgtaggcctaactgaaagattagaaaatagaggaggtcatagaggaggtgtctgcattgtttttaggtgttgggggtggtagagacagatcttgattatccttggttgtttgagtgcttctccgaacttgccttcaacaattggagacatcatatcccttttgagattaagagaagcaacttgcctcctcaaagtggccaatggttgcactttttctttggtctccaccctcacattcttattggcctctccatgtgcagttccgtatcacttcttgagaactaggacttcccatcacaatcaaaattatccttctcaacatgccccacaagcactctttgtagtgacacgacatcaagaactatttccgccaggtcaatgacggatgtggattagtcttccagagttggagccttcaaagcaacctcctagctcaaggttggaggtgctggcttttgagatccactcctagagacttgcccctttttgccttttttcttgccttctttagctactttatggacctctttggacctagaactg

SEQ ID NO: 71444 - DNA, 982 bp, Cannabis sativa
caaggggagctacacaaaatactaaaattgtatatacctctaacgttgtcacgagaccctaggcaaggtcaacataggttaggaaattggctgcccccttggagccatggccgtccagggttccaagccttagtggccggtcagaccccatgacccagtctagggtcggccaggaatctcttttccaagcataggttggctagcctgcgggtgacatccccttagccagccagaccccctagtagcctcccttggccggccaagacttgtatggatccaaacatgtgtctgttcaagaactcagacacattctttgtgttctttgtgactcaaagaggcaagaatcacaatgaaggttagattcatatccttttcatctagaaatcacacattacatatcctaaggctatcatgcggatcaaaatactgaaaaggcaagaatctaatgtaggaatcaatggatgttcaaagcaaaaaaaaatttatgcattcatggaaaaatcaaccaaatcaagtgaaatagcaggaataaaaagcttacccactacaagaaactgctaaggaagaatgtggaatgcttggatcgtcgaaacggtgcgaaaattctaggaaatgactcttgatgggtttgtctctctatagagaaggaggagcttcttcaaatgacaatttctagtgatagaagcgaaatgtaaaaagtgaaaagggttttccccctaaaatgcacttatatagtacatgtgggaccctttcttcacttacttcacctacacaacaaagagataattaaagtagttagtttactacaaaaaataagattaaacagtcaaggcaaagtatttcaaatgactaaaaatggaaaaccttttattcagcaaaggctatagtagtcttgactgcgacaatctaattggtaagtccttatccatacagacatccatagagagacttaataggcaaatattacctcgattttttccca

SEQ ID NO: 71445 - DNA, 1413 bp, Cannabis sativa
attagaaaataatttccataaataaaatattctaatattagattatacttgagttggattgtttgaaaattccagttaaactttttaaaatctgtctttcatggatctaaaaattaaagtcaggacattagttttatgcaaattaaactagatttcctgttgaattttagtttcgtagtagtttttctacacttttttatgaattcgaaacagcccatgtgttttgattgattttgatcgtcttctcaagtgaagttcccggaattaatggtggttctctttctggttgaattttcgtttcggttgcgttgggttgttgcgtagttgcgcgatagttgcctaggaagcatagatcctggattgaaggtgtgtgtaagtggtatttatgtaattttttttatttgggctgtatatttatttatttagctagctgaaagtatttttgtcgtattgttacttttttagttaaaactgaaaaataaatcctatatataataataaaatattgattgttgtatgttaattttattgactattcattttttttattacgttataaaatactttttaataataatatcttttattattttgaaagttgaggtatatgttttatgaatatagattatgaagtataattaatatttgtttgatttaaaattaaaaaatttattttgacatttatttttatttattacttttttttttcatcttgccttgtgggcacccaacaaattcctcataactggtcctattcgaatttattgggttttaaacggggatggggcagatatggggggcataaatgggtagcggggaaagtggtggatgatgcattcactgcacttacccgtctcatttccatctctaatgaagccgctgcttgcaagaaacaaaggaaaaatagtttgtgttctaaaaaggaataaccataagaaaaagatgaagggaagggtcattgatgatgagggactttcaattagtgttaggtaggggtaagcaaagtgtttgtcatgttgttcaacatgaggctccacttgaaaaaattagcaattcttttgggattttaggagcgcgaatgagaaaggagatgaattgttggttggtgtcactataggaggggagctcctcctttagtgaatggataattaagtgttgcttttgaatgtaagagggttgaaccaaaataacaaacaaattgaagtatgaattttattttagctagaaaaattggtttggttgcccttcttaagactagggttaaattagcttgaaaaggggagtcgtattcctaaatatgttcaagaattagtgcttatttacctaaaaactgaccctggtaacgtagacattaatgtttgacacgtgataagaagtaaaatatttacgaagtttagtagttctgagtcatat

SEQ ID NO: 71446 - DNA, 1499 bp, Cannabis sativa
aagctattgagggttctaaggaaacatatgagagccattgcgtggatattaggtgatataaggggatcaaccccttaactatgatgcatagaatcttgatggaggaaggggaaaagccaaccatagatgctcaacgaagattgaatccacctatgaaggaggttgtcaaaaagaagtcctaaagtggttagatgttggggtggcataccctatttcaaatagcaaatgggtgagtcatgtccaagtaatacctaagaaaggaggaatgacgatagtgaagaatgaaaagaaagagttaattctaacatgaattgtaactaggtggagaatttgtatagactaccaaaaactcaacaaagtgactagaaaagatcacttccctctcctattcatttaccagatgcttaacaatttggcagaccgagagagtactactattttcttaatgggtatttaggttatcatcaaatagcaattgcaccagaagaccaaaaaagacgatattcacatgtccatatggaaattttgatttttggagaatgccatttgggttgtgtaatgctccaggaacattccaaaagtgtatgatgacaatattttctgatctaattgagaagtgcgccgaggtgttcatgaatgacttttcagtattcaatttgtctttcgatcaatgtctaaacaatttggaaatggtattaatgagatgtgaagattccaatttggtgctcaattgggaaaaatgtcacttcatggtaaaagagaggatagtgttagggcacaaaattttaaaaagtagtattgaggtggataaagccaaggtattgacaattaagaatttaccccctccagtgtcagttaagggaaatcgaagcttcttggggcatgttaagttctttagaagatttatcaaagacttctccaagattgtcaaacccttatctaatttacttgctaatggagagtttgggaaagattgccttgaagcctttcaaactcttaaggagaaattaatttcagcgccgattgtcactacaccaaattgggagctacgttttgaaatcatgtatgatgtcagtgattatgttattggagtgttgggacaaagggttgacaaggtatttcagactatttactatgcaggtagaaccttgaatgatgcccaactgaattatgttactacagagaaggagatgatggccatagtgtttacatgtgaaaaattctcaccttaattgattggaaataaagtgatagtgtacactgaccatttaaaaataaagtatttgatgactaaaaaggatgcgaaactgagactaattcgatgggttcttcttctacaagaattcaatttagaaatcaaagacaagaagggacagagaatttagtagcagatcatctatcaagattagagcttgaagagagccagaatacaaaagaggtccaaattaatgaagactttcttgatgagcagctgtttcatttagattcaatagtaccat

SEQ ID NO: 71447 - DNA, 677 bp, Cannabis sativa
tcgtggatcatggatctatgttcatcggaggttgggacactttcctcaaaagtctctcgtctgaaaaaggagaagggagaaagagagatatgagaccacctgtgcattttgggaggtgtagatcacgaatctgaggtgcattttgaacatcattcgtcggagattggtcattcgatctaaaaaaagcttctcgatgagagaagataacaagaaaaaaaataaatgcggttgaagagagagaatgagagaaaagaaagcttgtctgaaaattttttagagttataatttattgtactgtgtgtgtgtgtggggttgtgtggttatcaataatctttttttatttttaatttattttttgttctgcttatttttttaaaggtatgtgtatttattatttatttattaatgtctttacctattggcccacgcacgactttattttttaccatgatatttgctttttttcattaacatatagtgacgcgcataatacgattgggtacgcatttcccaacgtgtttggcgcatcactatacaatatttttaaaattatttcaaataattaaataaataattatgatatagctacgtgctaggtaagtcgagatatactttcccaaacgttcttggcatgactctataagtcagcagttttaaaaattaaaaaaaaattagaa

SEQ ID NO: 71448 - DNA, 1209 bp, Cannabis sativa
ctcacctggaataggcgctgggagcctcgaccacatcagggctggagcaataatccccctgtgagactactttaaggacttcctgaaccacctcgggcttgtcccatttcaactgaatcctatttcatatagaatcctcgcaagttttagggttttatacaaaatcttgaattgggagtgcctcgctcccttggaaatagagtatctctattctattaaggctgttccagtgaggatgaatgcaatagggggtttttattatcttgggatgcacacaggcgattactagatcattgttgatttgcccaataaaacttctttcaaggacgaattcttttggacgatcggtctctcccctatcggcacaaccactttccgcattatacgtaagtgattatttgtacttgatttggttaaattaatccatcccatacggtcttaggtcatgcgactttcttctgaatgaggtcaacctaacgtctgtggatctcctaactgacaaggagtttacttgtgattataaatatcccaagtattcttcttggcagcaggttcccgtcccagacgaggagaaagctcaagatcacatgactcgggcacaatacctccaaaataatgcccctcgggaagctgatgaaggagcatcccggggtaatcaatgtggttggtcacccacagtgcttagggtcgagcgtaatactctagtttcatttggagatagccgctataacttttagacctggaatcccctcctcatatatcgtaatacacataggtttgatagttggtatcccaagttccacgtctaaattaactgtactgacttgtactacggtatagccaaggagtacgctaccatgacaaatagggcaagttatatatacgcaagttgggatttagaactaattaatccctatgatatattcaggatcacaggttgtagggattttagtagatattatggttcttctaccccgtcttctagtgatacctcctcctctaatgactatggtaaattccttaggcaggaaactatgccctaatctccccttttacttgtattttaataaatgctaacactttatcttgtctcgcagaaatgcatttcgagggtctcatgcacagaaaagggaagaagagagtgaccaccttggaggctcctactgatgtcgagatggaaccccctaaaaggctgaagaaaactacaac

SEQ ID NO: 71449 - DNA, 1039 bp, Cannabis sativa
aaaaaaattaaaaacaaaaattttacttttaatgatggttcgagtcctaagttatgtattgtaatgtataaacgcttaaataaaaaaaaaaatcatagtcacaacattctatttagaaagaagcttttattacacagtaaattaaaagaagattaatagttaattttgtattgtaagtataattactaattttaatgtataataattagaaaaatatatgaaaaagtttggaaactatatctagattgaatatggggtggatagtatcactcccaattatacctcaaacacgctttggatatataaaattgcaccatacttctaccttattacctattaagacgggtagtcttcaccccatttagtatggataactatgagtattcctccttgcgggtcaaatttccatcattaatttttatccatttcaaagtaaaaaaaaaaaaatctttttatgtcattaaaagtcaaaagttactcaaataaaacaacttataatatactaaactcattgcatattgagaaatatttgtatatattttcattttgaggaattttcataatatactaaatttaatgcatgcagtttggttgggcctccatagtcacttagtttagtttattgaccctatatatgttgggctaaatttaaatgggcttgggttaatttatttagttcctctaatggaactttgcagaaataccagaaaattgtaacgaaaaagaaaagctcacacagaaaaaatattaagattatgacttttgatgaaaaaacagacacaaatttgtaataactgtctgtaactcgtgttactcgtctgacccatcattttgaaatataccatattttcctacccatttaaaaatacaaaactcataaagtttttgtaaatttgtaatccttaatttttcttagttttatttcgtttttattgttttggtttgttaaccacttttgtttatgttgcctaaattgtaaactctttagcaaattttattgcaaaatgaactcttttactaagaaagagttcccaaatgt

SEQ ID NO: 71450 - DNA, 1400 bp, Cannabis sativa
tatgcaagcaaaaatgtcaattttaattttataaaatttggtaacatgaaaactcacttccattctacccttagagcctcctatagccagcaaaaaaggactgtcttctgagaacgcaatagaaaacacagctccctagtaacatttaaaatagagtaagcatcaacctagtattaatcaaacagaaagaccagttaccaaaccacttactgctttaggattcttagatgcaatgcaagagggttggttgttggataaatcccagagctttacctgaatgaaataatagacagagtcaagggggaaaagaaaaagaacaatcagaatctgcctctaataataagctaacgcgacagagagaggaaaactttcatttaccattttatctgtggatcctgtggcaagtagctgcaaaaccccgtaaagaacaaattacaatttgaaggttataaataaataaaatcaacccacacaacgagcaaggagaaaaagaatgtacattaggagccgctgaattatatgagactgagcaaacagctttgtcatgagcatgaagagtaaaacttggttttgactcgggagatgtggtggacgtcgcagtccgaatatcaaaacccttcacagtaccatcttcaagactaacctaattaaatcaacaaataacagagaataattagtgactgcagtctcttatcaaacatttttttaatataaatatgaatgtaaaatcagatcttaaaagtatcatggctcacgtgttatctattcaaagttctattaaaataaaccaataaaagaagcagaagcacgaaccacaaatgtgtgctcagtgtgcggatcccatgctaagctttcaacatcagaatcgactaaccacttgtaaccagaatgtgatggtatcctcccatccttctgcaattcgtaaccattgaaaataaagaagacccataagaactcataaattataacctttacatcacaaaacactacatatatacctacagaacaaagtgcacaatataagttttaactagtaatttagtgtctgagaaagaatttaccataacaacagaatgatcaaaagatccactgaggagaacttgtggtgcatgataattccatgcaacaacttgaacctgttgaaaattattaaacacaaaatggtagattaaaactcaaaaatggagaaagtgatatagctggtaaactctaatctacagcatttatttatgcatctctcaaaaatgctagaagcttgttagttgctcctttagagagactcaaactaaagtattacattactatcaccaacacacgatacaattcaaaaatatgaaaatccaaccttgagcacatcaaattctaattcatctccacagttaccttgtctgtatgatgct

SEQ ID NO: 71451 - DNA, 769 bp, Cannabis sativa
attcaaattaatataatagaaaagaattattcaatctcactattttttaagatatcaacattatcctctaatcacctccaacaacactatgttccattcattttatgttagtaaaaattaattctcttttaaaaattttacaatactttttatattagtctctaattactatgttatttgttattgttattggtttcttaattattggctctggattggttattggctattagtgaaccatgccaactcaaaaatttgtggacatattactagatcacatgtcaaataaatattatttataaaatataatagaaaaactaaattaattttctatcaaaaaagacttttataagtttaattaaattaggttttttattttttttttaggtatgttcatataatccacaatctgtgattgcaaaccatactcaatacagaccaaaccatatgagaccggaccaaatgaatctagtgtgaattttttgaatttcgaaccgtttaaaattctctgattcggtcacggttttagaaatctcatagcggttcaaattaaaccaatccatataattattttatatatacttaatatatattttttagaaaaatattaatattaagaaacaactttagatagaatattgatattaatttaatattattatgataatgattttgtattgttatttatgtattataaactaattaaaagtaaaaaataaaaaattatcgaaaaaataacaccaatccatttttgagtttggtttagttt

SEQ ID NO: 71452 - DNA, 1878 bp, Cannabis sativa
tgaaataactagttatttcatttctttattcgattgtattttaaagtattaaaatattattttaattgaatattcttttatcatgtcggtagaatgattatttcattttgaaataaaaggaaaaattatttcaatgtaacatgagaaaaaatttaatgatttttttattaatttgttttaagtattttaaagtttcttctatttcattattattccaattcgcattcccatttatatttttatgtttttattcttcccaatcaaatgctaccttatttcattattatcaaagaataaatagaggcataaatattcaaaattttagatttttatgtattataaatttaatgtttctttttagcggaataaataccaaatatttataaaactctaatttttatctagtttcattagtagagactttattttaaaattattaaaggaatatttaaaagtaactaatactacatgtttttgtttaaactcaatgatctagaatctgcgccttatatgtaccctatttaaaacaataacagagtatgtactaaaaaaattagagaataaatacaattttataaatattaagtacttatgttgttaaaaataaatattaaatttatgttacttataaatttaaaattttaagtatttatgcaactaattattcgagaaaaaatatggcagcaaaattttttcgttttaccaatgtaaattttttagcaaaaaaaatccattttattacaatattagttctttattattaccaacttagaaattaatattacaaccaagattgagattttactgctaaatataagggtttttttttaattttaaccaaaaaaaaataataatattacaaaaatatttttaactggctaaataaataatatacaatctaaataaaaaaaaaattacacaaataccacttacacaccttcaacttaggatacatacttcctgggaaactatcgtgcaactacacagcaacccaacgtaatcgaaacgaaaatgtaataagaaagagaaccaccattaattccggcgacttcaccaggactctcgtttcttccatgtaatccacgtcagatgcacaaggattgaaaagccaaaccgaattcttaccaaaaaaaaaattaatttagagaaaaagattaaaaggatttggggagtgaggtggaaaataggtttggattagagttttgagagtggatatatggcgcgtgatgggttggaatgggtcccacggatgagtttggatagagatgaacgaaccagccttatcatcccgataaacgcggccatctgatcactgggtcccacccccctacaccacactctcactcactaccttcttcctttaacattgcaatttatctttctcacgctctttactttttactctttacaatcacataccacattactaatttttctccaagtataatttcatatagaattgttataagaattttggttcccatttaatttatttcattaattaccacaaaaattttgtgtaaaattttataaaaatacaaaaaaaaaaatattttaaaatataaaaataaaaaactcttatattttcttttttatctattttgattttatttgtggagtttggtcactaatagaggtctatttttagctaagaagttagcaactaactctaactaacttacctaactgtcagttatgacagttaggatcaagattaaaggccaaaggctatataaagccatgagttacaatcttttagaagaagaagagagatagactattgagagctagtttagactgtaaaacagtgagagagttctggtgagatgagttgtaattgaagctttgcttctcgagtgtatgtgtgtcatgaacact

SEQ ID NO: 71453 - DNA, 1693 bp, Cannabis sativa
ggtataatggtattttgaccaactctgattatgaactaataattggagtgtgaactgcttatattgattatattaatagacaacaagtaagaattctgtaaatataattctatattaccaaagagtgaaatttcatatttatagtggattaataatagaattaataaactggatcattctactgattagatcgataataatcaagtgtttattagagtttcaaaatataagttcatggtccccgagtcaactctattcaatactgtacatggaaaggttttatttgatgaatacatactctatacatatatcacgtacttagtacgtaaacggtgcatgtgatccatttgggtcttgggtccttcgtgacccacatgcgactactctccttggtggcctgtgaccacggtgtggccatggtggccggtccacttttgacccaaacccgacacttatatatatatttttaggtatatatatatactatatataatatgtatattatattttatacaatatacaatatatatatattgtatatacacatgaattttcatttaattatttaatgtaaataattaactattattttcaaatatttatttgaatttcaaatccaaataaatatcataattatcaatttgaattaattatttaataataaataataaaataaaattattattttttataattaatttaaaataataaagttttgtggatatttagtttttaaaatttatttttgaattaaataaatataaatggttttaggtttgaaatttaaactcaaacctacaaccaaattaagacaaaatttattttaatccaaaataaataataaatgttattattttaagacataacttataagatattacagttgtctcaaacaacgagtttatttgagaataaattaattaaagttattttaattaatttataggttataaagttgtcttaactttatttgagaataaattaatttaattaatttatggattataaggttgtcttaaataaatagtttataagaataaattaattaaaattgttttaattaatttataggtttagaaaatgtattaaataaatagtttatttaagaataaattaattaaattgttttagttaatttggaagatttaagagatgtcttaaataaaatttttatttaagaataattaattttgaggtttacgacaatcctaaaaaattacaaaatacccttgcagcagtggagataagttttataatttattttctataattaattaaattttttaatttaatattttgagaggcttacgacgatcctaaaaattacaaaaatacccttgcagcagtggagataggttttataatattttttttctaatttcaaaggttgaaaaattagaaatacccaactaatatccaattcatcatcattatttatttattacttttaaataaatattcattaataatttttttgaaacaaaatattcattaataattgattactaacatgctcatgcattagtgaataacatgtcatacataaaaattccacacaatttaaattatcatgcatctaatagtagaaatatgatctattgggattgtcctatgtggttatgtgtttattgtttttgaaaccaaggatgtaaactgacttagattaattgagaattaacttgacaatttaaaa

SEQ ID NO: 71454 - DNA, 865 bp, Cannabis sativa
  modified_base (815)..(818): a, c, t, g, unknown or other
gaagcggggacgttacagttacaactaaggagggggtcgtcatcaaaattttcaagggcagtcttcaaatcagcagcaacaaggttcctaccaatagagaaatcaaccctaaaaaaaccaacaacagtcccaacaacaaggttctagtggagactctaatcttcaaatatatttgttacttcagttcataatagagaccagatcttccattaaaaccttaaaaactcagatgggacaattggctactcaaatagcaaatcgttttcaaggtaacttgcctagtacaatagaggtaaacctaaaggaaaattataagaaaattactttgagaagtgggaaaaagtatgagggcctagtgagaaacaatcggtggaagaagagggtcatgatcaacaagcactggcactagaagagaaaaagactactgagggtcttacatcaaaaaaagcttcaccacttatcagcattgagcacaatgtaaaaattccttatctgcaaaggctccacacaaacagcatggacaagtagttttcaaaatttctcgaagtattcaagaagctgcacatcaatattccattcgcacaggccttagtttaaatatcaagctatgttaagttcatgaaggaaatcctatccaagaaaagaaaaatgaaggattacgagaaagtgacattaattaactgaagagttcagtgcgacattgtagaagaagctccctcccaaactaatagatcctgagagtttcaccattaattcggctggagtatttaaaatagtctccttattttgtgtattcaaacttggaaggaaagttnnnnagctttcctatttatggaaattgatgtaaaaatggtaagtttgatta

SEQ ID NO: 71455 - DNA, 861 bp, Cannabis sativa
tgatcttagtttttcaaaaattaggtttctatggcagtttcagacactcatagacaacatgggattgcaaaatattcatttcacatcttcatcttgagggagagtattagggaatttatagataaaaataatgtccagtgagacgaataattcataattgatagacatagtagagttataataaaaacaagaattatagttaattggtttatatatgtacatacccttgtttcctttgtttccttcgcttcctcccaaattattcttacgcttgttttaagatcacccttccaaacctcttctatgccctctgcatacatcacattgtaatagtattcatcccttaataactttgtaattattttacctaacttagaagtgattacatttccagaagagaaattctccatgtgagggcattcaatcacaaatactttttccaaattagaaaaccgtatctcactatttccgctgttgaagcttttcagattgggtaaatgacaaagcattaaagcctctaatttggggaagaccatcacattctcactagcttcctcctcatccacaattacttgtctcatttctttacaatcccaaataattatttcctgaagttgtactagacttctggtggtggaggaattcattaaatttatcattccatcatacttaattatacgaatctgtctcagattttggaaggacatagaggatggcatgaacatcctctttaaactcatttcttctaaattagggaccacaacctaaaataaattataattaaattattattaaaataaaataaaaccaattaaaacaataataaaccacaaacagaacatatatagcaatacaattatt

SEQ ID NO: 71456 - DNA, 1206 bp, Cannabis sativa
ccctctctcggacccaaccccactctctctcttcctctctttgaaatcgaaaacaaaaaaaggcccaggtccgatggtcggaccatggggttagaccaatcagcccatggtccgaccatcggacccacctctctctttgtctctctcaaaccgaatgaaaaaaaaggcccaagtcggaccttatggtccgaccatcggacgtgggccttttttttgttttcgatttcagagagaggaagaaagagagtggggctaggtccgaaagggggggctgggtccgagagagggtggctggattggaggtggtggaggtgagtcgtggtggtccaagagagggggctggtggtgcggtcagccgtggtgctccgagagtgcgcgagagagagatgcagagagtttgagggaggagagagaaagggtttgagttatgaaggaggtatttttggggttttgaaaaaagagtcatattttttgtagtataaaatgtattggtttaaaaaaaaaattaaattttttaagtatagaaaatcaaatttccctttctaaataatattttataaaggggaaggtttttttatatctcctttgttttcagcatacaatattatttttgtttactcatctttcttttttcattcttcttgtttagttatatcagactataatttggtaaacacttttaagaaaataaatttcttgtttgtagtactgtcactatacttgcctcatttattgctgcccaattgattcaacacatatatatatatatatatttaaaaagattctgttcttgaagtgatttgcaaccaaatatatcaagtccaaaaacatttactattctctttgacttcatcgtaagggtgacaatgtcaaaactattttatgaagtacttaaccatcttattagttttcactttctgctcatcctatgaagaattaatcagaggaagcactttttagtttatttaaagggtatttggttcttttcttgctcttcttttaaagattagtatgaaatagatttttcagtaatgttaaacactagttgagtaaaacttcattatgtgcttgaagactacaatttttatattatatgtataattaattaatttcaagataagctgactctccctaacagatagtattttaaatgtgatttaggtaatttattgaggcatttactcaaacacataaaaggcatgagtg

SEQ ID NO: 71457 - DNA, 1259 bp, Cannabis sativa
aataaaatgtcactatcctatagggacaaatgaagtattcatattgtagaatttttctatatatatatatatatttagatgagattcaaaaagtttatttcacacacgtctgtgactccttttagaaggtacactgtaaaagcatcctataataaatatggacaatacacattaaattgtcaatttaaataatataataaatgtgtaagaaaacaaataatatgtaatatatgattacatattaagttgtcaatattttataacatatagtaaagttagttatgttattaatgtaaaccataattcttaccttttatccgatatattagtgactaaagagaaatcccttgagatagatattaggaggaagtgcactcataatggggacaaatgattagattagaataagcttttttttttttttttgatggaaccaaccaatgattagattagttagaataagcttatggcttgaaaaatttgcatgttacatttgacaatttcctatgctatggcttagttgttgtattgtacgttattgtaaaaggcattaatgtaatcgtatggatgggtttgcatattgtatgattaggatatggttcttatcaccctcatctcatgaaagacattgtatgaccataatttgggagatgggaaggaatgtagccatcaaaggagaggactcgcccataaaagacaaaacataaagcgaccaatgaaaacaacttaagatgcatcacatgcagtgtcctatgaaaaatcttaattccaataaaagaaaaaaaaaaaaaaaaagtagttggattaattgttcaacttaatatctcacaaatatttccgaacaagtgaggttcatctcatatttttttaccaaacacccttactctccaaaccactttataagctagagaaaactcttaacacatacctatccacatgatccaaaaaaaaaaaaaagcaaaaagtatcacttatgatttagaatgtcatccaacaaaaaggccaaaaatattacttgtgatctagaaaaaatgagccaaaattgctggttgcgatcaatcgtgcaaaattagggagcaaaaatatccacctccatcttgaaggtgaatgttggagtcctagagtaaaggtgtgtgaaaacatattaccatttataaaaatataaattactctattcttacatgcttcttacttcttaccatacccttgtctttctaaaatatacaaccaattcgtgattcaaaattggagtattctgt

SEQ ID NO: 71458 - DNA, 1036 bp, Cannabis sativa
acacacatttctctctctttattattctctctctttgtcgaacaaactataaccagcaaggggaaggaatttttcagctgcaattcaagggtttatagcaaaatttaggtgcttcaacctaaggtatacccttctagcacattaatcctttgttctcttaagtttttgtttgtgtattgtatgaattttgggtactaagttgttgtatatattaggatggtttgattttgcattatggagttagcttgtgtttatttatgttgtcctaggctgaattggttgatttttgtaatgtttaagccaagttagagtttgggaactcaagcttagtgctctaatagtgttttgattttctaagtttgtttttgaggtttgttgcttgaattaggtccattatggtatttataggtattttgagattattggaaagtttggagttaaattggagtgttggggacatttttgatggttcctacactaaactggaattccggttcagagggacctgaagcaaccgatcgaccgattggtccccgggaaactccaccgaatcgaaattcggttggggaatcggtctaccggttgggacaatttttatgaacaatagttttcctgtttttgagatatttagggtatggccatgttattcatcgatagagaaatttctagttttgattttaagtccccgaaaactattttagcgtgtctctcatcaaaattacgaatattgtgatacagggccctgtaaaaagtcgagctgctattccatcaggctgaccagcatacctgagcacagaaacgaggtaagataagcataaagtatatatgtaactaaatgaatgcatggtgatatatgtatacactactagcactgaaatagttatagtactaagggtgttagtacattgcagggtttttaagggaggttacagtgtaaccaacacgagtaccaagggatacagagtgcatgtggtacaacactcagtaactcttggaagtacgataatggccttaccaacacgagtacagagtcgat

SEQ ID NO: 71459 - DNA, 922 bp, Cannabis sativa
tgaggagtctgaaggggaaggagacgtttcaatgacagaagaaggagaagaagctgatgatattatatgtaacattaatgagttgtggagagtggaggctgagcctttctcgaggcaggaactaggggaggtgaaactggatgatgttgctgatattaggaaagaaacactagtagaggaggaagtgggtgtagcggtcaagatcatgaatgaggcaacttcttggtcaaatattgttgattccatggctgagatgggcatgaaaattacacaagaaaaggaagataatgatcagaagatagaagaggttaagaaggcaaggaagaaatgcagagaattgaacaaactgtctttcaatgtaaattatgagaagagttatactaaaccaggggcacaaaacggttcattatgaagattctaacgtggaacattagaggcagcgggaacaaaggaaagagagcagctatcaaagctactatatgcaaagctaatccagacttggttatattacaagaagtgaaaagagcaacggtggatagaaggttcattgggagcatatggagatctagattcaaagcgtggattcttcttccagccttagggagatcggggggaacattactaatttgggacactaggaccatctcggtactagactccttggttggtgaattctcaatctctgttctgattaatgcagaaggtaaagagccttggtggttttcgggagtgtacggtccgtgttcgtataaacttagacctgagttctgggattaattagcagggttaagctcaatatgtggagagtcgtggtgtgtggggggagactttaatgtgaccagaagagtaggggagaaattaaacagtagctcgtttacgaggagaatgaagttgtttgatggcctgatccgggaattacagt

SEQ ID NO: 71460 - DNA, 1571 bp, Cannabis sativa
  modified_base (1485)..(1490): a, c, t, g, unknown or other
tacataatataaaacttacataatttttttaaaaataagcaaaacatttttgaaaaatgttccaccccatagtaaaaaagaaaaaagttaaaaatttcagtatatattgtaaaaatttcttatctatacaagagctaataccttcttttgtacattatatggaaacataaactaaataaagatattttgtttcctaatatggtatcagtacacattgaggatttccacctctcctcttctgtcttctcctttgaagctttcatccatgaggaagacgtgcagctcatcgtcttcaaagacctccagcttcatcacgcttgtcggatcgaagagaaagaatcctctgcctggatacaattctcttggccttcataacccccttcttccgccagccaaaatgttctcctcaactaaaactcctatttgatcctctcaagaagatcacaatccatacttcctaggctctagtgatcatccaggttttcttttatcaattactcttctcataggtcaagaacactaccaatcttgaaagagagctgctctgatttccattggtgtgaagaataagactccattcatcgatggatctcttctttgtccacttgctgatgatctaaatttatgttattggctttgttgcaacaatatggtcatggcatggatactctagtctgtttcaaaggagatttccgctagtattatgtttcaatattgtgctgtgaagatgtggaatgaccttgctaagcgtttcaatcaaagaagtagcactcgaaatcttccaactaaaaactactcttcacattgttacacaaggagacaaagatgtcaatgcctattttaccacactcaaagctctctgggatgaactcaatgagttccaaccatacactccctgcacctgtggttgtacttgtggcgttatgaagaagctcatcgattactttgcttgtgatcagatcctttaacttttcacaggactcaatgagtcgtacgctgcaatcagggcttaaattcttgtaatacctagattaaaatagtatttaattttttttttcttttctcttgagatattaattgtgcgagaataattatctcatttatctatgttgttagtgagttgaaattatttatagagtaattgtcttaattttttagagagaaataaaattgtattaactacgaaagtaaaatattatagtatttttacaagttaagtaattacttatcattaaaagtccaatataaaattacattttagttttttgttagtgaatttaattgattatatgagtgatattacataaaattattatggaattttcaaaggaaaaagttttgaattaatggcactatttgaagatataaaatattgtaattggcgttaaaatttagattatggctagagtcggtaactttgtgatatgcaatgtatcatgtgtatcactcttggagatttagtttgttatattattttatataatnnnnnntttagattaaataattaagttatacataattaagtgtgacaaagtattaattttgtcaaattgtaacatacattatggagt

SEQ ID NO: 71461 - DNA, 873 bp, Cannabis sativa
aggaatctccaactccttgtaatcggttttgacatggatagtgaagaatcaagcgtctttgagggaagcttgacggagatgtacccttgattttgaggggaactccgaaatcaattattgtcttctttttatttttttgctggtttttcttttagtctttctctggttttgggttgtttgttgtgtgtgttgcaggtgcgaaggagctgctgtaggctcgggttagaaagctctcatagagcttgaagaagaagattagaagggctgaaggaggaagaaaaatgcagcagtggttgagtattgttctgctgcaaagttttgcagcaagaaggaaggagaagaagagaagatggctgatgctaggttcagatgaagagaagagggctgctgctaggaagtggctgctaaggttagagaggagaagagaaagacaagggctgctagggtttgtggctgaaaagaaaggctttatactgccattaaaaggctaggattttgagggaatatactcttgatccgcacaagagggggaaggtctattttgaccttggttttttgtactttgtggtgttggagtagggggcaatctgggtattgctttatttcttacaatatatatagtattttaaaataaatactaaaaataaggtttctatttttcttaacaaaatgtgagttaatattaatgttaattaatttttgtagtaaatattatatgaaatttttgtagaagaccgttctggtagattttttatctgcttcggtaactagaaaaatattttagttcaattttttttcataattacatatgttgtagctatataggaccatttgtaaattttttagaagattctgaataatttattgtgtcaa

SEQ ID NO: 71462 - DNA, 660 bp, Cannabis sativa
gttacttttttatgtagtttttttattatttttatagaatattataaaaatataaaaataaatatttaaacgtaaaaatataaaaaaaattataaagattggtactttatagaattatcccactattatatatattgtttaattaatctattttacatgtacatcaaggttttggatcttgaaaaatagatgcatatgcatagagattgttaaagaaccatgcataattcttctatgctatatatctcgaacaaaatcacacccccttttccctagtgcatgcctataagcaaaacttgatttttatttatttattgatctaaaggaaaacttgaatttgaagtcaatatatatggacatttgattcacatttttgggatagattcaaaagaaaatagtcaatggcaattggcaagtagctaggcatgtatgctatacattagggttttttttttaaaaaaaaaaaaaaagttttcatgctttcttaccaagtgataattacaatgtcaatgcaattttgagataaaacaaatttgattttgacctttttttagggtataggcgcattatagaaagtagtaattttttttatatacacttaaaacaaattaaggattgtagggtaaagcattgtggatgataccccatgatttaaggcaa

SEQ ID NO: 71463 - DNA, 1426 bp, Cannabis sativa
taatggagcttgatgtgtaatattatatattatagggatctattggtaataaaataatactgagaagatgacaaaaaattgttgagaccaaatctttttttttttttttgataaatggtcagacaagtcttggcacatgatatattaacattttcctcgtacttatgtggaacaggtactacttggtaacttcctataggtgataccttattcatataaacaggtgatatctgaggcaaatgttatcattcaactattcaagcacatcaaaatttaaaatatgaaataaagaaaaataaaagaaacagataggttgtctctcatttctttcttctcttgtttaatgataaataataaagattcgataagtgcccaaaacgaaagcaagtgtttctcctaattagactgcacttttaactgtcagcttcatgtctcatctcataacatatttgttaacaattaaataagtaataatagttaaaagataaaaaatttaaagaatcatcaatgaatactctttatcaagttagttcaaatagccaaaaaatttagctaaaaactattccctttttaaatataactatacactatttattatttattcttcttctttcttttttttttttttttttaagagaattactttatatactatttttttaatttttttttatttttttaaatttacggtttggatttttaaagtgattgcagcgctagttgcaataggagtttctatacgaatttttgttgcaatttagggtgcaacgctaattgcaatatgggttactatgtagaatttcgtaaaattacaaaaaaaaattattttaaagtgtaaaaatgaaaaaacttctttctttttatcttatttttcatttaaataaattaataatatttaaataatataaagtaaaaatataaaaaagctgatatataatatcatttaaaacgtttgatatataatagaaaaaataaaattttaatcatatatttgaaaggatagaaaagaaaaattgatgagagtgcctttacataatgaaagctacagttcatttacagctccatttttttttttttttgtattttacagccccaaaattattattctttttataattttattcaataattattgtaatattaaaatgaaatctcaatacaatctaaggatgttgacatatatatatatgtaatatataaataaagaatgttattattgtgatatgggtaggagatggattgtgcgatatagagtgagttagaccaaacaccccacctatatgtattcccccttgcatatctaattggctccaaatattattcgtattttgggattctggggtcagattcatggaacccctccatgagagaaagtgcaatctcattcgtcattttttctcctttttcttttgaacaagtctcattt

SEQ ID NO: 71464 - DNA, 773 bp, Cannabis sativa
ttgtaactgtttatatagtattttggtatactatgagtactttattgatgatttatgctgacttcttagctgaagatcacaacaactctagctctgtagtttgtaaattatctctaaaaattgttatattttacagtgcaagaaaattgtttgataaaatgtctaatagagatatattgagttgtagataaggaaacagtttgtgaagatacaagatcgaagaaaacgatggttttgagctttgtgaatccagttgaatattatataatatacagggtattagtgtattcataatatattttgtattaatataccacacaaaaaacgatctttctatataaacgtatccaacacttcctaattagtttggttgatcttgttgatgacagaatatcattcatttatattcaactgacaataataaatttaggtatagtcaatcattattcagttcaatgtatgataatttatagatttatatggtctaccaacaaaaactttcaataaaacaattctagtattataactaaatgccaagacatgacttcaaagtttatattggtttgccggtggtcattttgcatatttctgttttggcacttttaacttattttcttaaagcttaccacattctatcttatagtataattcaattaaaattacaactataatgttttgtcatgtctaagttccgccacttcttctgtgattaacttgatccctaaattattctcatgacattttcttttgggatattcttttgaaaggtaata

SEQ ID NO: 71465 - DNA, 965 bp, Cannabis sativa
tgtatagtctaattctatagatggtaatggtatcctctttcaatgatcagcttattctttcactttaccttattaagataacgaaaaagtagttattactgccttatggccgacatttattaattgtgcaataatttcctttttatcatcatcaaatgggttactaatgtgtatgagagacctaagtcaaaaggatctcaacctcaacttgccacttttgggtgccttgtgatttttataaagatatattatatatatttcacttatatatattatatgtatgcatgtatgtatgtgtgggtggggtacatggccatcgccatcgaacccatgaacatattttatattctttttggtcaagtgtgattgatctatattatatatgatatgtttagttgtatggttggttccatgttgatgagctcttgtctattatatgtcggccatggatatgtagatgaaaaaggaagggtggacaagaagaagcgtttgagctgtgttagatttaaagatttcgagattaaaagaatattttggtcataggactagtctaatctacacactatatacatgaaaagaaaaatgttaattagtgcttatcaaacacaacaagatttggcatactgttagtgaaatttatcaaattaattaacaatttaaaatattaaaatttacaaaataatttcacttaatttacttacacggtgtaaatttatggtcattttgcgactatttcataatagtcatttatggtcgaacggacaggatcgtgtttttgcgatcatacaatattattttactaataaatttttttttaataataatttaataatgactatttttataaaatattaattcaatatcaaatatcaagttttatatattttttagtttaataactatatagaaaattaataatcaatcacaagtcaacacattatatacattaatgctcatataaaaag

SEQ ID NO: 71466 - DNA, 1751 bp, Cannabis sativa
tcccgggagtgaaaaccattcaagaaggtattatcttgtatttgaaggtggttgctaacttttctaagctactattatgattgtatatgcctctattcaatggttaaaagacatgatccttaaaaaaagaagacatgtttgatagctgaaatagggatatagaaagagtgataaaattaagtgcaaatgatttgcaagttgaacatgaaattaacctggtatgggattcagtaaatttacattgttacatagcgtaaatttcttttataatttggttggaactttgaaaactcattactccaatggctcaaacttttaccaaatttttattcgtctatcaaaattcctaccaatctagtttattttatagggagaacatcttgtttctattgaagaagatgaaaaaaatacaatagatgattagcaaactcctttttgtgaaagtaatgttatagccattcattattaatatccggtgaaaacttattaataagatgaattatgcaaattcttgtaggtgtccaagtttacaagaagttttatagtgaaaagaaagaacaacaacatggcgtccttgcaatacatgttacgatgccagcatcacagctatacattcctttggcttagatactctcagtgagcaaacactgcatttctggttaatgtaggttggttatgcagagcaaagtttatgctataatttgttctaactgccaaaattatcattattgaaacaggaaataagttgtgagggtattgaaagagtattgggcggtgcacatactagtggaacaatttgaaatgtactttcccaaaagcaatagtttctactacaaagagtcactaaaatcaaaataatcttatcatcttaacaaaaaattagataatgggttatacatccattttttattcatgctttgcttctggtccattgttgtacaagtataggtatcactaatactttatctattgttagataaggggttataaattagataatgctttgctttgccaaacaattggatatatgcgaatgccacctaaatcttaaatagtcacaattagccttggcattaatataatcattaatctacttttgactgtggttcactaacaccaattacatggcaaaacagtacaaatgatccttgtctttttttttcgtcaaactgttttttttttataagaaaataatactgtcagttgttttaaaattatttttatatttatctatttgtgatcataggcataatatagtagtttttttacactcttcttcacaaatctcacaaaaaagagatggaagaataactcagcacagagcaagaaaaaaggaaatttctctcaaatcatcttctcaccccttttttctatccaattatattttaaattgtacaaggacaaattttgaaactcaaagagaaactcgagctcaatagtttcgacatcatcttttttagaagttcacataatttaaggaggattgtgttattcataagtttggaataattcagagttcaaccgatcaaaaacttaattttttatatagataatgaatttatgtatagaattaactatttaaggtatttttgtttaaactatttctcattctgaatgtaacattttctgaaccatattcaaacagtattctaattgctaaccaagttctaacttctaacgtggttggcatatggttaaaaaattgaaaatagttataatttgcttagaaaaaagtgttagggtatcaaccc

SEQ ID NO: 71467 - DNA, 1925 bp, Cannabis sativa
aaagaggaagaaaggaaagggtggtcttatggaaattaagctagatatgctcaaagcgtatgatataatcgaatggaactttcttcaagaggtgcttaaaggtcacgactttgaccagcaagtttgtgatctaataatggaatgtgtacaaccggtctcctactcggtgttaatcaatggtgtaccgcaaaaaaaattctttccaaaaaggggattacgccagggcgacccgttgtctccctttctgttcttgctttgccatgatgttctatccaaattaatcatcaagcaacaagcaagaggccggtttcatggaatctcaatttcaaggtcggcccagcaatatctcacttgatgttcgcggacgatacaatcctgttcaccggtgctaatgtgagtatggcgtccaaaattttggactgtgttcataagtatgagctttggtctggtcaacaatgcagcttggtgaaatccagtgtcctcttttcgaagaatgtggaaacccccttgaagaccaatattctgaatgtgttgaaagttaaggagtgcgatggtaatgaaaagcatttggggaacccctttgtattcaaaaggaaaaaaagagacgaatatatgtttttgaaagaaaaggtgttgaagcggattgaaggctggaaaacaaagttgttatcgtttgcggggcgtaccaccttggttaaattggtggcactttcgattctgttgtacgcgatgtccacaaacaggttgcctctatctacttctcgggaccttgacaaggttattaggagattttggtggactggggactcggaaaaggagcgattcatggcccttgtggggtggggaaagctctgttctcgcattatgcaaggaggtttggggtttaggaagatggaggatatgaataaggcactacttgctaaattggcttggcagatggcatcgaattttaatagaccgtgggtcaaatgtctctcggagaagtattgcaagaaggattcattttggagtatacaagccagagataacgattcggccttttggaaaggcattcttggttctgctgatattattcgcaaaggagccatgacactagttggtaggggggacacgatcgacatatggaagcagccatggattccatggcttgactactgtgacttcctaaacctcatgaatcaagttaggccgagatttcctaaccttcggtccattgctgatattactctggataatggtaattggaatatgactcttcttaaggagatgtttggtgattcggtgggtgacagaattggtagaattgctcgtttaccgcttgacaacagggacgtggtggtgtggaaagaggcaaatgatggaatgttcaccgtgaagagagggtttgaagcgtctcaaggtaatgggcagagagtagagagtaaactgtggaagaaaatttggagctcaagtgtgcatttcagacactcgatcatgttatggagagtgatttcggattgtcttccaactagagaaaggttagttttcttccaggataaaacttgctctatgtgtggggaagcaaccgaatccaatacgcatatcttttgggactgcccttgtgcacgggcactctggtttagtagccccttctccattcggggagggattggatttgattggtcaattaaggatagattagagtggctgctggacagaacccgagtgagcattctgctagctttctttccttcgtgggctgtctattcaaaggaatatggaaggctagaaatgagcttctcttcaaagggggcgtggtgaacatccagcagattagaaactccattatgagacgatactcggagtccttcctatcaatggaggcggatgcggctttagatgcaacaacgcccggtgttgttagtaggcaaacaatctgcaataac

SEQ ID NO: 71468 - DNA, 736 bp, Cannabis sativa
gtcttaagggtaccaggcaccactggtgcccaatagtaatgctcttaaaacaaacaccccctaaggtcacacagctaatgatttgggcagaaattgccatctcagccactttgtgtttgtggtgtgtcaacccaacctcctgtttcttctcctagagtaagtgaaccggaggcctatcataaaagtaatataactattcttgaaaatggagcaaacttggagacatttttgtgtatagttgcagaaacaatattagcacattgtctttcaaaactgcttctactttattaagttcaaaattatcaacactaagaaaaataaaggatcaaaactggcataaaatcaaaaggatagatacatgaagcacgtatgatatacacaaattcggaaattgtatgttatacaccagttcggaaattgtgagctagaacagagaaatgggttatttaagtcgcatccaaaacacaataaagcttagatcttgaagtacttatatccatactcagggcttgtcatcccctcttcccaatcacccatgctacgacccccaaaaactatttgttgaattcctatatatctgtcagtcagaattaaaaacaggacaattacgaatcaagtgttttgcatgtgtaaaacagtaatttcataaacaatacataagcaaagatcttttagttttttgtcctaaatccatgagcaaagatctaagtactgataaaatggaaatgttatttta

SEQ ID NO: 71469 - DNA, 1118 bp, Cannabis sativa
  modified_base (32)..(38): a, c, t, g, unknown or other
ataaataattttcataattaactgctaatttnnnnnnnaaactaagcggtctttacagactaactcttgtcatatagggggagcgggtcctaagttgaattttagagtttaatttgtttgtggatgtcggcatctgttctgagcggaagcaggttggcatgggggcggttgtgtctcgttctaatggtgaagtaattttgtaataatcgcttagctttaatataagaattagattcaaaattatacttttaattattatttacgtaattatggagatatatttaaattctaggcgtgataattaggttatacataaattttatattttttatatttttatgcccagtaacagtagaatgcgacgtatggtctatagagttattttattttggtttagtactttagaaatagtgggccattatagatagacatttgatatgtcgggattgtacagggttattaggtttgaccaaaatacccataggtggcaaagttacttcatgacgaagcaagagataaattggtaactttaccctagattttgtctttagtgataggtggatttctactaacctttaattaatttaattttctttatgctaaaataggtgagttttattcatttaatcacttagaagcaattagaaaattggaaggaaattatttgtctttttctcccttagggttcgatcaaacccaaatcaaagcaaccagaaagttcttcaatttctagttattttctgaggattccaacagaatttctagtagccttagtcaatttcaagttcaaggtaatctctttacttattctctttaaaattcatagcaaaaattaggttttcatgcataaaatttgagttaaagttgttgtaagaattgtttaagtttgattctatttttagaggttgttttgatgttgtttgagctagtttaaacttctttggttgctgcttgttgtgtttccatggtggattgtgtttatgaggttattgtccagttcttttgtatgagttaagtttatcatgatctaattaggtactctagaaggtttgaggccatttggggttgaattgagacgtgtgtgaagtttttggggtttcctacactgaactggtcga

SEQ ID NO: 71470 - DNA, 1145 bp, Cannabis sativa
tataaatgtttagtttaccgtgtagtggtatttaggtaataaagttatcattttatatttttgatgtcaaaatttctaaaaaataaaggactttcttaaattatgagaaatatatatagaaaccatcttaaattgggatttgattacacataaaatgggaaagtaactttaatgaatctatctcacgtgttttcccttgattgggttacctgaggtgctaactgaatctctccaaccaagtcaacttcttctatcatgtacgacgagttttaccttgtttgtttattattatctttggcaagttgtatatcttgggcgggcactttagaagaacttttcctccatctaggtcttgatgacataatacgtcactcaaaaaaacatgccacgtcacccgaataaattcaggataacatttgcccccaaatccgcgtgcgaattttctggttggtttgtggacttgcccgacccacgtactacatgaatgaggtgacacgtgtcagatgaatactcatgacgaactaagccatcgattcaaatcttttggagcctcttttcaaatatttgatgcatttaatgtattgatatggattattgtgccttaggggcatgcattgacgactacacttatgtggagtactcattgcaaaaaatttttgggggaatcaataatttggattgggcgctcaaattacgcttatatcccttgacattcttataaaaatgaaaagaagtgctcattcggcacttgtacaccttttaagccttctaagtactagagaacaccccactccttttgattttcaagaatacatttagagacttcaagcattcaaccttcgatctcagctttgcacatttcaaccaacaactctaacagtgagtaagtatcttaatttatgtacatttttaacttattttcttacattcaacattacacatttttttgcaaaaacatatagatttatgccatacctgttcttcactaaattaaaacttgaatttatcctagttttgttgctgaatatgcttgcgcaggggtttaatttctgaattattgatcgtatacatgtttgctctgagaaaacttgttgaactgaggttctatggtactttggtgatttttgggtattttctcaatcttt

SEQ ID NO: 71471 - DNA, 1435 bp, Cannabis sativa
  modified_base (689)..(697): a, c, t, g, unknown or other
tctccatgcaagatatagtaaaattgtcaagcagaaactgaatggagtgaagcgagcccttaaggagttgtactagcatcccttgccgaccaagagaagcctataggtggaccaggtgagcatataggttggccaggatctaggcccaagatggccgaccaaaaagtgacttcccgacaaggaaacgatgtacaaagttgtcctccacttgcaagaggctaggcaccacatctaaaagtgggcctcctctttataaagaaatagtgatgtacaggattttggcagacacatgacctgtcaggtcttggtaggagcatgggtggccagacctcctctataggtacatgggtaaccaaacctcccctataggtgtatgggcagccaagattaacctggtaggactctatgtacaaactaaaatgttaacaaaaagctacctatgaattgggcatttaacatcctaacaagctaagggaaatatctactgtcaaggagcaatttagtcttttgtatttaataaatttaatatgtaaatatctaaggattttagtataaattacggttttaggcttcctatataaaggccttaactctaacctagaaaacctaagtcactaaagcataattccagcctccaaacaactctaagtctataccctagtctcgtctctctctctctctctcactcnnnnnnnnnctctctctctctctctctcttatgcacgtccaagggctcctcttacttaatctctcacacgcctctaaggctattcctctctctcatcagagatttgccaactcgattcatgttttgtatccatatagagagctatataaaatcccatatatagtgatttgaatagtattatctcttggtattaatacaaataaaaggggaatgggtcattacccactatcacagggggtttaacctctataataaatttgtgtgtttacttattttttttcattttatttgtgtaacacgtggcaagtatcagatccataggatcctgctgttggttgatcatttttttgaggtcaacagtttgatactttcattgagagtgtgtatattatatctgatcaaattccttggttaacacaagaagaaccctagtcgtacgatttacatcttcgggttccccacaagacccgctgacttcggatcccgatgttcatgttccagaaccaactggaattctcatgaacacaacagatgtggtcaatccttgccccatagtaggcaccacaaatctggccaccacagttagccagaatggcataaacatccttgtggatctaaataatcggcccctgccttcaagggaggaccgtccactggtgcctctaactgaaggaagaatccttggggccacccccaaagaactacaatcagatcttgtcctcaatactatgcaagaaagacaagaat

SEQ ID NO: 71472 - DNA, 1509 bp, Cannabis sativa
tggtaaaatatttccaacattctattctcaaggctagtgtgggtatgtcttttgatcattctattaacaccatctcgtcttcaacctactttcatatctcagcctgtatttaagaatgtaaaatttagtaacaattttaacagcttaaaagtgtttaagaatttgatcaagaacattgttatctgtgtttttgaatgggtggcacgtggcataaaaaggaatagataatcttatgatctcacaatttaaaacccttcaattcacgatggggcttctgtgatctgggaataggccaagaccaagaggtatgcagaggtccaccttgccttactttagcttccgaacacggaagacctattaaacctttggaccttagagtggctcaagcttaaaggttgcccaagtgatacccaaataggtactcgaagggcctagcacagacgctgactgcctaaaagagtcatggatgtctaccttgatacaaacccagatcccccagcgatcgttatgctatttctaacactacatcagatcttatatcctatgccaagatatggtagtgcatgcacctcacaaacctttttccataaagttattccaagaatttacttttcaaggttaaaccttttggtgaaatgcatccattacatagagcggtccatattgtccaactgcttcaatgcaccaacataaattcttccaaggggcccaatagttagatcttattttgcatgtattttaccctgttagtgggctttttgtagaaaccctaggcaggttatgggcatgtccatactcatccttcaacctataaatacccttctatttctatatgaaggggggatcacaacctagaaagaggaagctctgctaatactattctaagctttcttcttcaagagaaacatataatatagagtaagggtttcttgcttaaacactataaaaacatcaaacacgccctttgaggataatagactgacttgttgactagggttaattaacacctgaaacacataaaaaatctccatcttctgttttactgctatttattatttcttaactcttattatagtagttttgaaaatctcagcaaacattttggttctttgtttgagagttaaagaaagatctaaacccatagtgctattgtaaccaaggtgttaacacaaaaaaatagttcctaaaagactcctcaagtcggcctcgatgatatcatggagggagtaaatcccctctcacgaaagcacactcagtcgagcgatgggggaggaggagatgcatccaacagtgacaaccgagagggtgacctaaacaactagcacgatgacctagatactaagaatgaggaggaaaacaatgatggatagtatgtcaaagattgattttacaaagatggctatcattacgagtaggacctcaaagtttttaaagtgtccagagcgttactcaagactaaaaagaagttagcccctcaagaatttttttttagagaatggagaaaatcat

SEQ ID NO: 71473 - DNA, 929 bp, Cannabis sativa
acactttgactaattttacaatattcgtgtaatatataattataatttatttaattgcttctataaaatgaaattaagtatattggttaatcataaaactaatttaaataatatttaatttagtttttaaaaaataaatatttaaattaaataatatttaatataaattaataaatatataatttaaatacattatatttcttgatttataataggtttttaactgaataataataattgttattgatttggcgtcaaattttaggtctttaacgtcgattatatgtgtatatagtgtcagttatttgtatataaccgtacatgtggcgtcagttctttgataataacagacgtcatagggtaatatttaacgtcggttgttttcaatcctatagcgttgcctgggtcagcatcggtagcgaatttcgctaaaatcggtaaaaggccttaaaaactgcctctaaagcccaaatttatagtagtatccctatgaatcgtcagtcaaggctctgtcatgtagggaactatagcctactcaatgtggcacaaaaacacctgttactctcataagagtgccacttttaaggctctaaataagtgctacaatgagaactcgaactctaaaaggaaacttctcagatatctatgcaaagtatcccaacaaactacaccacacactcgtgggtactaagatactaaatattgatggagataataataatagaattaattgagcatatcaacttcattttgaaaatattgatgaatttctattttattgcctcaaataccattatatttttatattatttttgaaatgtacatactcaaattaaaaactatttacgcctggctattttttttatgctttttcttttcctgtttttttctctcgcttagttagtagctaaaacttttttttttttttt

SEQ ID NO: 71474 - DNA, 654 bp, Cannabis sativa
gattggatattggatcggagatcggatactttgtgaacacccctactttgaatttaatcgggttattatcgaatttgggcgtggatttttgcaattgaatttgggcttatcatttagttggatttctattgaattttgggcttcattttattgaattttgggtttgacccaaaactactttattgttcgacaaatatatcaatttagtaatctctatattagtaaaatatcacattcgactaaagaaatttttttgcaggtatacaatattattacttactaatttaggaatgtttctgttttgctagtaagccttttttttttctttaccctttttttcttttttaaatttatatcttgacaccttaataagaagacgaaataattataagataagacaaatacatcttgttaaggtgagataaagtagtttgataatctttaaaaagaaaaagtagtttgataatatccaatgcaaataaatgacaattttgtgatatacttggccaagaaaaaaaaaataactattgtgttatacatgaaacaaatttttttttattatcttttcatttaataagtctaattattttttattattattaaaataggtttttattttttttttatttctacactttataatagttttttttt

SEQ ID NO: 71475 - DNA, 1558 bp, Cannabis sativa
  modified_base (371)..(373): a, c, t, g, unknown or other
agcaaagaactatccaatcaacccaagttttaataaaaccaataaaatttaatgtaagcccaaataaaaagtctaacagtataatcctcaatctaacctaatttactattcaccctaagtgcatgcacaactaattcatgaaaaacgaacatgaactaagaatgccttagtaaaattggaaagcaaagtagcaaaaaaatctaaaaaaacctagctcatttcaaaagaaagagcgcttttgaaaaacaaaaaccaaaattaaataatcagactccacataacaaaagagaaagaacaacgtgtaaaaccaatccagcactatcattaagactgaagcttctgcttgaatgactaagaagtaaccaatgagnnnagatcttctgcaatatgtgaactttttgtgttttaaagtatagataaacaatctacaaaataccaaaaaaagataaatgatgtaaggaattaacatagaaaaaataaaccaaatttaaaaactaaaatttcaatatataaatacttatatagcaattaaaatatgaagaaaaacttatctataatatttactaatcctccaataatctttaatgtctccaaaaatctacacacttaaaaaataaataacacaaaaaaacataacacaacaaaaatacactaacaaactaaaaaaatgtgagaacataataggactctcctttgtgtacaaagtaaaataaaataaaatatgttgaaaaatatagttttgaattttatttttgttaaaaagtaatattataagaaaaataaaacagttcaaaacatcagtaaactaaaatgagtaaaaattaataaaatatttcttatactattgaaataatagaattttaaaaagaaatcattacaaaaataatgtatataaataatattttattttggaaaaaaatatttaatttgaaaaatttgaagaaaatataaaattaattatattacacttatttaatataaatttacgaagacatttatttaagtaataataataataataataaaaagcaattaccacttccgaaccgatgcaacaaccacttcagccaagacgacaccatcggaacccgaaccgattccgtccattcagtcggagaacaagaaacccacaacaacatctcctctttccgattcccattcccattcccattccactggccaccacgaatcaacaacgatcgtaactcatctacagaaatcccttagccaaatctcaaatcctatcggcgttgtcgtcacggagaacgaggacatatgcttgtacgtaggatatgataaaattcacaattcctgatcacctaccgcaccatagtcaccatcgcctacggccacgtctcacacgaagacggcgactacagaaccctcgtcacgaccattaggtgttgaggacatccataatttggaggctcatctctcacccattttgtcaactattccagtcaaacctcactcaaatatgtattttctgataaactataaaatttgtaaaaaaatctgtaacaactattattcctcatctccttctttctttctaatt

SEQ ID NO: 71476 - DNA, 1405 bp, Cannabis sativa
  modified_base (1304)..(1326): a, c, t, g, unknown or other
cttctgttgttgacaaagaagcaggttttgctatttttcacaagcatgaacaggtctttaaggactcttgggtcgttgtgggattctcctctatctacaatgtacttaaaggtgagctttgtggtattgctttggcttttcagatggctttggagaaagaggtgccaaaagttcgaatagaaactggctcgaagtcagctgctactgcttttgcggttggttcattactgtttggttggagcatttatcctttgttttctttttgtttgaacctctgtaagtcacttaaggaagttgttgtgtcttttgttcctcgatcgtagaatttgcacgttgggctagagaggcaaaagttaaaaactctagtttgttaagggaagtagtcctttttgtggctactaatttagttttctctaaataaaagtccataattaaaaaataaaaaataaaaaaaaacctctagtgtgcaaggtatcttagatttccattgaatgaacactttgaccactttcttactttttataataaaccaaaaaataatctaatcatatattttggattgcttgtaactaacagttatctcactattcattaatgtatattaactatcttctcatcagttgattataatacaattttgggctgtatcttctcatgagcaaatcaagtcatattacattctcaaaacaattgaataaattgaatgaggacactcttcccactcacttccaatcatctgcaacaatttttttgcagagattttctagctctacttttgttacacttgtcactattttagagtgctaacaagaagaagtacatcaatgctataggcaaggcaacaagcatgccaaaaattaccctgaaattttcaaaaaacaaatccaacatttcagaactcttttagagagatatttgaattaggattattattctgaaaacacacaaaagaaatcaaaaaagagaaaagggggttgaatagaattgatacccagtacttaaaatatcaggatgtacattatactccttggcaaatacaaaaggaacaattccttgaggaagagcagcctgtatgtacagtaccaaaaaaaaaaacacactaataagactcaatggagtatgcatcacattcagaaatataggtcaagcaccgcaagaaatgacataatgttattatgtcccacgcaatttaatttaacaaataatatgaaaaactgctaatcagtcataaggtactaccaggttcagtcctgaacataaacggagtaagtttgtaggagcaagttgaaaaataccacttttannnnnnnnnnnnnnnnnnnnnnntctaattttatattttattgaaacatacctctttttatatgtattgtacccaaaataccctgacataagagagtcacat

SEQ ID NO: 71477 - DNA, 1835 bp, Cannabis sativa
caagtaaatgctgagctgtactcagcttttaaataaataagaccaacggtcaaatacaatttcattctattgtcacatactcacatactctttgaatggaactacaaagtttaacaaaaataataataattattaatgaaaaaatatattttttaaatataagatcatcatatcattatttaatcacattttgaaaaattttgaaaaaattaacacaaaatataacgaatattagatagacagaccctatcaaaataaggtggagcatcggtcagtttgatcaattttattttatataaaaattttgaattcaattttcggtttggattggtgtaattcaaaaaccgaccgaccaattcaaaatttttcttaaaactgaccatttttaacctcgaaccaaacttctttttgttttctttaaaatatgatccaatttattctataagcatattattctatagcaacaaccatacaaattaattattcaaaaactaattgtcttattcttttatctttaatattaataaaataataatatattattatatactatgagtagctacaatacataaagcaaaaataaacttaataaattaatatatatatataacagtcggtttcagttttttcgatcagtttattaccaaaaaaaattgaccgttcaaaggcagttctaaccgttagcggttttttcggttttgattttcggttccgccagtttcaattccagtagtgttcggtatgtcgatttaaataaattttttaattttctaaatttcatgcccagccctatttcaaaggccataacaatattgaacacgtgaagactaaataaaagggaaatagtattatatggcagaaaaaaaccctaattacaagctggaacactattatatggcaagtgtaattacacaagaacaatatatatttatatatatatacatgcatagactgacaacaactaataaataattaaagattaaacctgtaattaaacctgtctttcattataagacaattctaatagctaacaatgtatttatactttatcactattaaagtgaaaacacataatgtaaatgtatacattttattgtggaataacacttctgcatattttgaattgaagcagtttgacttaacagtgtgtgaatctaaagtgtaaattgtttgtaaacacactatcactatcacacattcattgagaaagaaagaaagaaagaagacactcttttaaagtctgaattctgatatgaagaagaaaaacaacaaaaacatctcgacagattacaagtagctcctatcacacatacatacctcaatcataatcaacaagatcagttgttgtgtggattattaggatgttagccttaaaatttgacatttggtatgtgactaatcttggtccagtactcctcattcccactctccttcgggtcgtaatttttctttacaagagaacatcattttatggttaaataggtgagggaggttggaaatccttcttctgacaatgtttgcaactcggggcaaaacaagattgaaagtgtttgcaacgaggtgagttgtccaatcccattttagtctaaacctctaagttatgaaaatccccatatttcaagagaggtaatagtggtaggtagtagccctttcccgggaatgattctatatcttcactggaatttccaccaatagaaagtttggtaagatggggtaatgtttggcaattccatttcatcctcagaaatacatcacatgatatctcaagcgtagacaaactaacaggcagaacaccttcacctttagggaaggtctccatcaaaggacaatctacg

SEQ ID NO: 71478 - DNA, 2300 bp, Cannabis sativa
ttaaaaaggatctttccaataaaaaaataaaaaaattaaatgtataaaaattaaaatataagagaactttgccattaattgttctaataactcaacaaattctaacaacaaataattattaattgcaagaaaacataacaaaacaaacaaattaataaaaacacttgcttacattttgaggcttttagctacacacttttcctcaccaattcccatttaggctcgatcctgagtataaatggattagatttgtgcttagggttcatttagttcaagagcctaaaaaaaaattccttttaaatttacactttttgttttattaattttaaaaaatattatattttcttctaaataaaggcccaaaaatttattttatatcgacacaattattttaatatgaatccactagaatcatctggaagcaaaaagaaaaaaactttgagaaagcttttatttatttcttttggttaagaaaaaaagaaaaaggaaaaagaaaaaagatttaacagattgaacacttcaccaaattttagaattattgatctaactttatatcatgatagggttttgagagattaagtttatctaaaaacaaacatgtaaagataaaatgttaattctaaattttgatatgcatgaaattatgttttttgaaaattttcttgtattgaaattattagatttaaggatttctgtctaattctattcaattttactaatacaaagattgtctatgtactaaatcgtgctcacaaacattaatgattattaaattgtactcctgaactttgatatgtatcaaatcgtatccccttaacttttgttttttttgtttttttggcttctgttagtaaaattagataaaaattcttaaattcaacaattttaatagttcgaaaaaaattttaacggcctaaaaaatctagaggcatggtgttagattttaaaattataataaataaaggtgaagaaaaagacaatgaaaaaaatagaaaattgtacaatgtatccctaaaaggattttactgatgtatttcctatttgattcgacatctaagagaattttttagtcctttttattatggtcatttaggttgtagctatttaggacattatataaaattttgaaaaattttaaaaattttaatacgccgaaaatagagttcaaacaatttatttcgtacgtatataaaataaaagagtatcgcgtgcaataaatataatttgaatcttatttttagtgtgttaaatttttctaaatcttttaaaattttgtaaaatatcttaaaataattacaatgtaaacgattataaaaaaattagactaattttttttttaatacatcagtcaattttttttaaaagggtgcattttctcaaattgcccttgttgcttgaaaatttaaatagaagcacaaaatgaagaaaatctttgtataacctactacattgaattttttagttagacaacgtatacatgataagacttgtatacatatacattttttcaataattagttgctaaatttgtaggtagccaatatgctataatttactcaaaaattaataatggatcaataaactatattatcttaaataaatatacataattttatagaaaattttaaattttattattaaaaataaatttggatttcatgtttagtgtaatttattaatgataatttggattcccattttgtaaatagatcaaattgatatcatgagctcaatatttgattaatcgattttttgatataattaaatttgaaatcgttgtttggcatagatcttaagtattttgttaaaaaaaaaattgagctggatgtattaacttgttgaaaaattattaattaaaaattaagttctgagtattaatttaatctttctgtaaaatacaatataaaatgtgttatttaacaaaacacaaaaatcaattgcttatttatgctaaacacaaaggctaaattagtattattttcttaaattagaagaaatactttatgttaattttgaaattataaattacttaatattcataaaaaaaaagtatatttgaattaaattttatttaaatataaatttggttaaagtattaaaataaatagtattctttaacttctcttttttttttttttttgaatgcaacttctctcttattattttgacagaataaaaaaatgtatatatatagtcaaattgttaagatggtaattatacataaaattctatatacatatatatatatatataaatgtaaatggaatgcacacactaattaaacacataataatatttat

SEQ ID NO: 71479 - DNA, 955 bp, Cannabis sativa
atttacagataattttaaataactataacatatatgaaaaaaataaattaaaaaattttgttatatgccgaaatatttagagtagacttacccattcaaaaaaaaaaaaaaaaaaaacatggccgaaaaaaacaaaggaaagagaataatttttacttctaacctttttcaccattaaaagaaagtaatacatgtacaagaattgaccaatttttttctttatcccaaacatctttctgtaatcttttttttaaccacttttaacagtcttaagattagggatttaaggcaagattatcataaaatttatattatattgttaagtcaaaccattaaaataaagatacattatagattagataggtgcaggtggagcattagaacaattagaccactcctaacctaactcattgccactcctagttttaaagtcaagtttaaattaaaagcttaagatcaccaaaggcaggcacagagtttaaggtcggcctactagaacataacattttttgcatataatattagatttgggtctattcaattccattaaattttccctttaaaaaaaaaaaaaaaaagaaaaactctattagattttgataggtataagtgttactttagtgtagacaatgcaagttaagaccagccaaacctaccaactacattttagttatgggccaccaccccgaatacctagactcctcatctatattacatgaaaaatcatttatttaagcatgagtggtctattttatacattttcaaaacctattttcatttttcaccataaattttatgatcataacttgtgagccatgtagtatgtagtatgtaccatcataccatttaattattgcttctttttttaatctaggcaaactatacaaattaagttgagaaatttagagttaaaaatgtaaagtttttttcttatcaaattgttaagtaatttagt

SEQ ID NO: 71480 - DNA, 974 bp, Cannabis sativa
tgatgaattatctcgaaatacacatgcaacaatgtattgtctcgattacacagtcgcagtgcacctgctctcaaataacatgatttgaccaagtcaaataccgctttaaataccacttttttgtattttaaatgtaaagcagttatttatacttatcaaatttttcagttatatgtgaaacgtaggcagtaaccacccatcaattgtaatttttcactaagataagattgagtaaccaccatcctattattataaataggggttcgctcataggaaaaaggggaggcaattgtgctttacagaaacgtggccaaattgtaaacccaaccaaaactcaaaaataatatggactcgtggagtatgtagattttaactacaaaactaaataaaaatatctagtgttcatttattattttttgtattttcttttcttggtttattcttgaattaataatcttcttagattaagttgacaaaaaattgcgtcaacagtttggtgctttcattaaaagaaaaaaatttcaagagattcaagaggaagagattcaaaattcatcatcttcacaatcccaactatgaaattggttaaaattaagagtctaatggaatcttcttatgctaattatcgtcaaaacatgccggaaacatctttaaaattcttgcctactttacacatcattatatgtgaagtatatataagtctttggtgaccaaaataacatatataaaatatatacatatattcatatatatatataagaaaaagattatatatacgtatattcatatatatataagaaaaagattatatatacgtatattcatatatatacaatatatatatatctatatatacgagagaagtgttgaatggtgtcaacgttcaatactaataagaagtgttcggattgttcacttactgactattcaagtggttgtcaaaggatttatatatatataatttctaaagccaa

SEQ ID NO: 71481 - DNA, 1475 bp, Cannabis sativa
ttgttttcgtgttgtttttatgaaaaacgtaaaaatgtaaaaaaaaaaaaaaaaatctgtaaacgtaaaaatgtaaattttctacaaaaaaaaatagtgtctcttgtaattatcctaatattaaaatcattttttgttatatttagaattttaactctccaaattattaaaattattaaattgtactctgaatttttttgatagttggatggtaaaaattcaaaataatttttttaataaatttaattacacaaagcacaacaattattttactaaaatataatataaatctcacaaattactccaaatatattaaaactaatgataaattttatcgttttgagtttcatttttttcccactcttatgtttttctttcactctactttatgtgctacaacacatgcttcgtacgtgaatagaggcgaaagcgacgcagtaattaaagtggccagtttcatctaaaaagaaaaaggaaatacgtagtggagaaatgtcaacgttaccctttattgatgatgaaactcattagaggggagagaaatcatgccatgttattgaatattttatttgttttgagggaaaacgtcactaacgaataacagtataaaggtacacccaatacccatacttctttataaattctatttaaacaaacaaaactttcatgtaagaggatcattagagaaaaggaaatgtattttatttatttatttatttgtaagatggggagtggagagtttccttccaccaaccaattatataataccatgactgaatttaaacaaaggagaaagaaaaaaaaaaaaaaaaaactcatcgagaaaatggtttaaaaatatacagaacacctagttaaaatgagcttatgccatttgatttagctcatcaacgacaactcagattacataatagtttggtacatgttttctgacttgctctagtctcttctctgcttcattaacttttatataatcaagcagctccctacttttgatttgataagaattggagcacatcatcttttgtgggcattgctggaatggctcctctttctgtaactgtgaggccaccgcaagcgtttgcaaaaagtagagcttctcgcagtcgcttttcatcctgagaattcaaaccaaagttactcttaagatcactctataccacaagactggccataactatgttctataaaaataattttcaatggcaagtaaatgtggtggcgttgagcaagaaaaatgtgtacctgacaaacactttggtcagaagctatgctgtttagtaccccactgacgaaagcatcaccagcaccagttgtgtcaacagctttaactttaacgccaggaacccggcccttgaactcctgtaaagaatagaattttaactgctagatgatcccttggaagataaatacaagatatgctcactgcagtagtaatagtttcggttgactatactacctttgtgtaatatctg

SEQ ID NO: 71482 - DNA, 845 bp, Cannabis sativa
gagactcggtagggaaaagaaaaatgcactcaattgcttgggaggttctttgtaggcctaaagtttgtggaggtttggggtttcgttctactgaagccaccaatacggcctttcttatgaagtgggcatggaagattctgatagataactcaagcctctggagtcgattggtggaagcaaagtacctaaagaatcggtgtgttttagatgtggcacctaaaaactccgactcaattctttggaaaagcatcctaaatgtcagaagccacttatcaaagggcatttgcaggaaaataggggatgggaaggcaacctctatttggttccacccttgggttcccaatggcactctccaaccccaacctcgagcggaggccgcgggtaacgttagtcttgtgagcaacttcatatcggccaaccactgggatgaggatatggtaaggcgttggttcaacagtgatgatgttaaaagaatactcaacatcacactgcctctggaaccaacaaaggattcttggatttggactcctgaagctaatgggaatttcagcattaagtcagcctgcagagtagtaaagaacatgggaatgaggaatgttgagaattctaaatggaggataatctggggggccaaaatccacaatagattgaagatgttgtggtggaagatactagctaactacctactaactcaaagtaagctcagctccttgttcaaagtggatgattcaaaatgtcccctgtgcggcaccgaggtggaagacacgatccatctattctggtcatgccaatatgcgagagcaatttggtttggaagtctatggcacctcagaacagagaactac

SEQ ID NO: 71483 - DNA, 905 bp, Cannabis sativa
ccaccctcttcaaacgctttctgaccacaacaaagtattaactttcagcactgaacgttctaggatgaggaatagaaacaaacccaaaagcaatgtaacagatgaaaagcaaagatatatctctagtcacctctaggttcgaaaaatcccacttgaactggtaaaggatgtccagttgatcccactgtcatacaaagcagtgtagcatatgagcaacaaagaagcaaaaccttcatacaaaatagtttaaaaactcaaaatataacgaacctctgttccaacaggaaatgcagccatccataagtcctcctgcacccgtgattagtttaagagaaacgaaaataacaacctcataatcacaatgcataacctgccgccatagttatgcagcaatgccactaaaataacgatcccagctcaagcaacccagaatttctttatgggctcacaaatataccaatgttgtttcttaacccaaattccaatacaaagataaatagctcaagaatcaaattgttatccattttcgaacacaagaaaaaaaaaccccacaatctccaccaacatgcccaagaatcattataacaaaactataacctatcaaatagaatgttgacacataccaagttgcgcttatcctcgaagtactcaggctcggattcgggcttggaggccttgactgcacgagtggatgacttcttggactctttgtgattgtcgacagcttcgtccgcctgggacgccgtcttcctcttggcacctttcctcatatcgacctctgttcgggactgcttctggagagagagaaagagaaaagtagggtttggagcgcaaagcggtggatccaaattcgaatttagagagagagagagagagagagaggggggatatcgagaagatgaaca

SEQ ID NO: 71484 - DNA, 1977 bp, Cannabis sativa
  modified_base (26)..(33): a, c, t, g, unknown or other
  modified_base (538)..(562): a, c, t, g, unknown or other
  modified_base (827)..(830): a, c, t, g, unknown or other
aagtcaataccaaatatagtattgtnnnnnnnnatactaatacaatacaatacaatctaacacaatacaatatgttgtacaaaacgagccctagtataacttataagaaatctgattattgatagtgtgctttacctgttccttaccataattgttattttttttttcttagaagacatataaatatatttatttatgtgtatatatatgtttgtttaaacaaaagaaactggtcttcaaaattattattgcgctaggaaaattattttataatttttttattttttttaaatttacggttaagttgctctgatagttgctttggtgatttctatttagattgctatgtagattttaattgtaatttagattactctattggttgctatgtaaatttgtgagtataaaaataaaaaaaatccttataaaataatattatcaaattaatgtagatataagaaatgcaaacaataatccatatattattcattaattaatattaagagttagtcacatattgctaatgtgtggaaataannnnnnnnnnnnnnnnnnnnnnnnntactcctcccattgccaattagttttgagatggaatctcgttcatcttatccctaaattttaatatggtatcagagccacttgtgatccgttgtgagccagtccaaacagatactttcattgtctccccttttaacctccatttgtgacctttcggctaatgtgtgccaatttctaatgttgtggtctttgacctgtttcaaaaatctacaaatatcctgacctgtacacccacaaatttcccaatatttggccttgtgggattnnnncaaatgtcacgttcggtcctatggtctcttaaaggtccgtttactatacctacacttcatgcccaaacgtgaggatggtgtattaagagttagtcccacattgctcatgtgtggaaataaattgtgatatataacatgaatggacaactccacccattgccaattaattttgagatgaaattccatttatcctatccccaaattctaacaattaagaaataatattcatttatattactatagtataccatgttttttctaacacctataataataagatgttttacaatactaattatatatagatttttttgaaagattatatgtttaagtattaaattattaggcttcgaaaaaaaaataacaactaactacaagcaactctaaatttaaaaatttattgctcattataagctttgacacttgtcaatttttagaacatattaaaaactatatatcatgaatttgttcccattaaaaataaaattataatttgtcgttcataaattaatagttatagaaggttattttttttctccggccaaacccactagctttacttgggcataagtgcggtttgatcgaggttgtgttttgttatagcaattaagtttttgttattgtgattagtcttatctctatgatatggttttaaagttttaatcttgtctctgtgacatggtattgagtgttttagtttagtctgtgtgacatggttttgttttgtttcgttattggttgttctttgttgttcgatggctcgccatcaaattgctgttagtggttgagaatagtaagttctttgcgacttaaggagttattagtagtgcagttacttaccttgcacaatagttgagtgctcaagctacgagattgaatgaacatgctgcaacagtttctactgttgtgtcttctgagcggtagataaaactaaatacaggtgttcttaagtttaactatgatgctgcaatcattttcatcttttttttttttttgtctccaacggaaaaaatattctaaatagattgcatattattattttagcttattgttattaataaatttacataatttattagaaaaaaataaaaattatttcaacaaatgaatcgccctaataaatcaaagggaaatttgatattatatg

SEQ ID NO: 71485 - DNA, 587 bp, Cannabis sativa
tttctgcgatataaaggtgttaaacactatttctctgctgtttatatctcagccacatgactaacttttaagatgtgttgacacccaatctaaatcattaatgcctaccaattatctcattttcagagaccaaaatattttcttgcgcggttttgttaagtaaagtcctgcctcactatgtacattgagccagttacataaacagccttaattaataaggagtgcatttcttgtttgcagtatagataaggagttagattgattttaggcataaaatccgtaatgaatcaggagttgtatatgatcggtatccctgcgttcttgtttgcagtcaagttaatgagatcagtaggatgggtttgttatataaaagctctagtttgctgcaagttaatttcatttccacaaataattattttgaggagcatcagtgacatgtggagaagtaggcttgcaagtgcaacttgaacttatgcacaaatgtgttagagaatatattacagcttggcttaattaacatttgacacaattacttatattgtattgctgaaagtatgctctgcaacaatgacaatagacaagcctta

SEQ ID NO: 71486 - DNA, 1003 bp, Cannabis sativa
ttttatttacatatatagtaaatcaaaagttttttcagaaaaattaaaaattatttttatgtagagcaacagtgaaagatatgcaaagtattaactctaacaatatatgatctgtaaaatgaaaataaaatcatgactattaaacacaagtttctaatattgattttcttttctttgtatgggaatttcacttattgaaatttgatttaaagattaagattgtttgtgaagtgtgcaaattctcatatgctaaatgtcttctaatagaaaagtagataattagcctttctttagatttgtaccacttatcattaaattgtcatttgggccattgacaaatataattgtgtaaagattacacaagtttctatcataaatggaaaattttaattttccttttccaattgcaaattatattggacttgtttaaaaataaaaaaaattgcaaattatattggaccttcttttttaaaaaatattattaaacatggaagagatatttaattacaaatctgtagaagttgtttacaaaaacaaaattatatttttgtaaataaaatttgtattttttctataagattttgcattttgcatttttgtttatttttaaaaagtccccatccaaaattgtccattgggccatttaaagtttctaatcatactatggtttaggagtaatatagagggacaatttcaaaaaaaaaaacacaaaaacaacaacaacaaaaaaattacaaaaatacgatttgtacagaatttttaatatttttatggttttttaaattttatttacataaaatacggtcttttatatatttttatgttgcactcttattattttattatttgtatattatttttgttgtcgttttgatgtttttttcttattacttttattgttggtttcttgtgtttttataaaatactgtaaaaatataaaaaaattaaaaaataaaaaaaaaaaaaaaactttcaatgtaagaatataaaaattttacaaaaa

SEQ ID NO: 71487 - DNA, 2023 bp, Cannabis sativa
  modified_base (1239)..(1248): a, c, t, g, unknown or other
ggctgcctcgcagctataagtactagccacaagatcctaaaactatcgacatcacccttctcaaacgaatatctaccaaaacttgtttttggggcaacataacacacggttcctctcatactaggagtactactatagcccccactctctgggatttctccactactagagttatgactaccacttcgccaacctcgccacagttcaccactaagcccatctaaccaccaatctaaactacccttactcctaccattgaatctcttttcccctttacgtacaatttatcatcatgtaatcaccaactgtcgccattatctaccgaactcgttgttcccttctgttgttgcttcattcttttcttctttttcttagctagctcttcatagtctcttccttccaccaatccatcacataccttctcttttcctttttcttcaatattttggcactcttttcttcatccatttgtaccaccaatccaattgcttcttattactcttctttttcttcttctcagttttctgagaagataaagctagaaaatgcagttccaaaatcttaggcctctagttattgatctcagtaccgatccactccatcacagagtccataaccttgagagaaatctcttggttggtcttaggaagccaaccgtaaaaaattgggtcaaagcccccttgactaaggtggcgagagaggcaacaaaagagtcggtggtgtggcgtaagacggagtaagggaggctgtgaggtggtttggagactgagtcagcttctagggcagttctcttgcaagtgatcttatggaagtacacgatgagaaagaagagaaaagagaaagcagcgcttgtggcggtagtggctgtcaggggcggaagtagaggaataagtgtataattgcaaaagaaatatatttgtgaattatatttcatatgaccgtataaatgaataaaaagtgagtaggctcaaaaaattaatatcatattaattaacaaaattcgccacaattgtcatatttaactaataatttaggttagagacaataataccctaaaatcggtgaaacttaataaattgaaatatcatattgcaataacacaattgttataaattataaggtgtttttataatgcacatctctaactaaaagagtcacgcggcagaaagtttgaattttattttcggcgtgttaacattttttaattttttttaaaaattttgcaggatgtcttaaatnnnnnnnnnntacacgaccataaaaaaatagactaaaaaagtctctcgaatgccgaaacatgtaggagtatatcagtgcgccatttttaaaaatgtgtattaaaaatgtgtattgttttcggcgtattaaatttttttaaatttatcaaaatgttgtaaaatgtcttaaataactataatatacacattatataaaaaaatagactaaaaaagtttgtctattgtcgaaaaaaaataagagtacattcctacattacttttaaaaatgtgtatggtaaaattttccaaaactaaattcttaatttcattaatacaacaatataaatattaattaaatataaaaaaatactgtaattacgacatatacaccgtgcattctagaaaaaacttcaaaatggtgtgttgtgttaattcaagtctcttggagcattaaccacagcatttatacatttatgccggctcgttgagggtgctcttagcatttctctaaccaaatgcttatttattttccgttttaaagaaaatataggtataagaaataaaagctgtcatgcatccaagttttcttgaaaaggtctttcaactagtatctcccatcgttttcgcaatagcccaactttgtcaatgccattagaaaaaatgtgccccctgcacatcagcattacttctttattattatttatttatttcttaatgtaatttagtggggttcacgttcacgtgataatagtcacagattttacaaacatacccaacaaagtttaatatttttctttactctttcc

SEQ ID NO: 71488 - DNA, 1045 bp, Cannabis sativa
tctttgtgactcacgggtgctctgtgagggcaaggagaaataagggcagccatgagacgacagtcttctctgacgaatgtgcatattgacttatccggcttgtatggtcgggttgtcagtagtttttttgagttgcatctgatgtgtattttaacttactgttgtatatagcttttttgtaaaacttttgtaacaggggatcttcggaacaaatttttagcatcgttatctttttcattactagggttttactttagtgaagtttttaatatcatcacatattttattaaataattaatctactattactaagctatcttccaaaagcacacacatggcgtttcaaaaattaaggtgtgacaatataactgtgggaatattattgttctatacatgttaacaagtggtcctatttcataaagatttgaggactggtaacaacaattctgggttttagatgaagctatggcaactaaaaattcaacctaaagtgaaaaatcttctttggtcagcgattttaggttgttttccaagtggtctgatgtttcgcacaaatcatatagacgtttctcctgcctgcccagtatgtaaatctgattcataatcgattatgcatgttcttgttacatactcgtttgcctttgctgaaataaggtaaattcaacagttgccttgttcagttctgcagcttggagcttggctggatagtattttttacagtttttataaagacatagtttgtactactattgtactttgttgggctcttaaaaagtcaagaaacaaacaccattagaaacttatgttgtggctacaacttcctcaacattagagagctcagtgtttttccatccttgtcatctttaaactttgtttctaaagatgatagagctgagagatagactaaacacgttcttaacacaattaaagttaaagttgatgtctgtctaaaaaaaagttaatgttgatgctacaatgtttgaataagatcagtggcagatctaggatttaaagtgaggaagggcgtaatttttttttttttttg

SEQ ID NO: 71489 - DNA, 1149 bp, Cannabis sativa
  modified_base (877)..(879): a, c, t, g, unknown or other
ttcatattttttaattatttttttcaatttttccataaaaataacttttttgaaagaaaaaaacatatatttttgcaaaaatataaaagcttacaaaatttataatttcctcaaattttaaagatagaatagagaaactaataaaaatgctctaagtatgtaaataattaaaataaatattattaagcttttgtttttaataattcataaatagatattaaagaaatggtaccaatgagagacgtagtcaaaaagctcttgctactccacttaaaaaaaaacgttcttattaagcttttttagtgagagagagagagagaggtgacattaatgctcttctcttctataccataacaatagtcaatacctcaatacaaatactaagtcacacaaataattatatattaaaattgaacattgttattatttatcagtggtgtccaataatttttaaaagtactgtattactttatgattagttaataatattctctaaatattattatattaaattatataagacttgatacttaattgcattaacaatcatataacacatataaagatactaggtaccaataatactttttaacaattcttattaaaattaatctttttaaatttgtctaattcaactaaatatatcggtaaatagtaaatattgaacattgttattaggtactaatactgactagtactagcacagagtggcacttgacgataattatcattaatagcgatattatactttttattgaggataaggactattggtgtcttgtagcatttatcataaatattgttataaggcatcaattgttttcaataccactaagagacagtgtttaataaataaaataattattaaattaaaatnnntaaaatttaatattaaattacattaataatattatttgactggcgttatttagtaatttttaaatagtattattataagtatggatggaaatagagcgttttttaatcttcgtccttggccctatccttgcatattctccatcgactggggggtaaggtggcaaatctctattgggacgaataatctcatttatttatctaaaaaaatactaaaaaaaaaattacatacaaataatgataatatactatgctaatactttaaacagccaa

SEQ ID NO: 71490 - DNA, 2507 bp, Cannabis sativa
aagtcttctcataacataacttttttaagaaaagaccatatttttacaaacttatactttaaaaacaataaaatgaaaatttttccttaaaaattgaatttcaaacaaagggtacaagcaagtaagcttcttatgaaatgttagctttttttctgctcccatcacccaaaatttaggggcaaaagataattttcaataaataatgttaacttaaaattttgttaacatttaatgaagctaaataataaatactttgaatgtatatatataatctagaataaaacgattaatttaatatgaaattaaaaacaaagaatttttaatgtggttttatagtttattctacatacttcaccattctattttatttatgaggttgttatgaacagggatacaaattgataaaatttaactaagttttttgttgtccctttcacctatgtgtttctgtcatttatagggactagatagcagttatctggtcctgtctatgtaacagtttatgaaacgtggatagtgatacccttgttcctaaggatgccacgtgtatttttggaacataatttagtaatagtagattaactatataatcaaatctgtgataatagtaaaaacttcaccaattgaaaaccatagcaatgaataagatgacatcactaaaaatttattttgggaatcccttgttacaaaaattttacaaaaagagttatatacaaaagtaaatcaaaatacacatcaagtacagcccaaaacaactcctgacaactcgaccacacaagtcgggtaaatcaatatgtacatttatcggaaaagactatcatctcgtggctatcctagttttctcttgcctttacttgcaccataaagcacccgtgagtcataaagactcaacaaaaaaagtaaacataaatacatatcaaactattaaccaaatcataataatttaattaaacagtaacacacaagtacttgtctaataagacaagccatattttttactttataaagtaatcatttatgtttttgtctaataagacaatcttgatgccttatcgtggcatccacatacctctatcattgtctaataagacaatcgacaagtatgaaacctaacagtggtttcaacttaacgtcatgacttttgtttaacggtaatcattgtatcttgacctcgatcataatcgagccataaacgataataatcgtatcttgacgtgttatgtggtacgaatgtactttcttacctcaagttccaatttaggtatgtttttttgacccaaaatagagaaagatcaatgatcctggatcctatgtcacaacaacgaaaaagaatcgattaatcaacctgacctaacatgttctaggtctttaattcatcaccataagttcccatattgatagatagaatagaaataccctaaatattgagaaaataaaaaaaattaaagtcccgtgacaagtctcaaaacgaacggtctgttctaaaaatgatcgacttattttagaaatatatttttagaaataggacagtctaaaattccctgtccgatcttaaaatatacataacacactcaatattaagccaaatcttaccaaactttgtagaacacctatacaaatattactgctagaacttgttactttatggctcacaacgtggccaaatgggcttttacccataaccactttgggtgacactttgggtgacttgatgtagctactattcctataaacatttttagtaacgaccgtgaggtctaatattttattaataaatgtatctttttaaacaaaaaaaaaacgtcgcacgatattttttttaactaatctaaatttttttaatattaataataataataataattagcgagccataatctcatgttgggattaccaatgttatgaggttgattgaaattttcaataataataataggcatacggtagaattctgggtttaattgaatgtagtattttaaatttatttttccagaagttacgagtgtgaaactaagaaatgtggtaacaagttatagattatgaaaagtagtatatatttcttttttttttttctttttttttttttgagtcaaagtagtatatatttcttaaaagtgaactatggtacaagtatgccaacttagatatataatgttgggttacctatccaacttactacaatatgggtgagtttaggcttccatgaatatagcacatcatgtttacacctaaataaaaacaaacatgttttcaatagtatcatactttaataattctcgcaattttattctattttaaaaatatcatttatagggaacatgccaatatatttttagaagtaggctcctcaaagttattggggtaaattgaaaaatatctcttttatttatcaattaactaaatttacttctaatttatatttaattgaaacatactcctttttatatgtattttactcaaaataccctgacataagggagtcatatgaagagcatattaaagtgaga

SEQ ID NO: 71491 - DNA, 1199 bp, Cannabis sativa
tgcatggggttctagagtcgcacaaaaatgaaagcacatcaaagcttaaaactattctttttgagtttctcacaagtaatgtttgcaaaaagtactcaaagttttaaatttgtaactaatataaatttattaaaaaaatttagtaatataagtaactaatattagtaaaattataatttcttttaaatttgttagtacaaactctgttaatattttaaactagacacatataagattcaaattctaaattattagatttggattgttacgtgtagtatcagctactttcatttttttagcaaattaaaaaattaagtcttgtcgtaaatttaaagcactatcggtctgcattgacgtagttggataaaaattataatttttttaatattagttacttatattgctatacaccttcttacaccaaggccaacctttaaagttatggttttctatttgaagcctagcatacatattgactttaatctttggtgcaatttaagtttgtatgctatatatcaaatattttttttttctatatttttgtaaatagcctcagtgttattggaaatcagaatgtctagcacattctaagttatatgaaactcgatacttaattatacttatatcagtatgccaccgagaagggtactaggcaccaataatactttttaccatttctctaataaaaattatgagaaacttacacaatacacttaaaaattaaacttttttttttaacattttttgagatttttcttttacattttgtcaattttttttttttatttatttgctgagaagggtgttatgcaccaataatgtcttttagtatttcttttagtaaaattatgagaaacttacacaatacacttaaaaattaacctttttttttaattttttttttacattttttgagatttttcttttacattttgtcaaacttttttttttatttatttatttacatttttacagattttcacttattttttccaacgaaaaatgttattttcacgatactcactcctagcagtaacgtcaaaacaatattgttttgaaacaacgaaaaaagaacactctgtataattataaaaacaaatcacgttatttttccgtaatatcaacgtgaaaataatatttttttgaaaacaaccaaaaaaaattccatattttgtaaaaaaacataaaatctattaaaa

SEQ ID NO: 71492 - DNA, 1437 bp, Cannabis sativa
tattttaaacaacaatataacataatggtaactaaaagaaaatttggtaatgaaattaattatgtgatgtttaagatattatttagtttctttacaaattttgtaaaatatctattaaaatcattctataaaatactcatgaaataataagttactaattagtttatatgtatatatatatatatttaattttaatatttagttactcttatttgataataaattacaaaaaaaacttaaatattgcttttgattttaaatatattatcgaatgactatcttgaaaataaaactcatattaatatctaaaataaaatagtaattttttttggtaagaataataactaaacaaaaactaaaatagatagttatgtaggtatttaaaaaaaatatatatatatcgtacagtaaaaggaaaaaaaattggctaatcttcacataatagaaaaagaaaatatcaaagaaaaagactgacatgccaaagaaaaaaaattaaaatatgcacatgtattattttatattaagtataaaattatacataatatttatatttaaaattttatcggtatgtgtataaataattttaatattacgtatataattgaaagttctccttatctttatagaaaggtccaaattttttttttgcttatagcccattttaactcaaggccgaccctgaccactaccattaaatgacctaataggttattaatttaagtatttctaatttagctccttagtaaattagaaatatctcttaatgtatttacacatttagcacatgatactttaatactcaataatttacaattactaaaattatcaatttatttaggtcaaattttatatagcaatatacacaaatacatatgagcccgcattaaaaattttaatctaacaagatatattacctggattgatgcttggaaatggctgaaaaaacaaggtatttgtattggagaggaatgtttgatttgtgatcaagagaaagacacacatgaacatctttttttagatgtgtgtatagtagagttcataatatacttaactgggtaggtaatatgatcgaatcagtatagatttgaaagagtgttgaattagataagaagataggcaagtatagagtacgaaaagaattaataatcaatgcatgtgtttatgcaattcgaaaggtaagaagtagaagtctatggaaccatgaacttccaacaatcacacattttgtcaattttgtaaaaaaaatgtaatagctcaaagattgagtaatatagatacagggaagattcggagaaaagatagggattggtttgaaaagatttgtaaagtgaagtaattgagtttaatggttagttctgatttagattgttaatttactcaaaaatatataggggaattacctcatatatcccatagtagcgttatccaccatagtta

SEQ ID NO: 71493 - DNA, 1007 bp, Cannabis sativa
acttacttctcttcagacctatcttggttgtataatcatcaaatctcctattctattgtcttggagattgttttaaaatgtacagagactttcttaacaagcgcaccatgtaatcttttccaacctcctcaaatctttcaggttgtttcattagaattctttcttctagatgtccatataagaaggcagtcttgacatctcactattccaattcaaggtcttgtcatgctacaagttccagcaaaattctaattgatctatgcttaacaaccggagaaaatacatcgttatagtcgactctttccatttgagaaaattccttagcaacgaaccttattttatattgtgcctcttgtatactcgaaatgtcttcctttcatctgtataccaatttgcatctgatgactttaccatctttcagaattagtactaagtcccaagttcagttctttttcaaggaatacatctcctccgacatagctctattccatttcttccggtctttgcttcttatttcttgtgcatagctcgtgagctcttcttacacaatctgattagcaacatgaaatactgatgcaattagatcaacatgtctatatctgttcggagccttctgtctcctgcctctagccagcttataattttttagatcatcatttctagaatcatcttctgaatcatcactttcatgatcaacaagcattttagtctgcactcttgttggacgctccacctcaagctcagtttcttgtgctgcaatttctgtctagtcatgtccggcttgactactagcaggtttatcaataaatcccataacaaatttattaaatgtcacatccctataaattatacaatttctcattttgggttctagataccacaatctatatcctttgactccttttggataccccaagaaaatacacttcaaggatcttgcctcaagtttatcttgcctgatgggtgcatagcagacatatccaaataccttcaagtgttcataactt

SEQ ID NO: 71494 - DNA, 2174 bp, Cannabis sativa
  modified_base (1632)..(1646): a, c, t, g, unknown or other
attaagatgggacgtgtgattgtggcctaatgtggttgtcatgaatatgcatatgattccctaattgtgattggtgacttagtactaattttaggtgttttaggtttgtttgtattgttaattatacaatataaattgtgtttgtatgtgtaatccaggtataaatgttttgtacatcaatgttagtagctaggttagtcatttctatatgatatatttttacttggtattaatttttttttattattattatttggaaatatggtcatttttgtaaaattaaaaattccgtacaacactgcacttttgtaattttttttttgttatttttgtgtgtgtcttattttttttttttaaaaaaaactattccttctttatatattgtcatgccaagtcctctttttatttttatttttataaatgttaatcttcttaattatgataatgagataatttttcaagagtacttatagtcttatactatatagtacagtcaaacatcaattaatccgaagtgaaatgccaccaaattttattatgtgtttgtctgtggggttaggaatttgcataggtactttattaagtgaccattgtgtgaatatatataataataattcattaatttaggtagatatttttataatgttaattatgttccatgcaacgaattttaacatacagagttaggtgtatagaataataataataataataacaataaaaatactaggtggttaaatagatagaacagatcaagataaagtaaattttaataaagtacttaatcatgttgacaactttaaatattattaatttcattttgatcatctcatctcaattctcatgacaagaagatcttaaactatgttcagagcaaactacttatcattttaatttttaatatcattattctgcatatacctagaatatattattctgcatatattatatattgttcagtatatatatggttgatgtgaaattcaaaaaatcataatgttaactaataaacttaaaagttacataaatgtatatttttttacacattaaaagttacctaataaacactttttttcttaaagtttttaagaaaacattgtaattaagcttagaaatttttaaataaaacataaaaaaagtactaaaatttgactcaaatgggcatttactcaatatgggctagtgggcaaagtctcaagtctataaaatttgggcttagtaaataaaggcagcccaatacatattattacatattttgttttgaaagaaatatattatttacatttacaagcatatgaaaaaaaaaaaaaaaaaagaggaaatttgattgtatacctactttattttatttgttttaatttttatttttatttttatatcctttaagatatacctatttttatagatgatatccttattataccctttaaatttatataaattatgtactagacttaagtagaaggtgagggtatattggcaaattacttccaaaagttagtacatttaaatgaaatataatataaatatatttttaattaatagatacaaaaaagaagtattcctcaattttttcaaaaaaaaaattgtatatgtgtccttattgattttctttctttcttcttcttcttnnnnnnnnnnnnnnntttttttttttttttggaaatttggtttaacttcttcttacctttttcatttttttattgttaaattgtcaaatgtttttgttttaaaaaatgactgaaatgttgggagttacccaatcacaaggaagaaatgtttaaacgtttaataaaaaaaaaaaaaaaaaaaggaacccacaaagaataatagggtttttttttttttttttgagaaaagaataatagggttaatactattttagattttgtgtttgtaaaatttttgtaaaataataaattagaccatacaattataaaatagtacaaaatagtataaaacagtacactgagtttaatttttcgataattttttttaatataatcaacttgaaaataattttttaacacgaacagatgcaaaaaaaagtatttaattttgtcataacaactctagattcagttattattaatttttattttgacaaaaaatcagttcatagtactattttgtactattttagaaaatacatgtcaaatttattatttaataaa

SEQ ID NO: 71495 - DNA, 1545 bp, Cannabis sativa
ataattaagtatatctatcatatataagaaaagtagagataaatagattacaatatcgggttacgggttataatctgaacaaaaaaaaaactaattaacaaaacccgaacccgaaacccgtttgaagtctttttgggttgaacccgacccgactacacaggtttttaggggatcagattttttgacagcgggtcggggcgggtggtcgagtttttcgggtttgtgggtctaaatgtgcatccctattagccgcaaatttctctaataataataaataaaatatttaatgcattgatttctttcaaattaaaaggacaaataagctattgccaaatatggtagaataaattaatttgataattattttttaaccctcttatttatttatttatttttgacatatttacgatgctgacattcgcaatcgatgcaagaacctcttcgaaccagaatagcttattatttaatcaaagggcatgctttgccaacccatgagttgctgaaataatcgggctacatgggacaaaattgtctcgaaattcagacaatacaactttaacgacctcaaacaacacaccataagagttatatttttaccctgtaatactaaaatactagaaatatctcaaaacaaacaccataaaataaattgtagtaaaatggttatctacaaacaaaataatatttcaataaaatattaaattttcagtcactatattcaattaagttaaaaaaactaatgaaaaacaaaacttaaaaataactagccaaagatgtaatcctgctagtagcaacatactaatataaaaatcagaggtcaaaatataattaatactcttatataatcaataaattcttctaatcttatttaagtatgagaattaaaattaacctaacaacattaaaactattatgaaatattataatttagagaaaggaaatagagaaaagatgggaattttcttagtgttttattccaatgggtgatcttctatttatacacatataagagtcaaatattaagaaactaagaaaaaagaaatatttattacaattaatgataataaataaaagatttagacatctatataattattaatatttataacactcccccttggatgtctataataaatgccttattaaaaacctcgctgagaaaatccagtgggacaaaactcggtcaaggaaaaaagagtatagtatgaaattactcctcctcattttagcattcatgaagatcctttaattgacacattctaatcttgtgagctatcttctcaaaagttgatgttggtaatgactctgtgaataagtctgcaagattatcacttgatcgaatttattgaacatcgacatcaccattctcttgaagattgtgtgtaaaaaagaattttggtaaaatgtgtttagttctatctcctttaatgtaccctcctttaagttgagcgatgaaagtaacattatcttcatagagaattggtggtatttctttattagatgttaatccacatgttcctcgaatatgttgtgtcattgatctta

SEQ ID NO: 71496 - DNA, 1173 bp, Cannabis sativa
  modified_base (1118)..(1123): a, c, t, g, unknown or other
tgagaatagtataacggttctaaattatttgaagcctaaagcaacataaaatttttgaagactcttataaaagtatttttcgtatcatactaggttaaattatgtgacggtttggcgtagttgtaaaatttatttaaatgtgataaaagatcaaaagttcgaaaccctagcacttgtgtaaaacgaaaatataacttactgttacattaagagtcattattcttttagtataataatgtatgaatttacattttattatagttaagtttataattttcattaaaattttagacttcgattcagggttaatacacaagtctagtctgtcttagtccaagaccgactcaatagaataattataaatttaattcaatttagtttaaatatttaattccatggcatctttttctcactcctttgttttttcttctccttttttactttgtaattttgttttatcatacatatatagttaaagtgaaagagattgatgcattttaatctaccgtataaatatactaaataaataattgtttctaataatattatatgcattgtgagtgttccatatatattacacgtatatttgtaacatgtgatgcatgtttgtttagaattgtattactattagaattgttattatttaattattaatttaaataataataaaaattaaatttaatacaatttaattatatttttaaatatataaaattaaatttagttttgaatttatttataaaaaaaaatatatctaattaattttatgaaacaataaaataaataaataagtttagatattttaaactatatgggttcatttagtacgccctataacagtcgtattgtattaaataataaataacattatgtttggattaaacaatgtattctattaattattacgacccaattttttaatacaatatatgttgtattatttaatacataataaatactttgtattagcttgtattataatatttacaaaagatttggagtcaacaccaatctctaacccgaacccggatcgggactcgaacccaggacccaaacccggacccggtatacccggtacccagacccgtagttggtgttgggatcgagtgtattaaaannnnnntataactttacacaatcaattaatataagtcaataccaaatattgtattg

SEQ ID NO: 71497 - DNA, 806 bp, Cannabis sativa
ataataataattataataagatagtgatcccaaaaatatctaaaaaactttttctttttttacttaatttcctttcattgcttgacaatattattaattgtaacatatgatagtactagttttgtttttccctctttggcggcccctatttacactaactaaatatataataagatgcatatttctttcattaaaaataattaattaagaataataataaacatatgtacagtgatatgatgaatggctatatattataaatagatagaagagagatattagaagagagagagagagagaaatggggagagggaaagttgaggtgaagagaatagagaatccaacaagcagacaagtgactttctcaaagagaagaaatggtcttttaaagaaagcttttgagctttctttgctttgtgatgctgaacttgctcttatcattttctcttcttctggcaagctctaccaatatgcaagccatgagttagtactattaattaattaattaattaccctttcttcatattaatctaattattaattaattaatgtttgttaatcatggttcagcatggacagaagcattgttagatacagaagtgaaatgggattgcttggatccactcataaccaacgttctacaaccattgaggtattatatatatatatatttatatagatctatatgtatgtgtagatgatgaatttgtttttgttaaatatattatttttaagagatttttttcttcttctttatgtgcagttataggaatcgttgttatatatattagtcgctttctcttata

SEQ ID NO: 71498 - DNA, 737 bp, Cannabis sativa
gtttggaaaattggaaaaacagcatgtgcgggttggtttaaaaaaatagttaaaaaccgcaccacccgcaccacgaacacccctactgatgattaaaggtctggtcctgttttgcttctctatacagtatgacttcatctcagatcttcatttcccaaggcatactatgagtgtatccctcgaagatattgggtgttagcttcttcatagttttgtagtgttagaagagataatatattatatgaatataaattcactcttacatatacagcatacacaattacactattattactattacttttcatagcaataataacaaggacagcaattcaattcaattaatgacacttgaattacaccattactaatcattattcttgagcctgtatgttacaattactaattacatcaaaatgatccggtgacaggcatgtttaatatttttagacctattcagatccgattcaattatatattgaatgttaaattttactatccgatctgatccaattaaattgagtcatccaatagatccgatatttattggatgttggattagatcggttctatctggatgtattttatatatatttattgatttaatttgggtttattaaatattttagacctaggatccatttaacattttaggtccaatatgtattggattggattagatccgtccaatctaatgttaatttttatatatacatatatattttacgtataataat

SEQ ID NO: 71499 - DNA, 1139 bp, Cannabis sativa
  modified_base (1081)..(1086): a, c, t, g, unknown or other
ttttaaaaaaaaaaatagttatatatattggagtaaataagaaaatattaagggtatatataatgtataaaataattaaaatgagatgtttggattgaattttgtaatgtattaattactataataattgttgatggtaatgctattattcaataaataataaatgttgctttattttattatttaaaatattttactaatatttttttttctattttattttacatatttatattatattatacattattttttttataattttgtcaaaatcatttaaataatatatttataatacacacaaatactaaaatattatatattacataatatttagggataacttcagaaagactaattaacaattttccgcttaaactttgacatatatcaaatcatgtttcctgaactttttttttttttgaaatagaaattttattactaagcgacactaggcacatctgctaataaaaaagcagcagcacaatttggtaacatgtctgtccaaatatcggacttctaggtcaaacgactccacttagctaaactattagcaactttattacaacttctagcaaaaaataaaaagtccaaggcctgaaaataacccctcaaatgcttgatatcctgcaccaactgcccccaatccgtgggattagtagcattagtttttaaggcttgaacaatatattgactgtctgaccccacttgagcattcgagattgaccaacggatagccagcttaacacctaagagaatggcagcagcctcagccagcagcaccgaaagacaaccagtgataaattcagcttcagcaaccactaagaatccattggagtcccttataacggcgctaatcccacaatccgcctgaccataaacaagagatgcatcagtattaataaggaagaagctctttggaggaggttgccaagtaagggctggctgaattgcgccccctgaacttttttgaccgttaaaaattacccctgaaatattgagattgttagatttaaggacttttgtctaatttcatttatgtgctaaaccatgctgcccagactttgatatctaccaaatnnnnnncctcaaattttgatatgtactaaatcatgtcccctgaactttcatctatgtta

SEQ ID NO: 71500 - DNA, 2010 bp, Cannabis sativa
  modified_base (50)..(57): a, c, t, g, unknown or other
ggcctatttttactattttagaaaatacagtgtccattttgtcatttaannnnnnnnaaggtctaatttgtaacttttacaaaacgcggatccaaaatggtattcacccttaatgtaatatgaaaaaaaaattaataattttaataatttttaattttttttttttttttttatacattttaaacttaaaattttactagataacggtttattattttactaaaaaagaatttttgtaaaaaataaaaatgaaaaaatttgctatgttaatggaaatttacaataatttcaccacctaaaatcttttgagtatatacgagcgttgcaatgttgattaaccatgagcaacgacaagtcgtcacacagttcaagagaacattttcgatccaaaacgacactttacaatcaaattatctttattcattttaatgtcgtttttagataggatgttgttcatagtggtatactatgaaccttaacataaaaactaaagctgaaaaaatggagaaatacacaaaggaataataataataataacaaactaaaattaagattataaataaggataatctattccaaaatatatggttgtccacaacaaacaagcaaaattaaacaaaattggaaatcctacaatcagcaaacaaaataaaaaacacaataaagaactatagctgaaattaagactttcttcttagacaatagcattggcagcacttgcaattcttggccatagatcagcacactcttttccgattggtccagtaatggcagaccctgcaatacaatcaccaaacaaaaattattaattccaaactcagaacatctctaaagtgaagttacaagtgatcaaagtttcaatatctacataacaaacccatcacccatcaatgatcaaaatgtcttttttcatttttttttcaagtgaaagtctcattcactattacaaaaatctgatcaaactagcaaagcatttgtatattatatataacactaccatctcccatcaattaagaaaatagcttttttttctccaagtaaaaataaaagtcccattcaatattatatgaaccagatcaaattaataatgcttatgtatgtattatgtacataacaacaccatctcccataaaagatcaaaatataagttttttaatgtagtgaaagccacattcaacattatttgaatctatcagattagctatgcttctgtgattataaatattaaaagcataaggatgaaaatcagattacctttcatttctcccttggggttgacaatcacaccagcattatctgcaaacacaatatcaagttcatttgattagaattatgaatcactaaatgaattctcataataacttaataaccatactattaaataaaacaactaataagaacaaaatagttatatacgattaaacatggatacaagaattgcagtgttaaaattcaaaaccttatacacttcaaaatgagaaatcaaacaaagaaaccaaaacccaattaataaaaagatcaaatcatgtaccagatgacaggtaacacaatgctattgacaaaaaccattatgctgtttaaagctggtacttttaacaaagctcaatatatgcttctcaaaacaaatgaccaaaacccatgatttggtcactcagattaaattcagggaagcaacaacaaaatcaaaatacaaaaacaaaaccctaattctcagttcaacaaacgataaaaggaattatattataccttcaaagtacatgaagacaccgtcctttcggcgccatggcttgcgctgacgaacgatgacagcaggaagaaccttcttacgaagatcaggctttcctttcttaactgtggccataaccatatcgccgacacaagctgaaggaagacggttaagacgtcccttgatccctttgacggagataatgtagagattctttgcacctgtgttgtcagcgcagttcaccgtcgccgccacgggaagacccagcgacatccggaacttgt

SEQ ID NO: 71501 - DNA, 1074 bp, Cannabis sativa
agctctttgtttactcgttctgaacaactttcattgtgtattctatatatcccaagatggactttttgtctagccaatctcacatattaatagttattattcacatcttgctattgcctatatggtactgagttcgaatatttctattaactgtaattcttgaggtgagttatttaatgtgcatttaataatgcacgactttggctatttcatattcctatcctggtacaagtgctagcttcttattgctagccgaaatttggatataacaagactatattcttgagagcacgacttccataccttgaattggaaactgtttttgattgcgtagtagctcaggacactcttgagtatttttttgtctttgtatgcctctcttttttcaacttctgggtgaaatttatctgttatcagctttgcattgttgatatcaacctttgaatctatttttttttatagttgtatttcaacttttctaccatttcttcagcaacaagatttgcatagtcaacaatgtcgaattggttgttgtcacgttcttttattttagattcttcttcttcatctgctagttgttttggggtatttaattctgttgttggtgcgttgttctcaagcattaccacattttcttgttcttatgttgtttttgatgtgataattagtattgcagtggttgttgtattgttgttctgcgtgttgacacataatggatatgtatagtgaattcaatttctttaatcttcagtaaaataagctcgagattgttgaatattgttatcggaggtattcctcttttacttggtactggatttgcatggttgtttttgtgggatcgcattccaatgaagagagtagaatctgtaagttgttcattttgcaatcttttggtataaattctccactagcctcataattgatataattttttccttcttcccattgttcattgctcttcaaaagaatgagtatacattccataacttgtaatattttgacagtatttcaacaattcaatattttcacaaatagacaacaattgtaaaacaactctaaaaaaccattgacgct

SEQ ID NO: 71502 - DNA, 2472 bp, Cannabis sativa
ttccaactttatgaagccatcagctcgctcaaggaactcctccatattgttcgttgagatcctcctaatatctttccaaaagtcactcaaaggtaggatgccttcgagtatggtcgtatattggcctttttctgtcaatcttgtgaccttggtggccttagccatgaaccattgaatgtaatccttcaagggttcatcttgtctctgctttattttgacaagatcctccagtcagcaggaatttttcttgaagcagagaattgaatatagaactctcgggagagctcttcccaagaattaaatcttcctagggccagcttgaaataccattgttgggctatttcagctagagttgccaaaagattcaacatcgcacatctccaaatacttgtaggagatctatttgtatcttaaagtacttcaggtgcacaagagggtcttcttttcccgtgtaaatcttccaagttggcatcttgaacttgggaaagggcaagggattaatttatgccacgaatggtgatccccttgacctttctagctcatgttttgaaggttttggaccagcttggcccttaatcatgtctcgtatttgatccaactgtgcttgcacagaaggatctgttgcggcaggggcctggttgattagccttctttgattgagctgtggcctcaaattggccagagcctagccgaccataccttgagagatggtatactcaaggtcagacagccctgagtctgctacttatacatggtcagccaaccctaagctaggcagggcctgaccgcccatacttctgtacctaactgatggagtttgtgcgttgacatggagtagatcacaccaattgctagagttttgtggatttaactttttgaagtgattaatttcacttctcaaattgttgttttgggtgtttccacctgctctaggtccttttcggttgaaaattgatcttcgggtgactcgttcgccttgggagagtgctcttctctagccagccataaggacttctgctagagtctgggcagtcatggatacttttggaggagtctagccggccatggggacttctaaaggagtctgttcagccatggggactcctattggtggttggccggccacaggatggatagagggggttgttattgagcttgagatccctggctagccccccatgccactggttgctgagatttggctcttttccctatttgacctttgaagaaaggtctgtcctccatcttgaaagggaagatatgtcctagttcttgaggaactgggttgatcaacatgtcgatagaccctccgtgatctatcaattagtcttccttgaagtggatctctgacgagatcctaacctctttaatcggttctctggttgaaccaccttatcagattgttggcctctctattgcggcaatctaacactacctagtgagatcaaaggatgtactcttcttcatccatccatctcaggaattcgcatctctactgagtgagtacatcgcaatcaacaacgcttggttcttcaaggaatttgcatctctattgagtgagtacatcgcagttagcagcacatggttcttcaattaggtcagcttggcaaacggtctctctaactctagctaactttagatcttctcccaagtctacatgggctcgccaattcctggtctcgtctctcctgcatagtactgaggacaaaatgttgttgttgttcttgtggggttcccctcaaggattcttccttcaattggaggcacctgtggagggtcttcccttggagataggggcttactattcacatcaactaggatgcttgtatcgtcgtggccaactgtattggctagatttgtggtgcatgctatagtggcaagattgaccacatctgttgtgttcatgggatttccaattgtggttggaccatgaacatcgagatctgaagtctgtggctctcgagggagacccaatgatgtagatagtgcagctagtgttcttcttgtgttatctatggcatttgatctgatacgacatccatgctcttaatgaaagcaccaaactgttgaccttaaaaagtgttcaaccgatagggggtcgtatagatctgatgatttccacatgttagacaaacaaaatgaaaaagtacaaaacacacagatttgttatagaggtttggccccatgtgatagcgggtaatgactatgtaacaccctaatgctaaggcacactacagtgctatctttgctaatcaaagaattttctcaaaaaacgtgtcaaataaaaacttttataataaatattaaactttataatttacatagtcatttacaaacaccaggatcccatttctaaactcttatacaaaatgtacaaaaatacataaccaagtcgcacagcgactacaaaatactaaaccccaaatgtcccgagatcaaacactccaggtctcgctgccacgacatgtacaa

SEQ ID NO: 71503 - DNA, 2349 bp, Cannabis sativa
acgattgggacataccttgtggggtcatgcgcatctaaatctattctcttgggaatttcttcctcaaggtcatcgcatttggggtttctttcagtaggacccctttcttgggttggtctattttgggagtctgtgttccatggggctcttttctcgatagatgcaccgtctcttcttccatgactggttcatcatgttgagtgttttccatgacgaggaagtctggttatgttgcgtagatgtgttttgagttttcaattttaaacaaaggctctcattgaaagcacaaaactcttaattcaaaaatttattaacaataatgaaggtttataaataaaattaaaatattactaaatataaataaaatgaaatgaactttttacgtggttgtgtagttgaaatctagatactccacgagtaagtgttattttggattattcttttatagtatttatagatacacgataatatttctgggtatctttaatacttaatctctcaagaattttctcccaaaaaaggaccccccatctttgtaggtcctatcccagtttataggattcttagaaatcatagttattccttttttatcttatctaaataactgtttatgaaatgtgaataatcatcacattttatatttacaacatgtgggataaatgaattaactgttgataactgtttttttccttatcagaaagcagtttctttgccgagatattatacctaaaattttcctcacactcttcaacaatgtttaggaatgattggacgtattttgcgagacgctagttgaggtgtttttctcacttttgctatttatgactaatcttgagataacctttaaggttgtatcctctattatccatttgagttaattctttcgcgtggtctatgagcattctaagatagatcgtattttgctcatttcttttagtctttcaacatactcgtgagcatgcagattaatgagctgcaagctcttaaaaaactcgttatctaccgtttctagcgattcattcctttgtactctatttatgtcctgtctatctcggtcaagtccgtgatgaccttatgatgttgtgttcttgctaaccgttatatttataattttatcacttttattagacaactattttataatacaatacgagaccaatatatcatttaattgtagcatatcccgaggtgagacacttatttaatcttcacgtttatagtttttctcaatctttgagacttatatctacatgtcgtgtctatatttaatgcttgaaatattagcataataattacttgatataaatatttctttttattattaaaatatttttatttcattatttctctttttaattatattaaagcatgatacattatttaatttagttatcatacatatttatgtacatatgatatataaatatatatttttttttacaaaaatttgttaattacttttatgatttaaatttaaatttatgttatcattatttatacttaaaatatattttaaattctattagttttaattttttttagaaagaaaacaaatacagtccattctaaaattaaacacatttaacgcaattcaatccaatccaatcaaatttaatctttctaaatctaatctaatctaatcatgcctgttaaacaggcccttagagcattgctattgcacatcttaagttatctaagactacacctatgttgacacttcataattggttaataattttcaatattattaaattaaaaaatatatgacttgatattaaaatttatacgaattgcaatatactacctcttctgttgtttgacatcttaacgtgaccttttgcatttctcttattatttgtagcttaacatcatcacaatagtaatttatggttagtgattttctatattcatttaattaaaatatggacatctaatatttaattacaataatcacgttatatgtagagtaaagtaggatgataaatgtagagtgcaagtatttttcccaaaagagtgtctaaagttgatagagattgatttgataactatttgtaaatatatatgtataggacaaatctcaggccttattattggggtgttgttaggatgtactggttgaatttgatgaaatacaaaagagttaaattcaaaaaaaaaaaatcacactatgacattttgtagtagtacatgacagtctcatatatgcaaattattcctaaaattaaatataaatatatatatatataaagagcattgatattgggtaccagtgttgtctagtggtgcaagttcatgcatgtcgtgctggcctgattcatatttttccgtgcttttcaaaaaacaggtcgt

SEQ ID NO: 71504 - DNA, 1315 bp, Cannabis sativa
aaaaaaaaaaaaaaacttaatgggtggttatttgtccacaaagatatctatgcatgggataagaagaccaaaagttaaaaaaaaaaaaaatagaaaaatgtgcagtcgttacataaatccccataataattggcaataaagtcatttttttatcataaagataagtcatttgaagagtccaatacacgactaggcaaagtttcctagtaaaagcttttatagtcaagactagagctgaaaagtctctatccgtatagacgtctgcatagggacttagggggcaaatgttatcccaattatttcccaccttacgtggcatgtccacataatcataattgaaatcacgccgaatataacctgtcaataaccgaacaaggtcaccttgcacgacacattaattgtcaacaattctgaggctatcaaacaggatcaagcaaggagagaatggccatccagggaaccctggccggaccatgcctggccgaccaatgaagtcccacatgacggctaggccctagaaatagggctagccggccaatgtgtgcagacaacctcaaaggaaagcttgaacaaatcgtggggtccatagccaccttctggaagattctcaagctaaatttcagttacgggatagatccatcaacccacaaagatatgcatattccctcaaagatattagtccaatattctaaggatttagttagtaatttaaatataagataaaaagatgttatttttcttattctagaagatatatttacatatttgaattatgatcttttgtaaaccctacactatatataaagaacattagaccacatgaaaagagacctcaagcccaagtctcacatgccccatagcctctttctcagtcctccgctccacttttgtttcctagacactaaatctatttcctttacaaaaatctcacaagttcttcaatctgtaatactcaattcttattattgtactattgaaaagaactatagttagaaattacaaggtctaagcctgtactccatgcgatattatctcaagaataaatataactaagagggaagtatgtcattacccattcatcaagggagccgaacctctataaattcacgtgttatttttattatttattattattatttacatgtggtgaaaattaataattaataagattctactgtcacttaattaaattttaagtcaacatagccacggttaggagtaggggtgttcatcaaaccgctcaaactactcaaaccgcccgcaccgcaaaaaaaatgcagtttgaaattctttgcgatgcggtcgtggtttgaat

SEQ ID NO: 71505 - DNA, 1473 bp, Cannabis sativa
ttattaatatagtactaacataatattaatatggttcaattaaagagtcaaagtgaaatattatataattagggattcaataataaattatgagagtacacgtatatattcttagagttattgtttatatatttaatgtctataaattgaattttaagtagcttaaaattattaaataagttcttatactaattatatctgtaatttatagttatataagtaaattgttataaaaaatgaggagaatgcaattggattctcaaagaagatatttgtaacaatttgtatatttaaataaaatttttgcaattgagaaaaatttaaaagaaaaaatcctatttatgtatattataaataagcataattttggctactttatatcataacgttaggaaaacattaaatttttttttttttattgaaaaacaaacattaaataattcaataagcaataatcatgctaaaagttgtcttcttcttttttctttttcttttgtattaatgtggttttaatttcataataactcttcaccttttgtattaatgtgttaatagttgttttttctttaagaaattttttgtacaaccccactgcataaaattagaaaaaaataatagtttatgggtgtgaaaactaaaaaaaaaaatgtctctttttaatgaacataattatctattttaaactagtcaaagaatagcttattttgtctaaccaaattattatccctttcctttgtactatgagaatgttccaccgttaaactaacgaacttttactaatacctcaaacgacagaaaaacggtgtcgttatgacaagaagaagaataatagttaacgagggtctaaccgttaactaacgggaacacaaaaatcgcgggaaaataaaataaccaaatataaaaaataaattaataaataaaattataattgtatgtacataatatatatatataaatatataaatgtacgtaaaagccagactagttccaacggccacaccaccatttccattcttaaccaattaatacccaaaaataagaaactgctcaatttcctaaaagctttgattttttttttctctttgaataatctgacaaaaacccaccttggcagtttcaatttcaattttttttttttttttttttcaaatttagttaaaagaagtcaaaatcagatagatacgccagcttcttctttctgggaaaatattttgtgttttggtcaagccttaaagaatctgtaagttggtttttctcatcatcatgaatattgagttcttctcttaattctgttttgttcaggtgcccatttggttatactttgatctttttctgggttgaatgaatttgttatgaataaatatgaaaaaaactttactttttttttttttttgtggaaaatgaaaaaaaaaaaattgttcattattaataactgttgattttatttgtataaagtttcattcttttggttat

SEQ ID NO: 71506 - DNA, 1162 bp, Cannabis sativa
acatggttacagaagggaaatgaaaattcagcaattttccatgcaagtatcaaaggaaggaagaagcaaaacatcatactgtctattgaacaagcagatggtacaagatgaatgatccaacaaaaatagctgaagcttttctgaggtactataatgacctattgggatccaaaatgcaagatcgaagacatgtacagaataaggtgatgcagatgggccctactgtaactcctcaacaagctgattcattgttacttctttttactattgaggatgtcaaagctgcaatttttgagataccagggattaaagctcctggagctgatgggtttttaagcttatgctttcaggacaattgggatgttgttgggaatgaggtttttgaggctgttgtttctattctggacacaagcaagctgtaaaaggaaataaactcaaccgtcataatcttgttcccaaaactaattgccccaacactgtcaaagactttagacccattgcctactgcaatgtgatctacaaggtagcaactagactcatttatctagactaaaacatatccttcctactattgttgctcagaatcagggaggtttggtgatgggaaggtacattgggcataacattatgattttccaggatttgattaggcattatgggagaaaatcaaagagggctaattgtatgattaaacttgatcttcagaaagcctatgacacaattgagtgggatttcattgaagaggttttggtttccttgaagtttccaaggaagtttattgacttggttatgatatgcatggcttttttgcatcacagagaggattgaggcaaggggatcctatgtcccctctgatctttgttctagaaacggaatatcacactaatgaagaaggttggcgaaaaatctgatttccatttccatgagagatgcaggggtttggagctcaatcatctcagctttgctgatgatgtactgttgttttctaagggagatttcaaaagtgtcaagtacatgctacaaggactgaaaattttctcaggtacattgggactttttcccaatccatctaaatctgcaatttattgtagcaatgtgccacaaattgaaattgataggatgctggctgcctcggggttcaccatccaaaaaaccccttata

SEQ ID NO: 71507 - DNA, 1318 bp, Cannabis sativa
tatggtttcatgtaataagtttttaaaataatttttttttttgcacattttttataattatgttgtttttgttgtacaaaaaagccctaaactttaattttactttggtctcataagtgttaatgtgaatgtccgtacacattataaatttctattgatcaataaaatattaattatttaaatattacaaaaaaaaatcaaaaattaaaatcagtaaaataaatgataaaagaattcaaaaatataatttttttcctttccttctattttttcttcgtgtgtccaccattgcaccatcaggtacttgtttggaggaaattttaatgggtcaacaagagactcagtgttagaaacataagaatggcccaataattgaatacaggcaaagctcacaaaagactgagaaaaatttaaagtttaaattaagagtcaagatacgggaacataactaattaagggggtaacctcattgtaggagtcgaagtaatatcgaagaatcgatttggaataatttcgaagtaagactcataatctgtgtaacaaatagagatagaatcaatagcatgctttatgttacccgatgaattattatataccttttcattgcgggtcatccagatcgtatctattacaatcaaagcatttaggaacaacttgtcagtatccactcctttagacttcaagttccagagaaaagtaacctgatcccaaacacgggcgctggaatcaagcactggaaaaactccccaaggggaagatctccaaagatggtatgcgaagttacaatataggaaaagatgctccatcgattcctcacccacccccacaaagagagcaagagatctccttaatactcattctctgagttagaagggcacgaataggcaggtcatcagaaagaatgcaccaccagagtactttatgtctctccaaaatttttgagttccagagtttgttccacactgcgggggcaacaacacaatatgaggatctctttaaagcgtggatcagataagcaaactttatagtgaattcaccatttgactctttcgtttaaacccacttatctttaccaaggccactacaaatagtatccgaatcaaagagggttcggagtttaggaatgtcccaatccccgttgtctagaagaagctctgcaaccttggtcaccccaagggttgggagtaaaggccttagggtagaaccccttaccatgtagaatccgcatgtctgtccagatattggtctctttcctatcagaaatcattttacacgcacattttttcaagatttttttagatttcaccacattcttcca

SEQ ID NO: 71508 - DNA, 1879 bp, Cannabis sativa
aaaaaaattaaaattaaattaaaaaaactaaacttataaaaaaaaccacaaaataaaataaaatattataaaaaaatttagaaaaagacaaaaacaaatctttttttgttgtcttattgtggagatccatttatatatagatgtaagatataaaattttactcttattttatcacgcgatctaattctttctttatttttttgacacatgtaattgaatatttaatatttattaaaataaattaatttttaaaaatttttctttttattttatttttttattttaaaaagtaaacaatgtttaaatcagtatatatcaaataatttcataagttattaaatttttttttatataaattttgttaataaataaataaacaatatgtaaatttaaataatacttaataagttgctaaatattttttttatttttatatttagacaattaaataaaaactaaataataataagacaagaaagagtttacatcaaagctaaacatccatcgtacaaaattagttttaaccaattcacaaaatataataatgctacaaaataatcaaaccaaacttttaacattataaccaacaacaaataaataatacaaaaccaattttatcacattaacatcaactaaaaaataacacattaattgataaaaaaaaggtactaaaactagttctatcaaacacaattaacataattgaccaaaagaaatgaattaaaagtaccagtttctataaaaacattacacatactctaattcgtatgctcatttcttaatgggccctttaacctttttagcaagatcaatgttattcccaatgtatgcatatttagttgaagaaccagtttccatctgctaaacattaaaaataacaaaaaaaaatcgtgaaaaatacaataaaaaaaaaactcatcaaaataaataagtataacaactcaatcataaacacactactaataaaaaaacaatacccaaaactaaggacggacccacttgaattattgtgggggctatagccccactaataaaaagattgtcttttaaaaaattaatttttttttttttaatttgataattatagattaaaatagtaaaaaagctcccacaaaattaaataaatttaataagagtaattataatatatgtataaatattttttaataataaataaacacccacaaagtaaaatttctaagtccgtgactgcccaaaacaataataacacggtacataactaaattcgtataaattaataaaaaattaaacatcagaaaaagtaaaaaaaataaaataaaatattatctttcagatataattatttcaaaaccaaaaattttataagtataatcaatcacatactatatctcaacttaaagtcttacatatatactcttgcaatatgttctagtatatatataaaaaaaaaaactaaaatacatttttaatctttcctcctctttagaataaattgaaaaagttcttaaatcaattgaaactttaatctgttaaaattatgtttgaaagagaatcataataatttactatgacaatatagattatttatattcaaataaatctgatttttttaatatacctaaaaatccgtaaattctttaaattgccagctgaattttgataacccacctaaaaaattaacaattgaaaatttgtaaatttgaaattaaattgataacaaaattataaaagtccaaaacttcaacttttattaatttttaaaaaaatcaaatcttcaaactaaatacaaaattgcagtgtcgctgatgatgcagcagcttcggccggcgacaagcatcggaaaaaaatcaaagaaagacggtgagtgaaaggaggaagaaagaagaagctacgaaga

SEQ ID NO: 71509 - DNA, 1450 bp, Cannabis sativa
aataattccatacatatttaaatccataaatatgtaacataataaaaaaaatactctcacctaaaaaaaattacaaaaataccctttcggagttagcggatattacacagaaggataaggcttcaaatgttgttatgttggtttagaatctgataaatttttaccaatttattgaacattacagatattgagttattcccctctttacttttaggtgaattcttgttttatttatgttccattcgcttttttgatttttgttcgaagtatttgacaaaaaaattgtggttttgagtttattaggattattgtagtaatggggtatgaacaaagaaaaccatgtattactgaatctccgaagattaagtagccgaataggctgatggtgaagtaaacagttgcgtgaaaaactatgtctgatagttctcttagctccacaccaatttgacgaactcttagaattgcttaaaaaagtattagcaagcaccctatacatatgaacaaatatttgtatttaattaaattatatattatatttgtaattatatcatttaaaaatcaaaatagatgattttttttttaatttttgaaataagtatataactaagtatacgtgcatttgcacataacattaatctagtatataaatatataagaaaattttacaacgtattctcttaaaagggatataccaatgcactcttatttatttcggtattcaggaaaaaattttagtacaacttttttcatgatcgtatacgttatagttatttaagataacatacaaaattttgagatatttgaagaaattttacacgttaaaaattaggttcaaacagtcaattgcacgcttaactcttttattttatatgcgtgtaaaaatagactttttgaatactgttttctatattgtaaattattctattttttaaaaaataaaatttacacgatgtcttaaataattaaatataacatacacgactataaaaaaaaattaaactatttgaggagccaacagccagcaaagacaacaactcatcaaacagtttattagaactcaagatgttgggtttgttgggcttctcgaaacaagggtcaaggttcataagattggaaccttgtacctcaatgtgttcaatggttggtgcttctccacttagatagcttggcaccaaggaggaagaattgttatagcttggaacccattccaatttattgttgacattatcaagtgcacaagccaacttatgcacctgaaaatttcaacaatagatggaagctataacagttttttgacagttgtttatggctttgatgacagtaaggggaggttggattatggaagaatatttcctctctaaagacaaaagaaaattggttgattatgggagactttaatgctatcgttgccaaggaagaaaggattggtcacagagtggaatatcaaact

SEQ ID NO: 71510 - DNA, 1280 bp, Cannabis sativa
tcaacatacaatctgaccaagaacaagaaacgcaagcaagataatgagtggttttgttagtagatcacgtaataaaagaaacagacacattaaccaaccagtttaataaacgtttacaattagaaattataagatcaaaaatagaaggcaaagataaagaattttaaatagcctgaattgaaacaagtgaattagattcaacgatgacattcgactactttttcatcttgatcaaacttaaaaccttttttttttataagacaaaattatgcaatttatggatacgattgcatgggattattataattaagcggttgatttagatgccgatcttcttttcccatctcaatcaaccaaaagaaagagtagccccatctgtgcaagttatctctagtctcaataaagagtaggtacattctgttgaaatgatccttggttgcaaaggtgctcctccctttgtgatatacgatcctccaggtataggtaaaacaaagactatagtggaagctatcttacaaataatgaaaaaaaaatgctaagatacttgtttgtgctgcttcaaacagtgttggtgatcatatactagataagatcattagcaataatgtcataagggtgaaagaaaccgagatatttaggctaaatgctacaagccgaccttacggcgatctacggccagattatctacgttactgctattctcaggacagtgttttcagatgtcctcctctcaatgccttgctgctttacaggatcataatttccacttatatgagtacttcccttcttcatgtagaagggggttaagcatggtcatttttctcccatattcctagatgaagttggccaagcttcagagccagaaattaggctaatctttgtagaagtgaaacaattgttgttctagcaggagatccaaagcaattaggtccggttgtgtattcacaagatgcagtagcttatggcctagggaaattttatctagaaaggttatttgattgtaaacattattataatgaagatgaatcatttgtgatcaaattggttaggaactacaggtgtcatccaaccattctagacctcccttaaaagctcttttataatgatgggctacttccatgtaaagaagataactcttcctccaaatattctcaagttgacttcctgccaaacaaacgtaatacttgttggcattcaaggatgtgatgagagggaaggcagtaacccgtcttggttcaaccaaattgaggcaagcaaagttgctgagataatcagaaagc

SEQ ID NO: 71511 - DNA, 3818 bp, Cannabis sativa
  modified_base (3432)..(3433): a, c, t, g, unknown or other
tattttcaccctgaaccaagtcagtgacctcttttcttttggcactatggacttctccattataatatttatcattaaagagatctcaaaactcttcccagattatcacagtgacatcctaagtgagggacaccgattcccaccacacgaggacgtcctcctagaatagaaacatggcacaagtcaccttgtcatttttggtgacacccacaaaattcaaaattctttgaattactatcaaccaatgttctgccttcatgacatttggacctcccaaaaagctggaggtgcttgtttgcagaatctttcatacaaaggctccatgtagttgccagcaacaggttattctgctggcaccactggaaccaaagagcgtagaaccttttgaggaggcattgtaggaggaccctactgtctcagcctctgaatcttttcatcttactaattgatttggacttgcatttctacaaacctttgcttccaatcttgaagagcatgtggtggatttccataatcacctccatgaaacctaccacagcctctactacgtccaaagggatttgaaggattttgacctccccgactgcttctagtctcaaccacatcacctcaactccttgtgtttcgttgggaatccatattataggacatggcctacgatcccataagtcaggtaggtaaaacaacaatcacaataatccagttaccgcatacatggattttaggtgacacatttaaacaactaacatattactaacatgcttcctatcatgctttcctaatgaaataaattactaaacaagtaaaggcttactgaaccgtgagtcgaacttgtctttgacgatgattgtacatatcttgacggtcttcagtaaataacttggcgactctaataccaatgccctattgcttaagcaggctacattgattttctacttattgtgcacgcctttgctagtcaaagggtttctaaaaagtcaggatcccatctttgaaatttataatcatattcaaaatacacttataaacatgtcgctcagtgactactaaataaaggcccatcgttctgagattgaactatcctcctgatacgtacaatcatcgctgagctttggactcactggtgtttggccttaacctttctgttacctacacatgcaaataaatgtgagtcaacagacttagtaagaaaaacacaaaacatataacataatactgacttgtatctaggcgcccatgcacctatttacaaggcttcaaacgcatcaagaatattcttaacagaagtatgacttctgtaccccatgcactaagtactcatcctgtactagtgttggtagggctaaaccgtactctgagtaccactgagtgttgtaccacatgcactatgtactcgtcccgtactagtgttggtaagattggatcgtaccctttgaacattatatactataccagtgcactccgtactgataccatactagtgttagtagtatatgaatcacataacaagcatgcaatttacatacatacacatatacatatacatatcttatgctagtcttaccttgtaacctgattcaagcatgttggtcaacttgaatggaaattcaagcactgaatggaggccctatttcacaatcaccccaattgggtaaacaacttgctaaaaccttttcggggatctaaacttaaaactaaaagttttcttatcgataaatagcatgccattatcctaaatattgagaaaacacggaaaaatgagactttggaaaaactgctaggaaattggttacatgtcgcgaatggctaggtgtatcacagtaacccaaggaatatgcatatgctcgcataaaagttaagttacggtgacacacccaccattcaaaggactcaaccaatattcacaacaaaaacacatgtaaatcagaagagtaaaataaaccttaagtatttaacagggattaagatagctaaattttagatttgctaaattaatttcggtgaatatatacgcgattattcaagatgttcatcctaatactcgcgagtatttagaataattaacaagaaagatgcgaatactcaaagtgttcttcctaaaacccgtgattactcaaatttcaggcttatatttcctagaaacatacacagttttgtcagaaaataaaatcacatatatatacttcctaatgtatcatgcattttctacctcctcaaatgtagaatatggattgattctcaaaataaagggaaaaatagttacaaacagttttctactaaccttgagaatatcgatattcttcggagattcagaagcttttgagaccttttctggaagagaaaagaagaaatgtgaagtgggttttgaagttttaaaaatcagagagaaaagaagaaataagtaaaaatatgagggttgaattgaaagatcatttcgtatcaggatggttaaataccatcatccctcattatatgggatggagacacgtggaaagagaatgcctaaagtctcacaatccaacaattatctatcaccacacctgcacgaattttgaagagttttgatgacatggtacaccaaatgggttaagtataatgattacaaccgtcttttcaaaaccctcgattagacaaccaaaagtcaccatctcgtgacatattttctcttgcctctcgcttatagtttccctcatgacataagctttcaatcgcgaaactaggggcatgtgttatagtgagaatttttcacttagaaaatcgagactagacatctataaaaatgacacgtggactcactctcctcgaggagagctgagatgtcaatgagagacctcttaagtgtaaacctcgcctgaactagactcagcgggatgatgtgaccatgatagagtctagtcgcatttatatagttcgcataaagtaggaccaaggagcggttcaagactcgcatataccgagatatatgcgaggactaccaagattctcctctaacttgtaaagattgattctttactctacgagctggtctagatgacccaacaccccaatagcccaataaggacttgcatgccttaggttatcgacttattacaagatgtttgtataagcaactcaaacaggacacagacatcctagactcgactagtcttgtatgcatcttaagcctgtgagcttatgcaagatgtgaacagacaagtcgcactatagaagttgcatacattgctgtatttagtgaattgggccgaaactatttttcatttattgtatttatgtttttattaatttaattgttgtaattcaatgtacaaacagattgatatgaattcaatctctgtgtaatcaaaggacacttgctttgtatataaaggactgatccaacatgaaatggacaagacataaaatccttgcaatagtggactaagcagaccgtgnnctgactgaaccactatattccttttgtgttctttatatttctattatatttccaatatgtttgtgttcctagctcgaatactcgcccttctaggttgagtactcgcatattctctgctcatatatttgttatattatttattttggtgttgtctaaattcctccaacaacaattcacaaagaagaaaagaagtctatcccagatgtgtctgttggtttctcagattaagctatagatctgctgaccaagaactatggaaaattcttgaaaaagaagtgcaagaaattttttttgagggaaaggaaaatgttccccaaaaaaaccctcttgggaacttcagacatggtcaacaacctagtgacaataagagcatgggcatttagtg

SEQ ID NO: 71512 - DNA, 1112 bp, Cannabis sativa
gatgcgattatagagacgacacacataacgaaagccattttccaggtgaagacaggagtaccccattgtaatggataagggaacctaaaccatggagaggattgtattgcttgattagtatcaactcgacagtacttcatccttgagacatgctttctgcaatgttctgatattatatttgaggaaggtacatttatgtcacatcctttatagctataggctccagctgcagtcagtaagaaagcagctgcccaagtaattgccagacccaatggaacctagcatattaggaagaataaacacattaatctcaaattttcacggaaagaattaataataacattgcaagaatatacaagtgaaccatggtaaattcataaaacgtaccgcgtatattagaaatatgcggtgaccaaaaatggatatcttgcgcagatactgcagacaaataaaaaaaattagtattttcaagacataaataagaaacaaaattcccacgattaaaaatatatcaagagtaacttcattaaacttacgagagaaaataaaatgaccaataatatctgcactgctccgatctcaagacaattgccaacaagaggaaaaccgtaactgtaaaaagaaagtccaactgcagcaattgtaggagacacaacaactggattgatcaacctgaagagcataggaatcataattgattacaaccaatcagagttttgggtgacaatggttcaaagacgcttccaagccacaataacagtatgattgaaagcaaaaaaaaaaaggacaaagtgatcataaacatgtggcaaaggattcatgtaagatcaacaataatacattcaccagcatgggaaatagagacgaaacgtaattattgcaactagagctgaccaaaaaagcaccgcaagaatattatgtcaagtgggaatccttgagtgtagtctatcatgaaaagatcatcaaattctaaatctataggcatagaaaactctctaaattattcaaattgacagccactgactaatttctagagctatataagaacagaaactgttaatattaggatcaagaacacaaccatggcagtgtttaggattttggtctatgaa

SEQ ID NO: 71513 - DNA, 1641 bp, Cannabis sativa
aacccgccaacccgctaaacccgaccaactgaaacccgccaacccgtaaacccgtgccctatttgggtccgggttcggtttcaatttttcgaacccgctaacccgaaacccgaaacccgcccgatgtgtcatctgccactatggctagacttttcgaaaatgcaatttggccaacaaaattctcccacacatcgaagaacaagatactcctaaacacattcccgttattgttgtcctcgaagaaaacaagccaatgaatcttactctcgcttttttaattcagtcaaacaaatttgttcatttgattaaggtttattagtaaagaatttatttaatatatactatttcttaatatatttgattacataatatttaattaactattggatattttcaatctgcatgtaaattggccttagtacccgtacagatattttgttacaatcatttgattacatattttgcatctttgtaaaggtaaacattaccttattatcttttttttcttcaactcatcttgctcttctaatttctcattcagtttgaaaacctttgatactgtaaaattctcatgtccatatttcaaattatacgtattcaacctctgccacaaaaactttgaattttagttggaacatcattgtttttgtttgctgctgtgtcaagtaagttctcaactatatcattaaattccttaactcttatatgtattttgtacaattttttcgatgcggtttctacggttttttaatttagcagtgcgagtgcagtttaaaaaaattgaaaaaatcgcacaagcaagttaatttgaaaaaatggtcaaaaaccgcaccacccgcaccgcaaacacccttgctaactcaagtattatcattacaaccaataaataagtcgcatccattgctcagcattttaatagttattcaagtaatgaaatttaaaatgatgattggatttccatacctcttgactagattctcaaaatcttgtagcctcataaaaaggggattttgcaattcaaacatataatgtcaggttttattatgtttattcctgatgtttcctgtgaccagaaaagtggaattgagccccgaatctgtaaaacagaactaatttgagtcgggcaatcttcagtagcatttgcaattacaatctgttcttggcgactctacccttctcatttgcaccttttcgagtatctgcacggggaagaggaaacaatcattgaaagcattctagaaaatgtgtatatgcagtactgatttcaaaattttctaccaaggaaatctaaacaaaatcaaccatttacttgtgttagggggaaatgcattcaaacctggtgccaacataatggcgtgagagcgtctagcaatgagaattaatttgaagatccgatcagaaacagagagctcaaactagatggaatgaaaaagaaagaaaaactttagtaaaattccaaactcataaaaatgagaaaatatactgaatattaaggattggtcactatacaataattcttagcaagcattcaaatattataaaagcagattttccagtacttataatggcataagctataagatttcagcagctttccctagttcattttcaaattccgaaattctcacacaaacaatccaa

SEQ ID NO: 71514 - DNA, 939 bp, Cannabis sativa
atttctttgttgctaacaaactcctccaacaacaaaatatataaataaataagaaagcactcttagaaatagtctaagtcattattttcaactctttcgggtcccaacagtaaacagttgtggccttccatctcttgttcaaactaagaaaacagactatacaatatagaacctcaagcactggtaggagggtactagtactggacagagtagataccagtaaatatagataccagtaaagtccaccttctttgtccatacttgtttgcactactagtcacctttcagagcatatttctattagggcaaaaaaaaaagaacaaaaaactgtacaaacagagaagtcttgaagtatttgcttgagggcttgtgttattttcagacttggacccctatcctttcagcaacctgcaacagaaaatggtattgagaaaacttgtgccatagccactaaagatactcaacaacatgtcaacaaggaacaaagtgatacagaattgaacaagaagaggaaggacatggtgtaggagaattagtatgtatgactaggaggacaatgaatattcagagtttaactaagtcaatagtaatcgaaatttggaaacaaatcaatttctttgagaacttgtacatttagtgatccgcttaatgagagtcgaccattcattattctaaacctgactagccaaatgcgaaacttagtggagttctcaataaaacaaacttataattttcaatttagaataccagagaaattatctaacactaaatacatgccaccaactagctgtatctactctacaagttaccaaagaagaaaacattacttacaggtgctataactgatacttgttgaatatcttctaattttaaagttcatcaaagattttacaaaggctaattagaatttttgctccccgaactttgacatacaccaaa

SEQ ID NO: 71515 - DNA, 764 bp, Cannabis sativa
taaatataaataaaagacaccagaatttaaagaggtttggccccagatgtcagtaatagcctactccccttgtgttttattgatctgagttacaaaagtcaagaatgggctcttgattgcaaagaatgagaagtgtttatttttctaagtgttcaagaatgcggatcccccttccaggtcattcgcttcaggagacgtgacccacgcggagccacctcaatcgtcgccttgaatttcggtggtagtgtaagtctgatttttatgataatatcctgctattttagtgggttgaaaattatctttgagtctttcgtgggatttgaacgttggaaggagctactgacgatgagggtcccttatgggtgtaacatggtcgtcaccacctttggggatgaagcccatacttgggggcaacacccccgggaccctcgttgagggggcgacaaccatcatcgtcaggtgacccctccgggacccaacttgacgagggtgacaaccgtcatcgtcgggtgacccctccgggacccaacttgaggagggtgacaaccgtcatcgtcgggtcacccctccaggacccaacttgaggagggtgacaaccgtcatcgttgggtgacccccccgggacccaacttgaggcaggtgacaaccgtcatcgttgggtgatccctcaggtaccaacttgagggggtgtcaataccgtcatcattgggtgacccccgggacctaacttgagggggtgacaatcgtcatctcggagtgacccc

SEQ ID NO: 71516 - DNA, 560 bp, Cannabis sativa
gaaaacacaataccctgcaatggattttctatcacttggacaacaagtcaaatcggcataaaaaaacctagtcaaattgaagtgatcacaaagtgaaatgtgtataacatggtacatagttccttttttaggtacctagggattcttttggtggcattcaatgaactatagttggagctttgagaaactggcttagcttgtttacaacaaaggaaatatcaagtctagtgtggctcaaatactgcaaggctccacttatgctcctatagttggttggagtgttcaacacttatccatctgcaattgacagaggtctacacgacaccattggagtgggactaggtttcaaattcatcatgtctgccttttgcactaactctactatatattttagatatggttttctgcattattctactcattcgtttaatttttgatgttttttcgatgttttcaggaattgtaatgtcacaaggttcgggaattttaatacaatcgtttcactatagttatacgattttcatgtttatttgacattttttgataggttttcaatattt

SEQ ID NO: 71517 - DNA, 1267 bp, Cannabis sativa
  modified_base (1228)..(1230): a, c, t, g, unknown or other
ataaatttattaagatttttttttatatctgaattttttttttagtattttattttattaaatgcaaatttcttttattaagtaatgaaaaaagtacaaatttctttcttttttctaatctgaaacttttttttaagtattttcttttattaaatataatttttttattaagatttttttctaaaaaaatttgaaactttttttgggtatacataaaaagaacatttcccaactgttttataactgtttacattcaattttgtttttttaaaaaattccatttagtattgtccaagattctccaccgttgcattggtcattcccaactgtttttttacttcggttctaaaccgttggaaaaagctccgcttatcttttctaacgggtttcataattaaccctcttattaaccgctaggaaaagtcaattttgtagtagtggacagaacagtttagaccgttcttatttaatacttaaacgggtgcgtctactaaagttgcacattggccgttcatattctctgcagcacgaactcatgggttctctggtgctcattcttacttatgaggtcttcagaccacttaaaacctcttggggtaattcatagagtaaaatgccttcaaccatatgggttgcgtgttgggcgttcatgtactgacaacatagaactcatgggtttagggcgaattgtcgcgcacagtagtcatccggaccagaatcttgttaattaagacgtgggagaaacatctgttcctcgcatataatcgatatatatgcgcgacttgtgataacttctctcggtcctgcatttattctatactatgttgcggatagtgtatgactagaccctatctcaaacctcagtcataccttttcgtaagtttcgatcctgcgaggatagctctactagagctgtgattgacacgtttcccaactagaaatggagttcacgtgtcaaatatatatgagtctgtactcgttttctaggtgaaacatccgtgctataacaactcttaaagccagaattcttaatatatgcaaaaggaagttgagtagaagagatgtggctatttaagattatttgaataatttgtaattcgagttttttgttctgcttttcaagtagttgttggtgattaataagattttttcttcttgataaaaaaattactacaaaaaactactacttttagtgataacttgttagtcacaatataaattttttgtnnntaaatgtgacttttagttacaataaaaaattatttgt

SEQ ID NO: 71518 - DNA, 1767 bp, Cannabis sativa
atactatgtttgatattgacttgtattaaaaaaatatgtaaagttataatttttaataaactcgaccccaacaccgacttcaggtcgagtttatgtttaggtctgggtctagggtttggggttaggaatccggtccgtgctcctgtctcggtccgactccgagttcaagtctaggtccgggtcctgagtctgagtttaagttcgggtccccagtcccaagttccgtcggagattggaattgaccacgatcatttgtaaatattttaatacaagtaaatatagactatttattatgtattaaataatataacttacattgtattaattttttttttatcgtaataattaatacaacacatttctttatccaaacatagtgttatttattatttaatacaatacgactcttataaggcctactaaacgaacacttaaatctttatattaactcatacatatacataataatattctttataatttttatctatatcatttaaataatatatttattattaagatatttgtggcctaacctcattaaatctttattagtattggtttagtgtgattttcaaaaactgaactaataatagatttgctaagaaaaaaaaaacattttagaaataaaaaacataatgatttttatgtggttcgggtgttaaagagtctcagtccacgagttagtactttgtatatgaaataaactcattgatgaagtaaaatacattataatattgactttgagtcgggtaggtgtaccacatagtaccgtctgatcttgacaggtggctatgcaccgtcgatcatgtacaataaatatcatggacattggacaaaagatatattgctttatgtgttgtgtgcctttcttaggtctaacacatgggacaaacccttgattctttaggatttggtgtcagatgaatgcaacgtaggactacacccgaacctctttgactactccttcgggactacccctgagggtatccgattgtgtttctttaagtctctagttctttggacgagagtcgtccttcccaggccaaagaggtctagctttattgagatatggttatagctgaactcggagccgtagtctgacccattactttgtttgttttgcttaatgtaattatagaaagtatatagtttccttatttacttcttactagttttgagaaaccaattgttgtaattaatctctataaataatggaactatctcactattcaggaacataaaattcattcaaagaaaatacgtgagaaaaatctagatttcactactacaaatttgccatttagtgacaccctttagtgacacgcacatttgtgcgggtcactaaaagtttaaaaataatttttagtgacatgcacaattagtctctaaaatttaatgttagtgtcctataatttgagtcactaaaaatgtgaagtgtcactaaagataattttatgattttttttaattaaaaatattcacctatggagtcactctaggagagactgaaaaaatatataccaacgcgcattgcgcgtcactaaaagcactttacagtttttttttttaaataataattattttattaatttgtattaatgtatggcaaaaaaaataataaaaaaagttgtagggccagctgtaattttttttttttttttttgaaaaggaggccggctgtaatttgagaatgcattttgttattatataaataatataataaaaaaaacataaaataataaataaataaataaattgataact

SEQ ID NO: 71519 - DNA, 1033 bp, Cannabis sativa
tactctccctttgaatgtgcttcatcaatgcctgtatgtgcctcatcttttggtttcataagacatcattcctagcctcccaaatgtggtaaatcagccctgctataacaaccttcagcatacttcttctagttgttgaaatgatcttgttgttttttaaatttgtcagtatgccttgcaccgaatctgcatttgatctccattgcaaccaagtcttgacttcctggaggcacttcctgctgtagtcacaagcaaaaaataagtccctaattgattccttctccttcccacataagagacaagtctcatatatactcatatcatacttggctagcctttcttttgtgtttaatcttccccacatgactaaccaaagaatgaatttatgctttggaatgataagtctatcccatacatctctatgccaagaaaccttctcagtgttggagaataataagtggtatccatgttgaattttgtacttctgcagtaaaaaaccagcagcatcagttttctctttcaagcgatttttgacttgaacaattttcttccaataccaactacaatcggtgggagtatcatagagtatcatactctcaccattgttggtccttcaaatatactgcatgtatccatctcacaaataagcagtcttttttgcttgctatatcccaaacgtacctaccaagtgcagcagtattccagttctgaatatttctgaagcctagtccccccaatttctttgaattaaatacactctcccatgctatcaaaccaggtcctgctcctccttgaatgcctttccataagaaggatcggcaaatggcttccatatctttaagtagcttcttaggcaagatcataatttgagatcaatatgtgtggatggaaatcaacacagagttgatcaaagtcactcttcccatgtacgatcaatttcttgaactccaagaccggatcttactcaccattttctcaagaagttcctgacatttagcattactaattctctttgagcatatggggattccca

SEQ ID NO: 71520 - DNA, 2727 bp, Cannabis sativa
gagagactagtatacagatatggagaagttagtatacacatgagtgaataaagattagcattcattcacgtgagagactagtatgcagatatggagagagatgaaggtaattagtaattattagacatcagccacatcataaaaaaaaactataaatgaactcttagtagctaagtaagaattggaagttagaaatggtctaccataccaagattgtaataccaccacgttcaccactacaaatctagtaaagcgaactcactaatttcagataatttacttgaatcctactggttgtagtatgtactactaatccagaagagtaatcaataggaaacatgtggtgtatggaagtaaagtgtttcattagtaaggaacaggtaagcttccctcttctattatattgacccacaagctaaaaaccaagagtaagtatatcgttcaaaaatgagcattgctataacgcatcctagagtgcccaacaccctagaacatggcatatcgcaaattgtaaaatttaaaagcatgtccacatttaaattaaaactaatttaagttcaaatgtctggtagaagcataggatgttgagcacgtagtgctctatagcatttcccttgaaaactaccaactttataccattatggtacaacatagttcaccaatttacttgacgagttttaacaactattagtgaataatgtggtctcactctcaaataatatgctagttgagtctagtactcaggaattttctgtgtcattactcgaaaactaagcaattgcctatgactaacaatctacaaacacatccaattttacctcctccggatgtgcgattgcataatcgtactgctccctcgtggcctcatccttcaaaatctgcaatgtaagacaatttatttcaattctcaccttacaaaaaaggcttaaaattcaaaattatcagcatttgcttattcaaataactaaacatcgcaatccatttttattttttaattacctcatacgcagtagcaattttgacaaaaagctttttcgattccggatcaggatttttgtccgggtgactgaatcaaaacaccaaaaatacagaacattaaacatttggattccataattagggatagaaataaagaattgaataaaatgaagatctcactgtttcaatgagagcttatagtaagctttcttgatttccgaagaatttgcactttgtgtaaccctataaattaagagggaagagaataaagtaaatacgcaatggagagaagggtaataggaaaaaaaaaaatatgagaaaaattttgagttgaaggagaaatctcagcagccgaaccccaggagatcgtagcaatcatcttcgtcgcagtagatggccgttgacggagatatgagaagagacagcatgagagctaatacgagagcgaaccaccgatatgttgccggcggcgccatggccttcggaccggtcagcttagaagtcgggttattataatgggtttcgttcgcggagggagagcggagcggactgcctttgtgctgtgtttggctatacaaaacaaaagaggagtctttctttccaattcactaacattgctttcattacaagtcaaaaagtcaacggatctaaaattaacaaaatcacaaccattaagatcttgaatgggaaatgttgtgtaatattttgttgatgatgttttgtaataggggaagttaagttaaacttaagcattattattctaaatgttgtagagcgattgtccaacacattttgtatatgtacatataaaaatttgagaaggataatatataggagccttaggaggtataatatgttagaatcatttgctttttatttatttattaaaaaaaaatacaataaaataaatgaacatgcacaattttatccatctcaactcttttaggcaataattgcaattgtgttaagaactatcatgcatgatcaacaccttcttcttcattatcatccatgttgtaaatgtgatctaaaatacttgtggcagaaaacccagaaaatgagtctttattattagaaacaacaccctttaatttaagcttctgagtgcctttaattttgtctttggccttgtgtgccgggtgcaaatggcatccgttacaccaagattgcccgcacttgccagtgaatttggagtggttggtgggcttggatgacacccgggtaaataacccggctgtggttggtgtatcaaaccggttcacgaatttggtttcgggtcttggattcgaaggggatgacagaatttgacaagtccttaccattccatgttggcgaccttctctcttcatgtttggccaaacaaattgttttgtgagctttgattgagagaatatatgattttgaagatgttatgagttgtgcctttatatataaaggttttgttttagtcttttggagaaaactaggaaactaaaccgcgctttgcgcggtcttttacaataattgtaatattttttgtggctaaatctttatagtaatcccattaaattcaattttttttgtacttcaaatctaatattttaaaaaaataatcatctaatccaatccatttaagtgacaaaataaaattaaattagtaatttaattgctttgatttttttttttaaaataaacttttactttagaacataagtttcactattaccttaaacatatacgatatgtcacatgaaaattaaacattactaa

SEQ ID NO: 71521 - DNA, 672 bp, Cannabis sativa
tatgggtccaaatctaaaccaatcaggtccacctaaattaacaatgcttgaagagcaagcaagaaggataaaatggtcattacattaaaagtgagggaccaaacagtaaattaaatatttgagtgaagaaccctagaggactaccttataaatagaggaaacacttgctctcccaaaccctacccattactctgcttcttcagctgctgcacataacaatttctaggattttctcaggtattttctccaatccaaccttcatttctttaccgatgtgttctctgatttaatttttcggtgttgcatgttgttatgttcgttttgatgatgatttggtgtgattttttttcagtttttttagattatttttgatctatcgaattatttgattttatgctctggattatgtctttgttggtgtagaatttggttctgattgttatatatggattaatgattctggttaattggatagaatattgttgtttttgttaagatcggttgtttttgttctgattatgaagagtttttaggatttattcttgtagttttcatgtgtgatataaaaagctcaattctttttcttttttatgatcagtatttttataggtagtagtattttattattttctctgcttgtgtttcaatcaccgtatgtacctgtgtttgaag

SEQ ID NO: 71522 - DNA, 1131 bp, Cannabis sativa
tgaatttgcccaggcgtatggggttgtttgctggtgcaaacttcaggctctttttttcctgactgggatttgctcaacctcgggagtccaacagaaatgctttcacaaagcttggactacaacctcatggtaagttggccttattattatcatttattttttctctctcttctcttaatcatatgtttataattctccaggcttcttttgtctcgtttgcttctaatcgtcgactctcggagcggctcaaatacctggagggtgaggttcaaaaattattatccccatgcgaggttgtcactaagcaacgagataaagcccaacaagaaatcgtctacctcaaacaagaagtcgaaaaagctcgggaagaagccgagaagaaggtaaaggaagaagccgggaagaccattaaggcccaagctgatgaatttgagaagaaactggctgagaaggagatcgagaccatagaaagatgcaacaaagttggcctacatactgtaaatcgagcctagatggcgaatcctaatatggatacaagcttcctagaggagaaggaagaggagactctggctttttgcaagaagtccagggcagaagaggaagaggtcgatgcaaaggaagaagaagaaaatccaaccaagtcacccaccatgtagacttgattttttttatctctttttttttttaaaaaaaatggcatttcggccgagacaatggtttgccccttgcgacactttttgtaaagataaatttgtgaagttggatggctaactttgctttttattttatctgttaatgcctcgtacttttatgtttgaactttgacatatgcttgtttgcttgcattttatccacaatttaaacaatcatattttgatcatagacaaagtattttcagtgtttacattactcgtatttctctctgacgctaagtagttaataacctactttacgcgcgagcatcttttctaccctgccttcgatccacgagaaatcattgattctgcctcgtgatgatcttatttcaagcaaactcaaatatatttttaatgaccttgtcattttgtatatatctttattgcttacatgggtagttagatcttctactcatgttttaggtttaagtatttt

SEQ ID NO: 71523 - DNA, 662 bp, Cannabis sativa
aacttatcttgtcaaatgcaattaactccagcagtagattcaaatgcaaactacttcaaataattaataatttgaatcgctcaataactttacaactttataaccaataactaatacacttttataaaaaataactaataattaatacactttaatgatataaataaaataaattttttaatgatataaattattttaaataaaaaaaattaatttttaaagaaagaaactgtctaaataactgcatgataaaaaagtattaattttaaaataaaaagactttaaattcaaactaaacagtaaattcaaagaatagaggtgattaaagttcttttaaattgattagtgaaaatcctaatgcgaagaattggctcaatcaaaataggcattttttattcatctactcaaactgacttaaaacttactcccagaaaacacattattaatgaaatgattgaaaaaggtgtgtgaagaatttatggccaattagaatatgagaaaacattcaaatttgtcaacaaaattcaaattccttcagtttgcaaattaagaacgaacccataacaaaaaatcaatcaattaaataaataatttgaataacaataattctatcacagttttcgtcaataataactcactccaaacagaataatactaatcct

SEQ ID NO: 71524 - DNA, 1883 bp, Cannabis sativa
aaaaatcatgaatcaattatgcagtcatttttctgattctctctctggagcaaaggcctgaatcctacccatcccaatttgtcgagtgttcatatagagggaaaacccatagccatggttttacagcagagctcaattttcatttttctaactgaatgtggatcttaatctagaaaagcactccccaattgcctcgcaacgatgactactcgtcgtggtccttgattagattccgtaaggctctgggacccaattgacgagtctgcgacctccaattcatcaatcttcaatgcaaacacgtcaaacaatgtaggcgatgacgagttgggggagcttcctttttattaggtggatttgacattgcccatgctccggctagataaatttcttcttgtttgcacaagattgtttgttgtctcattaagtatttgattgacttaagcttctgcatttgttttgcttttatttatgtttggtaaatttctagacttcctttttttaagctagctaccttactgtcttatgaattctaataagatcttttattgatttcttggtatttgtcaagaaaggccttcacttcatcttcaaggacgattcttcatctttgttacaactaaggtaatgttttttttttggattttatatttgtgctgattttttctcttgtgctaataatctaattttatatgttggagaagctacaacgtaatatgattcgactaataaagtttcacttgtctaaaatttgctctaaattctcaaatagtggtggaaaactgaaattgtgtacgtaagtgaattgtttaactaatattcattaattataagtagaaaatgtatgagatgaagattagcctagaagttcaaataattgatgtattatagttgtgaattgtactggtattattgatattctaagtttctgatattgtagaataccacaccaaaagccaaagagtgaagattatagcatgtactcaaggggggctttcttaattacaaggtgaagatgaagtaactaccagcctcttctaccttggtgtggttcgtattttgttattatattttaagaattatgaatgaatgaataattttcattgttatattgggttatgtttatggaatgttgttgtatcatatctaattacgaaagatcatgctttcattttagttttattttttattatgattttgattttgacgattaaaataaataggagtattatattcattcatattctcaatttaggataatgaaaacaaatcctacaaatacaagtaaaactcacagaaactatctttgtttgaaagtttgcagagtcattatagtgtaaaatggtagtttcgaattaaaagatccaatagaaatcaaatagtttgctactataatacaggaaaatttgaattaccttctaagagcaatagagatgaatttgccaccactaccacaaaaaacaaaagatgaaatatgggattcctaaaactataatatttttttaaaataaaaattatgaacattaaataactctgaaagaatggtgaacttatattagcgattgtgttgagtattgaacttgctgatgtgtatatacctacaatagtatttgtaactatataaatttgctcaagtaactcttgaaactaagattagcgttgtttatattgttgaaattgaaaaaaaaaaatgacttggattcagtggcttataataattttattctcatctgattggtcttagcattatctttcttcttctcaagtttgatgtaaagcagtccacctcaatcttcaagtaaaatgttaagcacacatgagaaatcaacttgaagaagagtctgcctctgccaccaagtaactatctttctctacatgtgtatatg

SEQ ID NO: 71525 - DNA, 881 bp, Cannabis sativa
aaaaaaacaggagagttagatgaaagcaaaatatcaaaaataaaaaagccataaaatcataccactgtaatcatatctggatattctagcaacaaatccctgataacaagctccaacacctaaaaacacaaataaaaaataacttactaaaataatcaaaattgaaaaaccctaataaaatcaaaaacaaaagattagcttactgcaacttttccagaaccacgaggaccaagaagcagaatagagttattacaaccctcgatgaccgaactcgacactatgaatttcaatttactgaaaaaattaagaaaaaacccaatttaagcaaatgaaaacgaagcagaatatagtaatttttactaaagttatctatttttgaaaatgtagtgattttatttttttttaaacaaacagaaaattttgacctgtaatttgaatcgggagagttggagaaagaactgaagataaaagaaggatcacaaagcctggtccgcagaaaaatcagagctttctccgcaaaattatctcttcccattgaaatcgaactttgattcgaagaaaatttgttgagagtaaagtctgttaattttcttttctctgtaagagagaaaaaatggcgggaaaaaagagtggagaaggagggaatggggtatttataggctaatagaagagtgggccgagaccagaaaagcccaatagaagcccatttaagagggataatttttttaaaaaaaaaatacaaaaaatacattttgtccggagttttcaatatttttttacagttttttaaattttatttccataaaatacgatttttgaagtatttttatgttatattcttgttattttgttgttgattttttattatttttgtattgttt

SEQ ID NO: 71526 - DNA, 934 bp, Cannabis sativa
tacagcaaaatacgatgttaaaaaatttactggtacgactgactttggattacggagaacgaagatgaagactttattggttctccaaggattatatgaggctctgcttggagaaaaatctcttctcgattctatgtctaaaaagaacaagaaagaaattcttgcaaaggctcatattgcgatcatattgaatcttagtgataagattatgaggaaggctgcaaaagaagccacgaccgcaactatttggctaaagcttgaaagtctatatatgactaaattattggtgaatagattatatctgaaacatgccttatattcgttcaagatgttggatgaaaaatctattggagaacagattgatgagtttaacaagttgattctagatcttgaaaatattagtgtcaccattgaagacgaggatcaagccttattgttactcagttctttagaagttatttggaaaaattaaagatacaatgctatgtggaagagagtcgattacactcgatgatgttcaatcaaccttaaatttaaaagagctgaatcaaaagagtgagctaaagaactcgggaagtggtgttggattgtatacaagaggcaaaagtgaaaaaatggaaagtcataaaagttcaaaaggaaaatcaagatctaaatcacagtctgatagcatgaagaatgttagatgctaaatttgcaagaaagtgggtcatgtatgaaagatgtgtttagagaggctgaagtaagatgattcaagatccgaaggagatgcagcagtgataagtgacagttatgactcagctagtattttgcttgttacctttgagattttagattccgaatggatcatggattctagttgttcattccatatgacactaaataaattttggtttgaggaattcaaacctggaaactatgcgattgtgtatct

SEQ ID NO: 71527 - DNA, 1674 bp, Cannabis sativa
gttaattgggcaagttggtattattttcaacccacgcaatataaagattggacgatttatattttcgtcaagttttttggtttgaatttttgttcgggttatctcgatttaatttgggcagattatttaggttaagcggtttacaaaaatttatgtacaattctagtatttataggaaaacgtaatgttagaaaagtatgggctaaatcctaaagacatctccttttgaggacatgttcactttgtcagctgcaatgaagcagtcatctacagtgctccgtcttaagagatgtgtcgggagcacgggtaattcttagacgataaatgatttggggggttaccactctcctgcaagacaaagtatagattcgatttcaacaacccttttaagatcgttgttcactttcagatgcccacacatctcttggttgttcttcagacttaaggtgttaatattaacttgcctcagttctattgcactccacaatgaaatctgccaaggtttgccctttgattgaggtgtgcgagatatattggatgtcgaattgccttaatttcatgtcccatttgagtaacctcctagaggacttgggcttttataatatctgacggagcagatgattggtgaagactattattatgtgggcctagaaatacggacgtagctttcaggacaagatcagcgaataatacgataatttttcaattagaaaataccgaacctcagtacctattatcctctagctagcataataaactggacaatgtgtcttatcttcctcccggaccaatgtagcattgatggcatgttctgaaactactatatataaatataagtctttcctttttactagtttggaaaagatttgggccttggacacgtgttctttcatgttttgaaaagttactccacatttgtcagttcactcaaatttttggctttttcttaggatgttgcagaacgagacgcatttgtctgttgatttagagatgaagcagctcaaggctgttaccttcccagtcagactttgcacatccttatgcttcttcagggatgtcatgtctagcaaagcttgtatcttttatgatttgcctctatcccttgctggctgacaataaaacttaagaacttgattgagatgcgagggacataatgaatgtcaaactaactcagctccatggcttatttgacaattattttttattaaatataggctaatctcaaaacaggagaacttctaattactgtagatactttttagaagttccaccataaagacaacacttggtgcaacaaatacacacaacaagcttatgtaagtttatatttataataatatctgaatatttcttttaatttattttgtattcgaattaactatttaatttatttgattttttttaggagcaaatggttgaattggctgcaaatcaaccaacacccactaaagaccaacttgctaagactatagtaggtcccacccagtactctcgagatttacctattatgatacaagtattgggtgagcaatcttgacatctgagaggctttgaccatctcctgagattgaaggcagttggggccaaaagatcacccgccatgactttttctatcccacaggatgttgctatggaacagtacgaggccttaccaaaaaagtggaggacgcacag

SEQ ID NO: 71528 - DNA, 1201 bp, Cannabis sativa
tgcggattgattggatttggattggattggatttggatcgatcgaatactttgtgaacacccctaatatttgatactgtaagaagggatatttttgtttttgtttttgtttttgtaaaaagaatgatattttatttttgagtgcaacatacaaaagcattattttcattatagaagaagtaaagaaggggccgtatacattagacaacacaaattgaaaagtaaaaggaacaaagagaaaggaaatgtagcaaaatccatcttaaatataaattattattattattaaatatagaaagatagatttgaaatatgtatggcataaacaaagtatcccatgaaattagtatcttttataagaaaaagaaaaaagaagtcaaaaaagagaaaatgaactgactaggtggccatgcgtgtggatcaaatgtgttttagaaattgaaaacaaaactaaaatatatattataattatagaatatatatatagatatagtcttcttcttcatttgtttcattactaagttacatatatatccatgtcggtatccattacaaagaagaaaaaatatctcggtaatgctactaatgctttttctatacgttgtcgtttttcttaaatgtttatgtcatattttgtaatactgccgttttcaaaataaactgtcgtttgaaaatattattgaaaaaacaggacaacaaatttttttatcccctgaaataacactagtagattcttgcctcctgaattattttacttggcaaacttgtaaatttctgtctctcttgttcaaaaaactaactgtttgctgacgtggttgttaaaaaaatattttataatatttttatgagttaatacaattttagacattgtgttttgaaaaaaattatggattggactctctgttttgttaaataacaaaatagaccttgtattttttaaaataatacaaatagggctttgagctcaatttttgacattattttttttaaatataactaacttgaagacactttgtagcacgaactgatattgaaaacgtaaccagttttgtaatctttatatcggattattgtacagttttattttacaaaaataaatcagtttagggtactctttactactatttcaaaaaaggctaattatgattttttttcccccgaactttgacctgtaacaaatcatgccttctgaactttttcgg

SEQ ID NO: 71529 - DNA, 1057 bp, Cannabis sativa
cagggaaaatggttggaaatgctacaatcagaagcagcctctaactgctttcagtcatccacatgttcctcaacaattattagtactgcaaggggtgttaaaaaggatgagatttcctgtatatctacaagacgtaactacgctgtctgcttttagacgagatggccacccttctgtctacagaagagctatgggacaggaagagaagcagcacttgaaaaacttttcctccgactgcagccactggtgccttcccggggtgcctgacatctggaacgagatgctgagtgccctgctctaagtaccagatcgtgtaccaagatgtaggtaagttggctagaataactgttcggccatattagagtttgtttctttttctttagtgtctgtaaaaaataagtctttcactgttcttgtttgttatgagtgttttataactatgtgctatggtatgttcagtttatgattctaattctcaatactgaacacataggccaaggtgctattttgctattttcatgtcacctcattttataacaatgttatatcttgttttagagcttagtttatagaaacttgaagtatatcgaaactttcttctgtaccacacttgagaaaatcaaggtgaagaaaagtgaaataaagaacaactaaaagaacattctaaaagatattgtcctgttttaagggcagtatgactgagaaccacaataagcatttctcataggattccccatgttatatattttgaaataagtacagagatattttggtggtaatttccagtgtatacaaagttaattttttctttttgagtgaccattcaaaatatgacatgtaactaaggttgctcttgctcatgatacttagtttgaagttgaaccaccacaatcacagcattttccaaaaaggaagagaatgctcttcactttagctttatggacaggaggaccttatcttaaatcatgatgtttgtttgtttggttattgtgaagctcttctccttttgcataagggaaaaaagaaaaacacatattttgactttcatattgaagaa

SEQ ID NO: 71530 - DNA, 995 bp, Cannabis sativa
agttcaccatcataaaacaaaatcccaaacaataataataatccatggcatgcatgatattcacaaaacaaagatgaaataaagaaacgagaaaagataaaactattatgatgctctatcttctattttcaaattccaagcttaaatggtgattttctctccaagaatgtgtttcttgtgttttgacttgatctcttcatgaaggctttaaaatataaaatttttgcttcttataggtctcccgccaaggccttagcagtccttgtcgagcccactgctgtctgctactttagtacacttgctgagaaatatccatagctctcttatccgaactccaaatgaaatgatttaagatgatatagaaaactgagaaagagagctacaaagtttttttagaatttgaacaaaaaacagttaaattaaggcttaaagttttaacatttcgtaaactaaacccgaatcatgcttacttgcgtggaaaaatcattaagtcgacctcaatattatatctgtcctcaagtttttcaatacaaacactcaattaaatatcaacaataaagatcaaagaaattaaatctaaaacatattaatattaatcaaaatcccaagaaaaaaaataataaaaataaatctatcctatagagttaacattacgtgtgataattttttttagacgtggtaagtattatttgaattttttttttcaacatcataaactatttaaaattttctgaaaatttataaataatattaaataattacaatatacaccattctaaaaaaataattaaactaaaatgcggattcgaaaatggagtatacgaaaacagcctttcgaggagtgcactacaattttctcatcattatttattataataatataattacataataataataataaatagagtactatatttatttaaaaagaatatttaattttattgtattgtaattggaaccaaaaaaaaatataatataatagtggtctaata

SEQ ID NO: 71531 - DNA, 1100 bp, Cannabis sativa
ttgggtttggggggaaaaacttttgccaacacatatttgtgtttgcaaaagtttaatgaaatattgtgtctcgtttaagggtttctaaactaccttttaccttatgtatgctcatgtatgtactataccatatatctattgttgagtgggagttttgagtaagcattaattcaaccaaggaaaagaacattagaagatagtcaaacatatctagacttatgttaatactaaaaagtctatacattagagatggtgattactctgcgagtggagtagttaatttgggagaattgtaaaaaacaatttgaaatcaatagctctacagtaaggctaaataataagatttctctaaaggcaattcgagaactattcagactcaggaaagttcgatatagacttttggcattatttccaaacatagaataattgctagtattactacatgataacatagatgaaattacaaaacaataaagaatcctgaaccctaagaagagtaaaacatataaataagaaattaaactcatggattttatgactaagaagaatgtaatggtgaagacataaaaaaggcgggtaaaacaggtaaattcatgactaccctgaagcagaacggtgatagcttttacaaagctacctggagctatatgaatttgcccaaacaccggtttgtgttgtggaaaattgtgaattctcatctgcttactcgtgataatctcgaaaaactccatgttgagcttgttactaggtgctgctcgatttgtgaagaccagttggaaaaccatgcttacctcttttttagttgtagtttttctcaaagagtgttagatcaaatctttaattggttgggatacaatgcttggccggtaacttttgagggctggaaaaagtggttgtctatgaagatttcaagtatgataaaaagaataaatactgccattcttgctgccatttgctattgtatttggctgaatagaaacaggtgtgtttttgaaggttgctccaaaacagttagctcaatttttgctgaagtgaagagtgtagttttatacaaattatactttgtaaataacaggaaaattactagacaagagaggaat

SEQ ID NO: 71532 - DNA, 1625 bp, Cannabis sativa
atatttttattagtatatttattagattgtttgttaatataataaataagataataaataattaaagcttatagcttttatttcaattacgtatttggtaggatttgcaactctgacgatgtcattgatgtatttcaagacataaaaattacattcttgattttttttggatgttttgagaatgttgcttctgatatttttagatgcggtccaattaacgcatctgtccccttgattttcttgtaggccctgttttgaaaattatattactattatacccatattttgagaaagtaataaggttacaacacgtgtaagggagctggagaatgaaccaattcagactctaaagaaataaatgtgcacagtcactcgcctcaaaaaatacaattggtagatatatttaaacctctcatttttaaagataaaggtgagccgtaaataacaactactatcttgtaagaccagggaggtgaacaatcaatggcaaatgtccatctcaggatacatagagaatacaacagagtgacaattaattagaaagggtagataatgagttatttttagagcttgtagctcattgactcacatactcgtcagtatgttgaaagtgtaagggatatacacaaaatgtgattcatctcagaataatcacaaatgatacaagatgacagcatctcacgtagatatactcggttagtctcaatattatacaagcatgagaaatatttctaaagatcatacttagctacaaaaattatcttcaaggtaaacatcagaagatgatcatgaatatagcgaggcgtagaagcttagtcagcataactgtgtttagataaagaaaagagcagttatagcgattatttgtttttatcacgtgtgttgtaaatataaaacattagaattatccatgtttcatgaacggttatgaggataagatcccatgggaataactttcaccctaaaaaacctataaatagggggaagatatcttagaatgggacacaactaaattgaaaaatatagagagcaatttaaatattatatacagtattctataaataactcataaaatcccagtaataagatggattcatggactatgaagaattaactttcaaaccatgtaaaaaaaccttttgctttcacatatatatatatatatactattactattgcgttatattatcattctgacatttatgtactaaattaaggctcatttattggttaacaaaaattagcattaacagtttggtgttttcattgagagtctcgtaaaaaaaactcaaaaaacacacctcccttgagtaatattcaaactttctttttttctccaaccacgtctgaggctacccctcagaatgatgacactcaaccgagggaaacaacttaacctctttggaaagaaaaccacaatttccagaggacaaatgcaactgaggtcccaactggagatggaatccctgaaaggcatagtcaggatgcatacgatcctataagatatgtgccattggtgaaattagcaaacagacaactcttatagagatcgacagaatcaaatcagagaaatactgagttggaacgcgaggctacaactgctagagtagcatgcagtgatgcac

SEQ ID NO: 71533 - DNA, 827 bp, Cannabis sativa
ttaagtatattctgttaaaccaataaatgccgttaaataagcacttttaatatataaagatgttagtgctatttttagatgccaataatcaaagaaatcaaaaagctataaataatgaataaataaaaccttacctagctagggtttcctctctttatctcattttaatttacttagggaaaccacgtgttgtctagtatagtggtagggattgtctttactgacatcctttcttgtttgggtcaatagctgtagccccacttgaaagggattaaaaggttggcccttccgaaagttaactttggtgccatttgtgtaatgaaaacccttgaagtaattattgatatgattttttttttgttaatcaaaacaagaaaaaaatttacctaaggagctttagttcttgaggttgttatatggtgcacatgaggatcacacgaaaagcttccatacatattttttactttgtgaaacaatattagcattcttcatttatagtttgatatattaatatacactaatatatcaatgtacaaaaatttagcgttttcttgatttttgttaaattttaaatatttatagtgctaaaaataaactttaaaataaaaatatttcataatttagacacagcaaataattcaaaaaattgtgcgaaattgtaaataactatattatatatccacatataaaaaaaataacgagattataacatacaatgtcaaaaacacaaaaatattttattttgaagcttgttttgtatgcaggtgaaataagttatttcaagactcttttttggtataataattattacttttttatataacaat

SEQ ID NO: 71534 - DNA, 1193 bp, Cannabis sativa
aagcatcttcgggagaaggagaacttgttcagacaatcatttcacatttaatgcggcatgggagaaacgtattagaacacccgtaaaaggatatgatagacgacgtcagcctcgtttacagtaattacacgataatcaaagagtctagtgacgactccattatgaagcatcagctcaatcaagagaggacaaagattactctcacctaaaccctatgatacctacgacataggtcatgtatgtattattctagacctcttaggaacttgtccacttagggggctagcactaaaagacaagtgatccctttttaagtgatccttacaaaactctaaaaatacccctgaacaaaacgaaaagggggatcgatcaatcgaagagaaaaaaagaagagagagaggactcaccaagaacattctctgtaaaagaactctcattcataacaaagactcgtagactatggctcattaatgcccgaaccacgttaaaactacctgcattaattattccaaagctcttctcattatatcatttaattggttgtcaaaaaccttggtcaacaatatatataatatattacatatatatatgtatattatttaatttttttagcaacaatttaatacaataattagattagtatatatgttatgcaattaaaagtttgataagatagttttttcttcttgtttaattcctgaaactttattaggctaatttttattttatttttatatttgataatgatgataatgtaaaccgcctaaatcgcactccaacagactatatttttgcagtgtggtatttacagttttaaaaatcatattagacattaaattcatgtggttagttgacataaaattataaaaaatataaaatatgtaagaaatataaatataaaattaaaatatttttttttaaaaataaaaaataataaataaatattaaggaacaaagtattatttattttacgataatatttatatatgggtaaatactatttaagaccttgtgtttcgcaaaaattaccaattggaccctctgttttgttaaatgacaaaatggaccttctgttttgttaaatggtaagaataggatccaaagctcaattttttaaaatttattttttaatataatcaactttaagacaatttctaacacgaacaaatatagaaaatgtaactagttttgtc

SEQ ID NO: 71535 - DNA, 1096 bp, Cannabis sativa
cactaactaaaagttcaagacttgacaataatataattcaagtcggagtatttattagtattgaaggtgttttttttttcttaaaaaaatagtacatctttaaaggcgattatttttgcttaaaaaaaaaaaaagatcggtcattgtttatcaattttaggttggaaattaacatttagtgtcagttatttcataataactaatgccatagaaactgacttagggactcttatagcattggttattaaaaaataagtaacgtcatatgtgcacttgatgatgatgcatgtcacttatgacgtgattatttcttaataactaacaccatattatataggggtttatgtaaccctaagccaacttcgtcttcctcatttcctcaccttcaaccaccaaactcttgccaaccgagagaaacccttgccaaccaccaccaaaccctcaccattttattatttctccactattttcactcatttttttaaatcttttatttttttatacccaaaaatataatctcagtgtttgaacgtcttttttatattttttagagcttagatgatgtggctgtggtggttgtagctccgactgtcggttggtggagaaatcgttgaatctcaacatctatttaggtataaatttaatttctaataatttttgtactgtacattgctttattttttattttgtaattttattaggatttttctacattgttaagattgtgttcttgtggttgtgcgtggtggccaaattttggtcggtattaattgccaaatttcagtaatatagtgaaaatctaaactttaatattatatatgtatgttttttgtgttgtattgaatatgtattgtatgtgtaagtattatacccatatttcgagcaacaatatgaagttgacacgtgtaacaaatttggaatacaaactatctcaaattatgaattaataaatgcatttagatgactcgtctcaggaaatacagttgatagaaatacttgaactcaccatcacataagcaatgacgagacgtgagtaataactaccaactgatgagaccagcgaggtgaacaagtctatctcgggataaacagaata

SEQ ID NO: 71536 - DNA, 911 bp, Cannabis sativa
atttacgtcggtcaacgctactattcacagcgttgaccgacgtgaatagtatccaaattattagacccgtctttttaaaaatgacgctaataatatgctgacctcaataatccacaataatcctctgtaggtaataccacaataattatgctgacctcacttcatttcttcacaccattcttttgcttaaataaacaaatattatataacattttattctcgtatatatatatatatcaaatttgtattcacaagcaaactacttgtatattaatcgtttttcttaaattattactttactacaagtataaaccaagagtatatatatatatatatatatatatatatatatattacaagcagggccaggaccagtcttacggtatgtggggcttaggcaaaatcaaattttgaagtcttagatatagtttaattattatcaaaataaaaagtttagtgaaaagtttagtgctttggtgtctaatggtaagactttaagagtttaaagatttagtcctttatagctacacattaaatatatatattttttaaaaatagaaaagtaaaagttctttaccacccgtgtttgttatatttttttattatttaatattttatccatatactaataattttttcacaatttcgggactcttagcgttcgagagctcaagaaatacacctggctcgcctactcataggaccgacccaattacacgtatgttttagtaatagctagctaggctaggattataaataataaagatcgttttactttggtgaagtaattaataatttaatcaaggtaaactataatattctaacaataattaatgaggttgaatatgtacgtaaaggaatttatatatatatatatatatatatgtaaacattgaatccgcaccataatt

SEQ ID NO: 71537 - DNA, 1549 bp, Cannabis sativa
cattgctgaaagttagtgtagaaccaattttaatactttagaattatcaagagaatcgataggtacattgattgtctcttttgtggcttgcgcagtgttggggtagtcaaggactctgggggttctgatttggtttctccatatgcggtatttcttcaattttaaaaaattcttgtcaaggaagaggatccttgagcaagtaaatgacatttactgacttcttcttttctgcaatttttaacacagtattgtagcattccctcaaatctaccgagatacctttcaccaatcccacaatcgtgggggtggagaatttcatggtgagatgatagatcgaagtaactatcttcatctctttcaaaataggacgacctattactgcattatatgcggagtgttggttaattaccataaagttaaccattgatttggcagtaacgggtgtcgttcctaaagttattggtaactttattatctctttcagttcaattctatctctagtgaaatcatagatgctcattataactggttgtaagtctttttcatgcaaacccatctgtttaaaatcctttaaatttaaaagattgatagaacttccattgtcaaccgaaactcggtgtacattatcccctccaatgttagcgactaccactaaggcatcggcatgtgggtggtgcacccaccttgcattgctttccatgaaagtaatgtcgtcacattctttctttaacaatattttaggtcgttcactcaaattatttacatttgttaggggtttttctttggcttcctttgcatagcgctcttgcgctttcatagaatctccaccgacatgcgatcctcctatgatagttaaaatattgtgaggggctctagaactactcgcgtctccagtattgtttttctcatctgctcaaggatgattctctccatttttcttatactagtcaaacttccctcatctgattaatttctcaatctcatcctggagaaaccaacattctagagttgtatggccaatatccttgtggtacttgcgaaacaattaagggtccctcttgtcacgattacctcggattggaggaggtttcctaaaaattctgttatgttcctcgattgcataaacatggtcagtggaacgcacaattcagtgtagttgacaaaataagggtcccctttcctctttggggatgtttctttcttagtgggggacttagcgagcttttgacttcgttgcctagatggactgcatcttctggggcttcgacccctagaattctttgatatcgatgcttggaaatgcgttaggagcaggtctacaaaggtctccaagttgatatcgatgcctcaggtaattggctaaaccaatcatgagcattatcctccaaagtcgcaacgagcattcgacatttcgtcagttgtggtacctagtctacttccataatcgtattaaatttatctaaataatcgattgggttagtaatacctttatacttgagtgaatcgaatagtctaaagccttttgagagccttgctttcatacttcttt

SEQ ID NO: 71538 - DNA, 1036 bp, Cannabis sativa
aaataccttcatattatattttttaaaaatatacttaatataccttctctttttatttaaatctggcatataatttacattaacctaagagaatattatctataaaactggatatatatattaaaaaaatattaaaataaaagtaaaatttaaataaataaaataaagtgagtttacagtataatttcctcaaattttgtagtctaaacaaaaattgggccattggaaggggcaaccactcagaagacacaagagtcgaacgactttataaccttggttggagtagcaaaactgcgtatattttctacactccaattgtgccactggtgctcggagagagagacagagagatggagggcaatggcattggaaatggcaatgggggtggagtagaggacatgaacgagccggctctgggggagtgcttgagtggctacgttgaccaaggaagcgtggagagtcacaggtactatcgttctcggaaaaccgtaatggagatgcttaaagacagaggctactccgtcccagcttccgaccttaacctcactctcaatgactttcgtgccattcatggacagtctcctgaccctgaacgcctccgattctccgttactcatatcaagaacccttctaagagggtatactctactctctcactcactcactcacgatcaccaccacctctttcagttttccattatttatttctttatttttgaaatttgattagtataggttcagatttggtcgtaatgggtaggattgaggtctacccttttctgcatgtcttccgatgctttgaattgaataccctaaacctgtatttgttttttctttcgaaagtcataagcagtttgtgttttttgtggatgataactatgaaagaaaagccttaatgaaggtgtgatcatgatttttataacgtagtttgagagatttagtgttctttggaaaagctgaaagagagtgagagacgaaaaaaaaaattcacgcttgaagaaagtattaatattaaccactcttgtttttttttttt

SEQ ID NO: 71539 - DNA, 850 bp, Cannabis sativa
caaaatataaagaaaatgagacaaaaatacactatcaaattctctattttattacagttttgctctacatttatatacctttttataattcctatttatcttataaacattttcttttaagtatttctcttctttctacatttgtacgtacctttatataacatttaattggtatatttataagaaaaacaatataaataaatagtgtatattttgaaatttaagtaaaaagtttttttttttttttgcatgtctataaagtaaaggtatatatcctttaatttcgtacagtatcaaactaaaagtcatttgcatacacacatatcttttgagctttttcttatatatattcgagcgaagagatatattcttttttgtgattgatattacaacaaaattacatcatgaccatagaacactctatcctatgctctaaaaacatagggagtctttcaaatatttgtaaaattaaactaaaaacacattatcaaattctataaatactaaacatttcaaatttcaaagtgttctttaaaaattagtattcatgttctatattaatacaacactattcgttaatctaaatatattttactaattttttgtttttttatacaaggatatgttaaaatataaaactttgtttaatatagttaatttttaaaatataaaactttgtttaatatagttaatttttagaatatttttattattactaaattttcaagactattattatatttacagaagtatctagaattttcttgtttgtttgagtatttttaaattttctagaattatctttcacttgagttagtagtgagaattaaaacgtagtcatttaataatg

SEQ ID NO: 71540 - DNA, 891 bp, Cannabis sativa
  modified_base (819)..(846): a, c, t, g, unknown or other
ggactgggacttgagacctgggacccgaacttggatcgggacctggacctgacctggtcctaaaccctcgccgggacccagaccaagatctaaaccctgatagtgacctagacccgaacacagaccaagacagggaatgagaccttgacctgaacctgaacagagacctggactcaaacaattactcgggacccaaacacgaaccctgacccaaaccaggagctaggaaccagacttggataggggacctaaaccagggacctaggcctcggaacctagacccaaattgaaatctgagacttgaacccaaaccaagacgtgacccacacctgggaatctgaagtcagacccagactcggacccaaaacttgcccctaaccacaactaggacaggaacttggacaaaaactaagacaaaacccgaacccagactcgaacccaatatcagacctgaacgtaggatccaaactcagattaaaacctagacttagacccggacccaaattcgaacctagatcgggattgaaaacccaggacatagaccaggaactaaacccgtactcggatcgggatcgaaacatgggactcggacacggacgtggacccaaactgaggacccgaacccacaccctgagcttaatctggacctagaccgaaatccagacctgaacccaaactcagaccaggactcgaaccctgacccgaattcgaacccaaactcgaactcagaatcgcaactagaacttgaactggactaggagaaggaccaggactgggacctaatattggaattaattttaccaggattttagatctacnnnnnnnnnnnnnnnnnnnnnnnnnnnnatatgaacttctaaaacgataaatcaaaacacataaaagttaaga

SEQ ID NO: 71541 - DNA, 960 bp, Cannabis sativa
  modified_base (33)..(35): a, c, t, g, unknown or other
tcgagcaaaattaatcttcttgaaagattatannngtttagaatgaactcttctctttccttagatgataatattgataaatttaatgaaataattgctggtttagctaatattaatcataaggtagttgaagaaagtcaagtaatcatattgctcggatcattgccaatgacatatcaagaagttaaagcaacaatcaagtatggcagggatgtgatctcgttagagggtgttcatgcgacattaaagttaaaggactttaatttgcaactcgagaaggagactaggaaagaaaaagcctatcttacaagaggaagaagtccaaagagaggatcatcaaggaatagttagtcaccatcaatatcaaagtcgaagatcaaagataatcgacaatgttaccaatgtgaaaagattggccacattaagagattctacagttaattgaagacacaatctggtttcaaaccaaactccaatgacaaaaatgaaccagaaaccagaaccagtactcaaaatataatgattatgaaaatcaaagaaaagattatgaagttgtggctgagagtagtggagatggacgtttagatggagaattattttcattttaaaaaataattattgacctcaaaatgtggccaaccgatagcgaattcctaagaatatggtattttccacgtgttacacaataagaacaataaaataaataagataaggattttcaaagaggttcgactcccttaggtagcgggtaatgacctactccacttttggtcgtattgatacctaaagatgatactattagatcactataggtgggatctaatatagctctctataaggttacaaaacatggataaaagtaggcagatcactaatgagagagaggtatagccttagaggtgtgtgtgagagagaggaggagagagcccttgggcctgtacaagagagagagagagagag

SEQ ID NO: 71542 - DNA, 782 bp, Cannabis sativa
aaactatcaaaacatttaaatttaattttaattttatattatatagaatagatattaatatagcttaattcgaatttaataatagtttcaataataatctatactccaaaaatataaagacttcatcaagttgcttaggactatgcaatggaaacacctaagcttatcccctctctctcgttgaattcctgtagtattagaataccgaccccaatttgaaaatcaaatcaaatcaaactaaataaatgaattctattgagtcaactcagaaacaaaaaccctccatcaaaccaagtcttcacaaaatcccaaaataaaaataattataataaaaggcaagaacaagactaccagttataaccggtcacctaaacccaatcacctccccatctatatattatatatacacccaactccactctctccaaagaaatattcgaagttgggtttaaccgtttaattaattaatttctttctcaataaacccttccttccccgccaatttactcgagaaccaagcagaaagaaggaaaatgaaaaacatggcgttctcaccgaaaacccctgaacacagctccgccaagagaatatcaacaagcttagtcgcctccgtactggccttcgcctatatgtgttcgaagcaagccggccgagtctccaagaagctcaagtcatcgaagctgacccaaaactcgaaagctcatcacatggcttcgtcccagcatcagcaccccatgatgtctccgtacaagtcgcacctcatcgacaagccgaagcagctt

SEQ ID NO: 71543 - DNA, 822 bp, Cannabis sativa
aggctagttatgtgaaaaaaaaaatacttttttcataaatattaaataatttaatatttaatatgcagcaatttattagttcaccctatacaatttctaatggctacaatctattttgtcccactcaaaggaaggtaaattggagtcatggagtttggaatagacaaaatattccaagacaaagctacattttgttgactgcagtgcaagatcgactcagaaccagatcgagattgaagaaaatcaatgtcatctcagatgactgctgccttctttgcagtagccaacctgagacaaaatcccatctattcttctcttgttctttctcttcacaatgtcttctgcagattaaaacatggttgaattggaaggttaaaacgatgaacctggatgcaatattgagatggattgaaagatcaaaggctagcagatttaggaagcgtttatggtttgctgttatagcttcgactgtgtaccaaatctggaaaaccagaaacctgctgctttgggaatccaaggaaccgagagtaaatgaggtggctaggagtatcaaggaagatgtaaagagtagattcatttatgtttggcataaaaatgtatctacacatgacaatcaatggtttttagagatcgtacaacaatagtaaatgggaaatagagggggaatcatgtaatattgggatgtaatattgtgatatagagttatgctcacacatagaaatagatcttctctttgaagatgctaataggatgtaatcaaattgttgaagtaatgaattacactgatttaccaaaaaaaaataatttaatattaataagtaa

SEQ ID NO: 71544 - DNA, 1330 bp, Cannabis sativa
ttagatggaacgactacttcatctcatttatatgtaattttgccgatctatataagtagatgttaaatttgtacatgtgtaaaataaattgattagatttaattttaattaattagtgttgtaaattaataattactacaaaactatacaatgtgtacattcatgtattataactaggattacaactatcaaaatacaaaagcactaaaccaatacacttttaaaggagacttaatactattcaatatttaattataatagtaatatatatatatatatgtatgcatgaaattcatcaaaaggaggtcaacaaacttaggttgaccagagggaatgtacttgcattctgcatgccctagacaatttgtttaatattatattatctctaatcaaagctttgaatgcactgaaatccatgtaagaaatacttttaactccaaaaaaaaccctaaagtacattttttgggggttctttttggaaggctctcattattattttttattttaaaaaaaataatggaatagacaagattattggtttagaatatacttgggaaatatttgcaatttgtataaagattataaaggaaggtattatttggcctctcatcatggcctttattaattaattaaaaattatgggtacttaaccatgtgctcccaacacaaaaaagagaacaatgaaatcataataactaggaaaaaaaaaagacatgattaggcatctttgaaaagactcaactttttttagtaaacctttgaaaaaaaaaatatttattattattggttttaaagatagaaaaaaaacaagattaaaaaaattagacccttttagagttgggcagtagaaataaaagacattaataaagaaaaactttatagggtatatatatcatcttgtggttaaggttcaatgttttccaaatcatcctctataaatatcatgaatatatatatatatataaacattttattatatattttgatgtttacgttattattattattattattttaaggaaataatattcttcctcatcaccttatctttttctaagatctcttaaataatcttgagatgaattatattatttttcttcttattattttggatattttgaaatttatataatatatatacatatatatatatatacaattctgattggggttttggttcatatattatttcgccttatcgtgtgacactatcaattaaattaatttgattaattattacaagatactttataagagaagagaaagctgcaaaagtgcagctgtatatttgtgaaaaactcagctcaagaatgatgctgaggggtccatt

SEQ ID NO: 71545 - DNA, 1943 bp, Cannabis sativa
ggctaaactaaccatttcaaatacaaacccaatatttctcatcttctcaagcgcaatcgagaaatttacttaactaaccatttcaaatacctaaatgtgcaaaataatttaagttaatttaatactcgtatgtggtcgcacagtataattcatgatcgtttctacgaccatagaaaattattttgctaaaaaaaatttataaaggctatttttacataacattcattgcaatcggtgcttgttgaatttcaccctttaagtaaagacctttgtaaacaacaagataagtgttcaaagctcgatgaaccttgttcttctgcatgaaatcgaaaacaacagccatatccttcaccctcttttgaatcatcaaaacttcaagcatgtaattacatgtttcagtggtgtgaacaacataaggcaacccttataaagatgagaaatgctaaaagactacaccacaagaacttagtaccctcctatatgtcaatatcaatattggttcaattaggtgtcgggtcttagtttaatgtaataacttttagtgagtatcgttaaccaatagtaaagcaacacattaagaaggtgcaaaaaaactattgatgcccaataacaacgctctctcaagatttcacaactttcttcttcttaaccagttcaagttcaacaccttcatttgggattttcatagcaaacccacataataaactcatttgtttggtcctcattttcaacctatttccaaagtacagaactgtaaatttctgaagtctcttccttccaatgactcactatgactacaaccacaactgaactcctactactacaatacatacttgaagaacaacctattaacaaacaaacccatcaaaagaaatagcaattactgaaataaaaaagaaaaatacattcttaggaatttgggaacaaagaaagaacaggtattttttaaaaataaaaataaaattaacaagctaataaaatgctgaatttcatatagtaactactccactacttctcccttcaaattttcctatttattcaatagggtaaataagggtataaatacctaaaattttaaatttataagcggcataaactcaatgctgtaatttttctctaattttgtcagtacaaacttttttgaatttattaaaagaataattgcaagtaactgatacataatatgtttttatctagactcaatgataacaaacattaaatacttatgacgctaaaaataaacgtcacttataaatttaaaactatttagccttcaatcaatctcaatatatatttttgttatcatttatttattttaaaattttattaattaatttgcatggtaaattgaataacttattctttttttattaaaaaaaaaaactgaatacgttactcacggacgacatacatggttggtttataaatataatcatgggttaagaaataaaataaaaaaaagtaattattatgtgtgagatacccaccataataatcaaagaaatcattaccattatattaaaaagagtaatttgtagtaaaaaaaaattatattttaatttttatatagttaatcttttatttttttttagtagtaaaaccctacattagttagatattcgaggttttagtatcacatatacgtaagtgtacagagtgattgacacctcaaattaatttgcaaaaaaaaaaaaaattaaagttaagggagatttgctaaaaaaatataatatgagtgttaagtgtataaaaagtagaacacaagaaaatttaactgcaaattttctattaaaaatcaaaaagtataattggagaacaaaaatagtactctcaaacatatatttatatgcatttactaacgaaaatcaacatatattaaatgcccattgccattgccgcaatgcaagcaaacatacctgacattaaaaagaataagagcatgc

SEQ ID NO: 71546 - DNA, 816 bp, Cannabis sativa
tgatatttaagtttaattatattaaaaataatattttattttgaaattaggttttgaaaattaaaaaatacgaaatttggtgaaaaatcaccaaaaaatgttttcaaaatagatctaaaaacttgattgctaggttgttttcgaaaacaaaatttgaatcagtatccagatttgctttctacatgttgtgaaacttattccaaaaccctaaaatcatattatgctaatcttcccattctctttgttgatagatgactactaaggtgagaaaggattagaaaagagatgcgaattagaatttggggatcataaacgtttctaatgtgtagggggagcattgctctttcgttggacttgtagtgtatatttctctacataattgcctaaagtagctagtgaattgataattaatactactaaatccctcaagatagtattcccatgtatgttccaatgacctgttttagatatattctgaaaaatctttgccttatcgaactgtatatacatatatttgcgacaaactttcagcattcattaacaaggactaaaagtgcgcgaggaattcgaacattaaatttgctttcaaatgccgaagggtgaagcattgttgggtttgcgagagtagggtagactttagacaatccttccaatccgggaaggaggattgaggatgcatcgtacccttattgatctatctcacacggcaacaatatgcatacgagggtcatgttgaatttttatgtaacaagcttcagcttctaggaaggaaggctggagttgtataaaaattcaagcttagacttcgcatgaaaa

SEQ ID NO: 71547 - DNA, 1046 bp, Cannabis sativa
tcccagtaaagtgttattgtctggttttctttcctacttttatttttcgagtaattctcttttacatttttaattgaattataattactcattaataaaaaaaagttgtttcttatcaaaagaaaattaatataaaatcaaagtacggtgttcaaaattgttcaagatacaagatttaattttcatgaacaaggttaacaatattcagttgacgtaattggatatatagtgcttagaaatttataagaaaacaactccaaatatcaatgacaatcaactcggtcgcatacaagacattgaaacagattcaaagaaatttcaaacatttcgagcaaagatgaatcatcactcaccaagtttctttagaaggtggcaaagcgcgctgacaaacgaagccaggtagttacactgatcaaaatccaagttgtcgccatttttttcgtcctagcaacgacaattaaagaatattacatttatcacaaatgaaaaatgagcataaaaaagagctccagcttaaaggaaattgaccaaaacaaatgagcatgcgttcagaatacatgatttgcgtgaatttcaacaaaaatggagacctcttcatcattgttcaatttgcgttttttaacagctaaacagagcaatccagttagtatagaagaggtaatacaatgaaatgtagtaatcaccttatcgatatctggagaattgtcaataagagcagcgaaaagagacgacggagataacccagtagaagcgagaacacaatccagaactgccggaacagcagccggaggtacttggcgtaagctattacatagagaattaattagagaaacggtggcaatgttgtcgtttatcgccataatctgagcttccttctctgagtgttctggtcaatgagcgggaaagcaataaccgtgtttgtttttcagacaagactcttaaaccctaaatcatgcataaaccctcaaagttattttcctttatttttttatttttataaatatagatagattatttttaatcaataatatacatttaattacaca

SEQ ID NO: 71548 - DNA, 1924 bp, Cannabis sativa
gtattgtattacaatagagttgtaatatcttgattttctttcattgtaataaaatctctaacatttcatgtataaatataaatagagaggagtctatttagaaaatgaaatacaaacggataataaaaataaatccacaagcaggaagccaattaacaacaacaataacaatagtgataataatacaaacaacaacttacccattattggtgcaataacaaaaccattgcgaaggctccaaattatcattatagtgattgagaatatattaaaacaaaataagaaaggtgaagaagtgaaaaaactgggggattatcaatcacatttacagaatttgccatgctcacaattgttgaaagaaaagctataagagttttcaaatgagatttattcgcaataacccctacaaataccaaatcgttattgtgagaatctcatttttagaatccgtcaattttatttcgattaatagactaaaacattttcgtgagaataggaaggtttgatttgaaataacccctacaaagctagattattgttacgtgcatggcaagtaagtttagttttattttagatttttagatgttatgtataagttaaaaataaatgtaaaatgatgtttaatgtagagtgataagatagaaaattaaatattaattttaaaattaaaattactattatgtttgtaaaatatattaaaaaccataataataataaagttatgtaattgaaagtaaaacattttctaaagttttgatgattgataaaaaaaaacactggaaaattttgataattacaagaaaacacacattcacataaaagggttgtgctaaaaggcaaacacattattgtttcttcaattaattaacctcattctttcctaaaaacacacgttccacataaatagaaataagtttccaataattattccaagaaatgagaattaactctcacttgaccaaactaataattcgtaaagattatccataaaattcaaggagtcgataaattacatcttgtgatcaccatgtgatcaaatttccatgggagtactattatgcttcaatttttatgcaaatacatggtccatttaactatctgttggataaattcccatactatctgtctcataaagaagttacaaggaaaaataaaataagaccttttacaagcctcaacagaccattataactcttaaagtagtaggttctattttcataggctgagatcttttatctctttacaataaagaagtaaataacaatatctcaagactctaactaactttcagctttacaaggaaatatctacaacagtttataactatttctcaactcaaaacaaacacatcacagtcaacaaacaacaatataaaagggagtacaacctgcccttttactccaagttattttcggccaagaaacaagagtggcagcaacctttttcctttgtaaaatcacctcagaaagagagagaaaaacatagagagttagtgagagatattgtaatacaaaccagaaaaataaagtgaagaatagagagaaaaatttgagattacctactaagctttgtggctaggaatctctaatcttgtcactgatattgttttgatggtgaagactcaagcaactttgagggtcgcttgacggagacgtacctctgatttagagggaactccgaaatcatttccttgtgtttgtcttctttatttttctgttggttttttcttttgttttctctggttttcaagttgtattttgtgtgtgtgtgtgtgtgttgcaggagcaaacgaactgctgtaggaggaagaaaaaagggcagctgcaagtttggtttaggaagctctagaatcggagcttggaaaggaagaagaagagaagaaattgattgcgctcggctgctgagttttcagcaagaaaggaag

SEQ ID NO: 71549 - DNA, 1344 bp, Cannabis sativa
  modified_base (26)..(39): a, c, t, g, unknown or other
ggtgttaaataacatacttgtgagtnnnnnnnnnnnnnnggtaaaataaattccaacaggaatttgtgaggagttttttagtataatattactttctccaaggtgttcttaaaaaaaaatatctcttgcccctatctcgtgttttacaagagtatttataggccaacttttcttcatgcgctggcttggattgatcatccttgggcggagatctgaccgttggtttggtagttggatttttcccatatggcatctaagggtgtcagattgtacaggctgggcatcatacacgtgtcggcccagggcctttcctttttgaattttccttattcttagtcgttggatcattcggttaggtacaatggtacacgcatgcttcatacgataacgtgtcgtgggggacaacctctgatgtcgtacctgaaaaagcctggtcactaggtccgtagtctaacatgtacgagcagagcctccacggaatgaggttgtggcttggttaggcacatttcaaaatgcctttgtccctctgggaaaaacccataccctttgcgggagccgatggcttcagttcccgggactggggaagacttcggcttacggatgtccctcgcataactgactaacagggaacttcaaatcacagaggccttttccgcgagctggggcctttatcttcctggagcgtctgtggaggaaattgatcggttgatgacttcttaacttttcttcattaaaatccacgtgtcacaatcacaaaaatccgaataacacgtatctatattggatctatagagcgttctatgtaatcaagagtgcaattccaaatctataatggagttaggaggaattaataagttaagaaatttactcgttaaattttaaatctacttattgggagcttgatttaataggcccatggtccccacattatctaggataatatcatcgtgtagactcaattaattgatttaataagtcaattagaattcgaaaatagactatgttttattagagaattttcacttagtttgggctaatttgagaaaaaaatagaaataatagtttaattgttaattaagatattttgtagatctaattaataaatatatttaacttgtatttttgtttgataataatttataattattagattaaaatcggggtttaaataattaaatgtgataagtggtaaaattaaaaaaagacttatttctttcattaagttgaaataaagtgacaaaataaaagagatttttacactacatactgaaattttcaacttttttactgtgaggcagaatattttttcaaaaatactgtgttttttttttaaaaatattgtat

SEQ ID NO: 71550 - DNA, 611 bp, Cannabis sativa
ctctctctctctctctctcatcgtcaagaagcaagaaggaattttggatttttcaacttcaatttagagcattctagtagaattttagtgtatcaattcaaggtataacccccttagcaccttcctctttgattttctaagttcaagttaggttatattgtgtgaattttggaattaggtctgtgtggttgtatgagttgtttgaatttatgttttgaagttaaaatggtgttgtttgagttgatttagagctgtttggtggcttggggatgtgtttggttaaggtttgtgctgtagagctcaaactttggtctttaatggtgttttcggtttttgagtttattgttgagttttattgcttggttttagtttattgtggtgcaaataggtattgtggaaggtttgggagcttttggtgtagaattgaggtgtttgtggtgtttttagtgtttcctgcactgaaccggtcgactggttcagtgggacctgtaggaaccggaattccggttggtccccaagaaaccccagagaactgaacttccgattggggagctagtcttccagttggggcaattttaagaaccctagtttttcccctttttgtaatattt

SEQ ID NO: 71551 - DNA, 1250 bp, Cannabis sativa
aataaaatataaataaaaataaaaaccttacttttattctcgtcaatcgatatcggcggcagccgagccaccttaactcctcccttcacaggccataaagaaaagagataattaatttgaatccaaacatgcatttgctgttatctctcattctctttggaacttggagcttcgataatctttcacactccaatataaatatttatacttatatctgtaaaaagagtggaaattaataactaaaatctatgagttacatataacattgcattgtatatacacaaatcacaacaacaaaacttattataacggactccttctgttgcggaacaaaaaacttgagtcatgagtaattttcttatgaatagaacataggtaaatataatgagaaaaatttaattttagagctgaattttttttagggtataaaagattcgaagttggtgttgggaaacagtatagaggaattcaacgcgtggatgagtgttgattgtgaagtcagagccatgacctatataaagccaattgtaaaatataagattactcgtggaagatgatggtgtgctcccaatacataattaattacccaatttttaatttctgtttttgttttttgtttttattcttttcgatcattgaaatcatcgttcttttggcgacaaatatttattttgaaattatattaatatatatatatgtaacaatgttatgtataactaagagtcacgggttcgtacgtaatgttttatataaagatatataattatgtacatatatcgttcttagttggttcacttcacattttccttcacgtcaaatgcatcctaacctccacctctcatcattctcagataaagaatctcacattattaatttgtactcatgttcaatagtatatatgtgaattgtaattttttttttaattattatatgtataaatttatgattatataaattaaaaatgaggtgatttgtaactttttttcaaaatataaattttttaacttcttaattttttttttttaaaaaaaaaaaaaactgatgaagaaaaataaaaaaagagttattattttttgaaaaaaaaaggaagaaattatggagaaaataaataaaaatatatattttgtatcaattaatatttatgaagttaataaaaaattaaaaaataagaaaattaacaagagaacaattaatactaattaaatagatttcactcaccttcttatatcttcttctttatatatatatat

SEQ ID NO: 71552 - DNA, 1300 bp, Cannabis sativa
cccatgttctcgaaacccgattacccatatccacgacccatgttctctaaaacccttcatgtaccccagcctaggctagggcctcctctctcgccattctcacattctgccattctttctgggtttctgctcaaaatgagtgcttttgccgggagactcaccaagtacttgagaatttctgctccgacaacgcacggatcctcatttggtactcatttttcaattatgttcatgtctagtatttatttgatatattgtatgtttgagagtttgggcttctgatcacaaaaatctaattgttgttatttatagcatgtaggcaaacactttttgatgttgttgtttttagctatatgatcttgttgcatggtttagtagtgtgtggtgattcatgctttgtagtatttatcaaatgaatagatgatgttgtgtttagtgtgtggatttctttgtaatgcttgtcttggtttttgggttttttttttgtatttactcattggtttctgatcacaaaagtctatttctgctctttatagcatatgaacatacactttttgttgttgttgttgttgatgatgatgatgatttttttagctatatgatcttgttgcatggtttagtagtgtgtgattcagacgtagtagtttaacaatacaaatttcatgctttgtagtatttatctgatgatgttgtgtttagtgtgtggatttcttggcattgcttgccttggtttttgggttttttttttttttttttttgttgcattggcttattggttttattgacttgattttagcgggaggggctcaaagaagcttgaaattgtggttttccactgagtcatctgaccaaaatgagggtgagaagaagaatgttgtagttgaagagtacaatgatgacttacttggtgacagatcagaagctgcaatgcagccccagggagtgaatcctggtaaaggttggctttaccgcggtgtacataaggtatttgataagagttttcaattatactttatgaaagtgtggtgttcagttttgtatttttgtagttgggtcttgattggatccatatgatataacaaataaaagtgatttaattgctgtagaatgtgtaatccattaagtgaattattttttctttctctaaagtctaaacaatgaaaatttctttcatgggttttgcttggttgtgttcttggtcaaatttgtgtggcaataactttttttatttaagaaccattcttcttacttagacgtttgaggaataatttaagttttgcattgtaatgcaggcaataat

SEQ ID NO: 71553 - DNA, 2680 bp, Cannabis sativa
  modified_base (1327)..(1327): a, c, t, g, unknown or other
tgtaaatgatattttggaaaactaatataattaccaagattagcccttaatcatttaaacaagttcagctaagctctaagaaaaccatcatttgacttctatgtacttgtaaaagctataaattctatatttatgattaatgctcccactcaattgaactactgagttcccaagatataagtattgggtcaatcctattggtaagctgtaacagacaagtcaaagaatccatatagtataattaagctagaacttaatcatctcaggattgagatcaattgacctaagatcaactatgtgacattaacttaaaaaagacataacaatgattttattatattttttttcactatcaatgtcggtccagaccgatgtatagccgatacatctaatactactttattttgataataccctagaaaggacattccacttatacaagtataagtaaaccacatcgccaattatcaagtcagtgtaaattcatgtactaataaattgtgggactaagttgtttgaagcatacagtcttgattatttttcactgtgtagataacactataatcatgaataactatatgttgaggatttaataaaatttatacattaaacaaataattatgaaagtaatcatgttaaccatgtaatataaaatgatttctaatattttattaattaataaatctaattatattaaaataagttttatttagggaataaaatcccaaaaaacttccacttacatcaatataaaactaaaaaatacatttcaattaatctcatcatcttaatgtccagatcaaatgtagtatgtagttctatcattgtaatagtatctgacaagttgtatccaatatcaacattctctaccattacatcttcttagtaacaaaatccttgatgttgtgaaatttctatctatatatttactcatcttagggtattgcattctttattatttgccaacgatatatgtgttatcaggaagtaatactaacagataatctatgactgaaataatgccaaaaattgtgtaaaactttccataggctaaataattatctagtagccttttgggccactttaatattcagtctcacttgtagagttaaagacttcaaatagatttttacacttctccaaaaatcactgctccagccccagagtaatcactatcaacaatttagacttttttagcattaatgtaaatctagaaatccgagtcattgtaggtcctccttattcttaagatttatttgattgtctttcaatgttcctattctggattaaactggtacctactaataactcccactcaacaataggngtctggtctaatgcataccaaagcatacatgagacctctcattgttggtgcttaaagaattttttcattgtcctttatcttttttggaatagttgaaattgttccttagataaataaactctatgtctagtagtcagaagactcctttagagttagccattagaaataatgctctagcatcttactaaaataagttgcttgcaccagagtaagtaaattaccagatataccataagccataagttatgataatctcaaaactatgatactaggatcgagaagttttattaagtacattgagtagacttattatcaaaatttcccttcttatccctgtaatagaaaaattttggtttctccatgtaaatgattttaaccatagctctcttggatttgattcttagttccatgttaggactatccattgcttgtttaaactaacaatgactttttatcacaagtgtcttccaagtcacaacatggtgggttcctagaagccctcccactatgacgaggtaccatgactttctatttagaacataagtggtattgacctcatcatttgtgtcaataaaactgatgtagtgggaccatcttatataaactaagatgatagagcacttcggaattgaatcagatagtatctcctctactttgctactttattttttgagtaagtcatgctcttagaaaagtagtatttattgaaacaaaaaatttcttatcataatgaccataggatggtccacccctaatcactttagaatggctatcaaatatgcaaacctttgttagatgttctagcttttcttaagaccatgtttagggcatccttgaatcaagtaatggtgtatactaagtatatgaccattccatcattctgaagttatcttgggatcagacttgttgaggtttgatctcttgatgttggattttactgtcagatttgagaaacagtaacttcccaactaacttaactgtttcgacagttaagttagttagttactaacagtataaatacaccttgaagtcctctcatttggtgtgatgttaagatacaaattcagagggttaagagaggattgagagtgttgttgagtgttgtaattggtttctcttgagattgtgagagatagccatttgagagacacttttgtaaggagcaagtctccactttgtttcagggttttatccctgttttgtaactctattaagatcaataaagatcattaccacaacaatgattaaggctactttctcccgtggattaagctcataatcacattgattatgtagcccaaccatgtaagttcctattgttctttacttctttcattaaggtcattttactgg

SEQ ID NO: 71554 - DNA, 790 bp, Cannabis sativa
gcaacaactaacatggggatttggcgggcatgtaaaggcccgcctcctcggccaagataaaatcctccttcttcttcccttccgtcggtgacattattgtttgaatattggcctgctgagcattaggcacgcccggattttcctcagtcccattgcaatcttctacagaatgaattgccgtcccaataccctctccatcttcagaaattccttggctcccagaaaaatactcttgagacttcaatgacgtaagactgccttctggacaaatttttttgttagaagaatccaccccatgtaaaatggagcccaaaagagaaagatcttcttcacaagaatctattctcctcttttttccaacttgtagaggccttatttccttccttgaaacactcttagcagttaagtccaaatctttcctggatcttaaaggcctggagagtttgtgggccggctttgaattagggcccaaagaagctttgaaaaccatagctagatgttccacgtgatgcttttccacctcagctaattcttttccttttccattcgaagagtgggtaatgctgggaccactgatcccatccgtatgcttgagcgccaccacctcccctcctgtactggaatctttcccatgcacgttggcaacaaccactggaccattttgcccttcctccatcgattgaatttccaaagacgacggactaccttccgccacaataccctccaccggagcttttgagctatcaccaatctccggttcgacctctttttgccttctagccgcctctat

SEQ ID NO: 71555 - DNA, 1254 bp, Cannabis sativa
acgtggcgtccctgttggacagggcgttacgatttaaataggaattgtaaaataccaaacaatgccaaagaatggatctttgaccaagctggttatggccatagacagcagtaaaacgataactatgggtcaacctcatcacattttattaaaaaacatcttatattttatttgaatatgcacttgaattaattgagtattaataattgttgtattattatggtaaggattttagtggtgacaagagaaaattttaaagagtatataatggtgacaagtggaatcattggtccaatttttttttaatactaattagatttcaactattagttgttatatatattgatatatcattctagtttattttgggatgtaatatattgatgtctaatttattttaaattagatatttttctaagtattgtattgtaatgcgttgatttctaattgagcattttttgttaatgaaatgagttgatgtataagtaatttatagttgttgttaagtttatttgttttttaagattgtttttgtgttgttttgaactttcatttaagtaaacatctcatactttggttatttttgtgtaatggtgttattgtttattttaaattgatacaacttgatgtgtatggcttgtttagtgctattttttttttcttttttgtaatttatttcttatttataaaatttggattagatgtcttgtttagttgttgttttttgaattgatctaacttgagttttatgtattgttgttattgtgttgcgcgcttttttattattattttgctgttttataatttatttcttaatgataattgggtagatatcttgttgttattttgggattttgttgttttttctagtgatatacattgtttggttgatagtttgttatttttatgttcgttttgtgttgttaattttatattgttttttttttaaataaaatatattttgtaatttaaaaatttaaaaattgtatttttaaaataatttttttaaaaaaaattaaaacaaaattaggaccataaaaatgtaaaaaaaaaaaaattacttttgaaaaacttcataaaatttattaacattaaaatcaaacacatgcatatatttagaatttatgacacgtataaatttccaatagatttttttttagataaaatatcaatttcattgaataatttagcattctgaatacaaaagatgtaagagttcaccagaaatagaaatatcagaaatgctacgatcag

SEQ ID NO: 71556 - DNA, 1783 bp, Cannabis sativa
tcttgctgggcttggcttacgggttctctactatgcaagaaagagtaaatcagtttgtgatcagccatgaatttgagggcttggcggtgtattgtgcatgttcaggccatactagaccacgcgggttgggtccaccagttgatgtattttgtattctcggttttttatcgcttaggttggcatgtaaaaatgacttgtaatgttttgtgaaaacaattatgggatcccgaaacatgtgtaatctttttgaatggtttgtaaattaaatagttacaagttatatttttactctataataaatttaaagcttaaatttctactcttattcctagtaatcccagtctagcagaattaggttatgtttaatggttgatcgtagcatgtctttcattagggcgttacagcagaggttgtataggattcctagttacaacaacggatactaatcagcctatttcaactagacataaaaatatgagattggtgcgtgaatttctagatgtatttcctgaggatataccttgattaccaccttctcgagagattgaatttgatatagaattagttttggggcaaaactagtatgaaaagcacattattgaatgtctccatcggaattaagggaattaaagatttaacttcaaaaattatataacatgggatttatcagaccgagtttttctccttggggtgctacagtgttattcgtgaggaagaaagatgtgtatcgattactgggaactaaataagctcactattaagaaaaaaaataccctttacccagaattgatgacctgttcaatcaatttaaaggtaagaccgttttctcaaagattgacctccgatcgagttaccatcagttgagaattcgagaaaaggatatcccaaagattgcattctgtactaggtatggacattacgagtttctggatatgtcttttggactcatcaatgccccagctgcattcatggatctaatgaattgagaattcaaggatattttggataagcatgtaataatttttatcgatgatattctagtatattcaaaattagaagaggaacatgaggtacatctcagattagtacttcaatgaatatgggatcccaagctctatgctaagttgaagaagtgtgagttctggttgtcacgtgtctctttcttagggcacatagtggacaaggatgggatcaaagttgatccggccaaaatcgaagctattcgggattggccaacaccaaaatcagctacggaggttagaagcctttcgggttgagctggttattattgtcggttcattataggtttctcaaagatagcgacaccttgaacgtaattgacccaaaagaatttgaagtttaattggacagatcagtgtgagaaaagtttctaagagttaaagtaacggttcattactgctccagtattaactcttccttctgataaagaaaagtttgtcatttattgtgatgcctcagacaaggtctaggttttgtacttatgcgaactggaaaattagtaattattctttaattaatgaaagagaagccacagcatctctaattaaataaaattatgtattatttatgtcatattacttttgtctttaagtgtgataaatttattgaaccgatgtcttcaaaataatttggaagagcaatcttctacttttatttttaagtgcataatgtatgcctaagagtctgtacaagacataacattggatttgtttcaagaatgttaatgttgaaattattttaccaggatctagatttactcaca

SEQ ID NO: 71557 - DNA, 814 bp, Cannabis sativa
tatatatatatatatattgagcttagcattatgtaatgtaacctcatttgaaggaaactgggaaaattatcgataaagactaggaaattttgtgaaaagtcttgtatcatatagttggtaattgaatgagaaatttttctatatgacatttttgttttgttcacatatatatatatatatatatctatatatatgtttttttttctaaggaaatttcttagctataggctttggctagcccccatttcgactacttttccactctgatatatactaattgaatttaagcttattaattcatgagatttaaattaatatatatatatatataatagtactatatataacttcaataaggaaataataatattaatataagaatgttttaattgcatgatcttaaaacaataagtgatcaaaatcaaaacttcatctggactcaactttgttgtttttttttttttttaaattttgctaagctcgaattatagtcttttatatatgaataagttttttagttgttataacaaatattatccacataaaatataaaataaaatatgagttaatgatgtcgatatgtactatacaataacttgatagatcaatgtgaatgttattttgacatattttaaagttaacaaattttgacatattcattactcataaaatgtatatgatgtttcactcagtctatcaatttacataatttaaagcataatcaattaggttatttgtttttgggataatttcacaaatgcacaaaaacaacaaaaaaaaaaacaacaaaaatacggtttaacggaattttaaa

SEQ ID NO: 71558 - DNA, 1035 bp, Cannabis sativa
tggtatatgtcaaagttcgggggagaaattgctaattagcctaaaattaataatatgaataaaataataaataaaataaatatacaaattttcttttatcctatttttcaacaatatatttctttccctccaataattttatctcttctatttctttataaattgagcacacacataattatatatagattggtgacttttaatatgcatttatatgtaaatatatttacaaattatattacataaaatacttaatggattttttcaattaattgatcatatggactttaaatactggtggctttctatataaaggagcttcaattattattttttttttttgtgagcaaaaaattgagaataaaatcaatcttatttttatagggagttttttcatatatattgttataattaactttttatatcaaatatatttttatatccatcaaaagacaaaaatacaataataataatattaaacactcaataataatttctttcaatagaaaaaatagtatattaataataattttattatttattattagtttattagtcaaaataaaaaaaaaattacgaataataattaaattattttagtaattattttttttatgaagttaaaagaaaaaatgtctaaataatattttaaatcaatttttatttatttattttgttataaaaatatatacaatttttttattattttttaatttttaatattttttacaaaattattttctttttacatatttttgaaataacaaatttatattgctaacttttaaaccgatactttgcttataatatacacatcaaatgttatattttgattatataaaataatcagtacaaaaaaaggattaaaatttataaaaattacaaaaattgaataataccgcgcggagcgcggcttagttttctagttgtttataaactaaaacaactaattcaaaaatcgaagaagattcgagcttcatcttcacttggacaatttccacccttctgtccaaccatccgactcaactcgctagg

SEQ ID NO: 71559 - DNA, 890 bp, Cannabis sativa
cttatgttttaacaagtttaacgaaacagatatatttcgattttacatataagcccttaaacacagacatatttaccaatcgagctccaaattcgccaccaccattgccaccgccaatggcgcctgtgagaaccactggagctattgttgcggcaatctcaatcgtcttcgtcgcatcacttttcgtgtgcaacctaaaatccaagtcttcttcctcgaagaaaaagaccaaacttcagaaaaaatcaagagagggtttaatcggtgccattggtaacactcctctaattcgaattaatagcttatcccaagcaactggctgcgaagtaagaaactagggtttcttttaatttcgattattgactgtattagtgtaattgtttatgtataaattatctggttctgttcaaaattttaaatttttaatgaaattgaaactgttttttttattgatttattgatttgatttactgggtttgttcagatatttggtaaatgtgagtttttgaatccaggagggagtgtgaaagacagagttgcagtgaaaattattgaagaggtaattcattagttgtgtactttgctttatttgttttacttagttcatattgtaaatttagtctttctttttgtttcaacaaaatctttagcaaccaaagttgaaggaagagatttggtgacctttttagtgtttctttcatagctttgttccatagaatctaaatgacatgcaattactgatttcaaacttgaatttaaagagatgacctttaactatgttggttttggtatatttgagatcatatcttgttacttcttattagtcttactagtataactcattagattttatggaggctgagttttcaagtccttagtggctgtgttca

SEQ ID NO: 71560 - DNA, 1523 bp, Cannabis sativa
  modified_base (174)..(178): a, c, t, g, unknown or other
cagatcatcatataaattatatatattatataatcatggatcggccatatatattttctgaagaaatagatgaacaaaacaaaagaatatatatatatatatatctattttatataaagtgtgcctaatgaaaaatttatggatggttttttctttattaattttataatattnnnnnatatatttaaaaataaaatttaaactgaatccacgtctttgccacttgttcattctccagtctccaccgactaactaaaccccaaatcccaaatggcaccacccttgccggctaggagtctgattctgaataagaattaatggattctatcactggcctccacatctaccgctcctcacgactgcaaccgaccaccactggcttctatggcttcaatccttgaagccccataagatttcaccgatgatgcttcctttcacactcaaaattccaaatcgcagcaccactggcctctacgacttcgatccttaaaaactcaaaggatttcaccatcatattaatattatatatcgagacattgccactgtctttcttcttacacacattagagggtgttcttcacctgttttgaactattagattatacgcactctgttttcctttcttggatttagattattgatttctgtggattttaggttgctgctgcactgcgcagcagaaccaacaaaatggttgaggctctttacagtatgaattgggtacatgttttctaatattaccatgatttcattattatctttgttaagtaatttatttttttgatttgtgcggttttggttttcaaaacatacttgtcgctgccagaaaggacaacttttattgttggccttatagcaatgatggcagataactataatgttctggtaaagctagattaagttgcattaaattttttggggtaatgctattgtcatttttctttgatgagaattcagatttgacgctggcttcacttttcaaactcaaattgataggaagggagtgatagtgaacaagagaacaatgatggttcaggaattttcgaatacttccaaattgcaagcgtgagagagagataattttaacacctcaaaggatcttttccaatctcactcagttgcttctactgatggatgcttatcattactcaaaaggaaacgcaatgatggtaaaattacatgctattttatataatttatgatgatcattttgtttgcatttatctatattaagtttgtttcttctaataagttgtgattcgtttgtaaattaatgacactgaggttaaactgtgtagccatgttgatggtgtacagaattatgcagggataagagagaaaaaaaagtaacagttgtatgttggatcttaatatttgtcttgtttttaataattatttgtgaagtgagggaagtgtgtaatgtggaatatttttattaataaaagacaagacaaaatattaacaaatgaatatgtgcactgaaataactaggtgttgtcgcagattcatctcaaaagtctttc

SEQ ID NO: 71561 - DNA, 992 bp, Cannabis sativa
gtcctcctcaacataatgaatttattgacaccaactatgttgatactaaatcagtcattggatcagaaaatgtccatttcttagttctacatttcaagcaaaggaaacgtgcaaagcatgatgggtctagttgtattgaagatgtctcttttccacttactcaaagttcagagatgccaccatctgatacttgctttggagcttttagctctagggatgaagaacttatcgactttgatgagtttgatgattatgttgataaaggatttgacagtgaggaattgcctgtagagccaatcattctaccataactgattgtctcagcaaagacgagtgttccaccatcagttgtttcctcaaatttacttattcctttaccagacccaatgttgacaatgtcagcttcaacaatcaccaattccgacttgaatgagtataccaaaaggtttgtgattgaatgcatgaaagacattcttcatttgttatcttctcctttgacaacagcagacatttcaaaacatcgtgctaatgtgggtatgcaacttgacgtgttgagtaccatttgtaggcattataaatgtggcttagcagaggttgcatggttcactgactctgtcaatgatttgctcaaagctcaagaaaagtctctcgcttctgctcaagttgttgagaatgcccttagtcttgatgaatctcttatcatggacattcttcgtcctgttgaggataatttgacaactatagatcgtttctccatatctgtcactaacaagacaaaggattttgaagattttaaggcagaggaagcagagattattgcagcaaaattagccatacaacaacgacaagctaaattcgaagcaaaaaaagcatcatttgaggtagatcattctagtctctatgattccttgaaggagcaacgacatctctctgaggagataagtcggtcaaaggaccaagctagtgtagaaaaattccatgaagctgagaga

SEQ ID NO: 71562 - DNA, 706 bp, Cannabis sativa
gtataaattgttggaaactctttgaatagtcattttctttggcccaaaggtcattgtggtcctattgttaccctaacaaataattgattgttaacttaaaaggaatttcgtccgtgtagggtttgtcatttaggaattggttatctttttcaagtataccatattttccattatagtgcttttgctatcattttcattgatttgaacatgcatttaggcttgggcaacacataatcttttctagtttcatacttcgaatatatgtttcattctttctttaaaatgttttgtatgctttgttctagtgctgccaaatctgaaagagggttttatcttctcccttaatacaagtaactataatggagtaggtctcattattgattgaaccaccataaacatattgttttttattgttttctctcttcaacctctctcactttctgaattactgaaaaatcaagtcaattaaattttagttttattttattttatttttgtttttaattacttttattcattaaaggaaagaaaaaatacacacatcttttacagtcaaatattacaaaaggttgagatacaaaatgactccaaatttaaaattaaattaataaatatttatttttttaaaaaaattaataaaatagcttaatataatgaattaactaataaaaattataaaagtacacttactacaaaataatttttt

SEQ ID NO: 71563 - DNA, 1407 bp, Cannabis sativa
atgataataaataagttgtttatttgaatcaaaattttgatatgtttctaattcatatctaatggcgtaaaagatctcaaccagtttagaagcattactagaattaagaggctagttttatctcagtgatagtgccaacagttggggattgtgagatttgctccatctacaaaaacagaacttaaccaaattttattaaaatttttggcagctaaattttttgaactatcattttatttgtatttaaccttttaaacttaaattttgatggtaaaatattttgaactattgaactattagaaaatttaaggcgtgacatccatttattacagttaagtgttaatatagactgtttatgtttacatttttatacaggtgattcaattgtattggaacatctacgaaaattatttcaaaattgaaaaaataataatcaatcaaaaaagagattagactccaaaaaatacaattaacatacaaacgagatgctctagctataaaataacaacccgattagcagattgtttgacagaatgtaaagaaacatcactaaaaaaaagttatagatgtttacaatcctcaacgataccattacaaatggatgacaaaacattcaaatttctaactgcttgtaccaatactagacaatcagatttgataacattgacaaccgagaacccatgcttcaaccacgaaagcacttccttaaaagccacaattttcgcaatctctagaagaacttgcccaacccacactctcgaaattccagccatgaccggatcatggtgatctcgaagaaccccaccaaaaccatgccttccctcattgtcaaacaacgcaacatcaatattcattgtgattttttcatagaccatagctcagccccatccgaaagataccaagtatcaaacgaaggaaacacacttctttcttgagcttctctccattgatcaagaatggtatgagccaaattgacaacaaactctacacaattggtccacaaagagtcaattccgtgcaaaccaaattgcccaaactaacattaccgcctgaacactttgttcctcaccctaccctgagaacaagtacaaaatagtccttaaacgactctacaacaactggaaccatagccaaattcgcaactcgccaacaattatgcaaaaaagcagaggaaactaaacaatgcaaaatagatttacctgttccatgacacaccgaacacaatcaagaaacatctacatgtttaatctttaattgaattctcgtcctagccgccctccatgcacaattttaattgccaaaacgtcttttaaaacgccacaaccttcccgtccacactaccatctcagtttgcttgtaataatttaaaaacactgttaactctatacaattaattttcattttaat

SEQ ID NO: 71564 - DNA, 1549 bp, Cannabis sativa
aagatctatacgtttataaatagagagtaaattagtcctcaccgttcatataattatatttttttgacattaagataacttaaaaatatcagttatattatgagtaaaaactcacctaaccacattataagtaacataattacatagatgaaaaatatttaaaaagtacaatacaaaatagactttgacacatagctacaatttgaattatcaaaaaaaaaaaacatagctacaatttgaaacataagtagatttttttattataattattaaaatatataagacttaatcattaattacactaataatattataacatattgtgtattatcttaccacacttctaaattacataaagcattactattagatatcaatagtacttagtgctaccttgtcattataaatagttaataatatttcataataattattcaattaaattacattagaccaacttaataccaccactaatgatttttaatatttctcaattatacagaaatgctaaacggtgcttaacatcattttatgtattaatatcgctattagtccaactaaatagcgagtctcatataatttaatataataatttttagagagtatcactaaccaattgcaaaacaacatatctagagatgttaggcactactggtatctaataacaatgctcatattattaggaagagaaatgctaaagagcaccactagtgcctagcacattcctatgtgtcaatatcgctattggttcaactaactatcatgtctcatatagtttaatataataatttttaaaaagtatcgctaatcagtcgcaaaacgaaatatctaaaagtgctaactaccgctaagactcaaacccaacagcaatgctcaattgctcatattattaggaattggaatccagtagtgcagtgtgaaagcactatgaaaaagtgagagagtgatgaatagaagttaaacagtttacttttgatttgcttttaagtaattagaaagaataaaagagaaaaagagagagaggaggggacccctaccacatagtacagtgcttgctttttccatcataatcagtagtaatatattgtaatagtaacaagagtagtgagttgtgaattggggagtggaagcagccaattaattggttagaatgagtgagtagtctctgttaaatagtccttagctaggctactccctctaatctgaatatgctgccactacccaaacaaagcccaacccaccacagtggctgctacacacctcaaaagtggggtgttgtagctaccacaacacaacttatcattattattgagttttacaaattttaatttaataaataatttttttttgataatttttctgttttatcttttaaaatattttattaaatttttttattttttttttattttacaatatacttttatattaaactatacattaatttttttaaaatgtatcatcaaaatcttaattttttaaaattttattatatttcattcattttaaatatataatattaatatatacatagggatatgattttgtc

SEQ ID NO: 71565 - DNA, 781 bp, Cannabis sativa
gtggtgtaaattttacatcatagtaaatgttgtgccaaatttggcacaaaatttattatgtatcaaattaacatcactttttgacacattattggagtacgctttttgttatatgagctctattttagctttcagtacacctccattgaagatgcttttatgtggcactaatatggtgtgattcaagagtctttggtgaaaaatacaaacatggatagttgctctaagaaaataagaatatttaaagagttaactttagtatgtttaacatcaataaactaaatttcagatatatttttcggttagctaaatagataatcataatctatatatctatataattcttttgttaaggtaggtgacgtggcagcaccaatgacctcctttctctattctttgatctctcattctttttaatttttcataatattttttttatttaataccaacattaacttataactgtcaaaatataatgtgataataattattaatattaaaaaaaaaatcaataatatatatgtatatatattaactttgaagattttagagattatttagtatgatattagaatatatgggattaccttgtattttaaacaaatctcctataacgtattattatattaatttataattaattatacatatgaagtgagcatttatatgaatatagcattaatttgtaaagcagtaattattaatttaatctatatttatgccaataaaatcatttaggtgttgtggtataatcctagattaattctattttttagtaaat

SEQ ID NO: 71566 - DNA, 1404 bp, Cannabis sativa
ttttttttttttttaacttttattggggaaaaaaataaataaaaaagttggtgttacgcgctttagttagtatttttctaaattacgagtgggtttttaggaattttcttaattatgaatgttctattcgttttgggttttgactgattttatttttttagtgttaattaattattatgatttgaataattggacagattttatttcattatttttttcatacaaacatgtggtgccaaatacccaatatactcattgtttgttttgaaaaatacttaattctgggtttgattttgtatcactaaaaaaatctactactactacagtaacaggactactctcttctataatcttctaagtgtaaaaaaaaaattaaaataaaaaatgataaagaaagaagaggataagtttaagaaaagaatcactaccttgaaccgggagaatcggtcacgactaagtgaagaagttacaaagaaaactatatttggagaaacggataaaaccagcgtaaccggtggacacggctgttggtcttcctttagctattagttttttttattgtttttatttataaaaaatatatttctttttttttagggggattggacggtgcttttttataatttgactgtttttattttattttattttttttctctaattatcagagtgccaaatgacggtggtgggacccacaatatatttattttaattattaattaataaatataataataataataataataattaagaagctatatatgggttagattggctggcaactctcatgcgagcatgatccatccattcctctattatctcactctattttggtacactcttccttcgtagaactttcttctatttttttttaattattttatttaaatatttaggtattaattaacattctcatgtttattcgtgttaatatattagcttgtgattatacattttgtctctaataatgaaattaagcatgtgcggatgcatataagttaagttagtgggtgttaaataatatttatatataggtacaaaatatgcttagtgttaaataatatttagatttaacaaaatggggtttttttttttaatattatttatgcataacatgttctaaaactaattcaaacgttagttgaatgaacatgtattcattttcaaattgtaaaaaaactaataattaaatttgttctactattgaattattaatatttagaagtgtcaaaaattcttaatgttgcttgaaatttgacaattagatatgcatcatgttttgaccaatgacattatatggttggtgtttgaatatgagtgataataatattcaacaaaaattataatgttattagaattgaagaaattaagtgttggaaaaaataataataatattttctc

SEQ ID NO: 71567 - DNA, 896 bp, Cannabis sativa
attgtaatgcacccaaagtgcttcggtatagagtaatgtccgccataggttccccatcacaaaggcttagtttggtggttgagcttgttggattaggacaagacttggctccttccatatgaagtcgagtgaggatgtcggttatgtacttactttgagtaaggtacataccagtagcatcacgataaatctctatccccaaaaagtaatgaagaggacccatatcctttaatgaaaactctctgttaagatcagagattaattgagaaatcaaggatggattaagacctgtaatcaatatatcatcaacgtataccaaaagatatacaagagagttgcccgagccatatataaagagactattgtcagagcgtgatgctttaaatccccattgaaataaagtggttttgagtcgaccattccatgcccgaggggcttgttttaaaccgtataaggctttgcgtaggaggcacacgtgatttggatgagtaggatcaacaaagccttggggttgtttcatgaacacggtttcttcaaggttgccataaagaaaagcattacttacatcaagttgtttaactggccaattggaggagacagcaatgcttaagacaatacgaactgtggtaggctttacaaccggactaaaggtgtcatgatagtcaattccgggtgtttggagataccctttggcaactagccgtgatttatacttgtccaaagaaccatcagcatttaactttattcggtgaacccatttgttgtcaattatatgcatggatggatcatagggaaccaatgtccaagtaccttgtttcttgagggcatgaaattctgaggtcattgcagcaagccatttaggattattgagagcctcttttatatttcttggttca

SEQ ID NO: 71568 - DNA, 1007 bp, Cannabis sativa
tgatagagaagatggtttaaaggattcaagtttagagtacgagacatttgtcatatgtaggatgggtgactttggataatttggttattcttgatattcacttgtattgagcacaaataatgataatccctaagcaagtgttgaaaagaatgaactcaatttgcaagagctttctttagaaatgaattgtagaatctaactattatgggcatatatcataggataatatgtgtaaatcgaagaatgagggggatttagtttttgaaacacacaaagatggactgaggcaaccatcagtaaatatgtttgagcagtggacactaaaatatacaaactatgggccaaatgggtacatgttgtatacttaggagatgataattggtgggcttataaaagccccaagtaacaataattagtactagaggcaggtagtaagggtcaatgagcaatttaaaattttcaatatagtttagcaggttatgattcagccatacaggctccaagaaggctataaagtgattacatcttcttccccgaaggtggaatagcaaggagatcaggtatggaatatactttcaatccctagtgcacaatgataaaattctgcgtacaagggatccaagggtgggtggcaaaatttgattgtcaaaatgtaaaaaataggtatatgcggcagtggtaacgacagtggtatgccatttttggaagtgtcgaaataaagcttattggaatcaaagtgttcaaagaatttcacaaattgttaagagaatgcatgtagaagttaaaacaagaattagagctattatacctaaaaaggttataagtgaaaatctagtttggtttgagtgtctgtaatagcatacagaaaatagacttaaaaatgaaaaattattgtatagtttatacatattttgttaaaggtaattaggatttttatcccccgaactttgacatgtactaaatcatgccccctgaactttgaagaccgttaaaaattccccctgaac

SEQ ID NO: 71569 - DNA, 1291 bp, Cannabis sativa
tatatatatacatatattggaaagatcaagctgggtgatatagatatgatatatatcctcccagacagctggccttaaactatacgtaccaaacaaaaactaagtataaacaaaattaattaataattaggattaccactactactcgactctcattattatctcataatctcaatattcatatatcaatattaatatagtaagactagttctatttcaatttgattttatacctaaaagtatatattaaaacagtatcttttgcacataattatgcatggctatattataaatatattgaaacaagtatatataatatatatacgtgcaacaagttgtttaaagatcataattaagttgggtatttattgatattttttagtaatatttgttagaatatttataaaccctaataaattatttataaaatataataattatttgataattattaaaaatattttaattatggtcaccatttaattaaaaaaatattattttagattgattttcttaaattaattgtcaaaatattatgataattaatgtgatactgatgtagtatccactactagaaaattagattttagaagcagtttttaaaggcttaagcaacagtttttacgaaattcgctactaatgttgttttaggcaacactaaaagggtatgaaataaccgtcactataagaatcttatggagtcggttagggaccatatagaaaaaactgactccataggtgtcaagattaggaagttagggtgttggttaattgtttgttaggacagttaatttctgttacaactgactaatcatttttttcttgggataatgtcggttagcttcttattatataaacccttgtaattcatttactttttaattaatgaaagcatataacagagaaataacagagtagtcaaactctgcttctcttttctctttctccttcttcttcttcaatctttatgtatctcatatggtatcagcagaaaccctagccaactcttcaatggcaaagtcctccacacgctcccaagatggcgttcctccacctgcaactgagcacaatcaatcgaaatccattctcgattccacttccccaccagcagccaacattccagttgtttctcgtcgaaatccaagctctagatctaggtctcacaatgaggaagaacctgaaccagtgcaatcatctcctactcctccagctgacaacgcaaatcaacccactcgaaggtcccttcttgatcgactagctcacgaagacatatccagcccattctttctca

SEQ ID NO: 71570 - DNA, 3171 bp, Cannabis sativa
  modified_base (89)..(91): a, c, t, g, unknown or other
  modified_base (1754)..(1758): a, c, t, g, unknown or other
agacaacctggcggctctgatataaaattgtaacactctaactaattttggtatgttagcgtgattttaaacgtactgtgtagctcgtnnntaatcaacgaggttattgaaaattgtgattaattaaattttacttatttatttaaaaacataaagtaagatacatataaaattccaagatcccatttacaaaattttaactattcatatacaaaattctgtcgcctagcgactacacaacaacagtcctgatgttgcaaagattgtacactccaggcctaaccaccccgacatgtacaacctctatctgcttgctctcacgactgctaagccttagccttgcccttacctacacatggaaatagcaactgtgagtcgacagactcagtaagaaaagcataacataaaacataataatatcccaggttataataatgcgcccatacacctaaccataatcctatccccatgtcccacatggtactgagtctagaacgttcatatgacaatactatcgaccataatgtcagcctatactcaatacgtcagtcatactccagccatattgatgtgacagcatcgatcagtatttcaccaaatatacatttatcagtaatcaatacaactctacgtatattattactgctatcaatgtactctaacaggcataaacaacatgtatgttaaacatgtaattacatatgcatgacattatactaatcttaccttgtttcaaaattcgactgtactgtccaatctgagtgaaacaactgctcggtgaattataggcccctaaatcacatcgatcataacatggataggtggcacgctaaatcataacctacacttaagttttaaaccaaaaacctacctactgtaagttaacattggaataccctaaactaacagggaattaaccaaccaaagctctgaaactaagacaaattgacaacacaaaatttttggggaacccagcagcaaatccggttaaccggttttacaggtcttgtaaatctggttaattggtttacaccaaaaaactccaaaaattccaaaacctaatcaacttgattccaatccttggtaaaccttccagacctgcatattataccccaatagacatattccaagcaacaacacaactaaataagctcaaaatcaaaaatcaccagcaaagagccaagcttgagttctaaaactcaaagcttgctcaaacaatatagaaactctcaaaaccagcttaattcaacatatttaatcataaaaaaactccagaaaataatatcaaactacaacaacaaccacgtaacactaaactaacaattcatgcaaaaatccataacttaaagttccagaaaccaaaagagaaaagtgctgcgagcttacctaaagcttgagatcacaagaaccttgctgaatatcctagaattgatgcaaaacacacgaaaccctagctggttctacgggttcaaaaaagagagagagtttttttttccctaatttttgatatttttttgtaaaatgcgatgaataatgattttattaaactaataacaatctaatattcagcatactaatcctactaatgtccactaaaggacaaaacattaacttaggcaaaattaccatttttcccttcccataacaaattaatcataaaattacttagggatattttggtgacttctaaaatctcgactattcctgacattcccaatgtctaactatactgcctcgctatactaaaaatactnnnnngtgattctaatagccaaatactgtgttccaatattgctgggcacaaaacatgcaaaattataaaattccatatatgacatataaaatgcattcccgtgaaatttgttgatttcctttcaagcaacttacccccattctctattgcgaacttgacgtacgaatggaatattgatgtaacatcttttaagtcatataaggctggccggcctaacatgaccttaaaggctgatggaacatatgccatcacagttatgctcttcggagcatgtccaatagtgaggggtaggcaaattcaccctaaaggtgcaacactctggccgaagaaaccatatacaggctagaggcaagggatcagatctttgagttggagccctattttttcatacggtgttttaaacagaatatttgctgaggctccattatctatcatagttcgagccactgttttgttggctatctgtacttccatgactaatggatcattgtgcgggaagcaaacattgaagggatcttcttcattgaatgttacagtgggttcccctacctgtggcatttttggcatcctttcttctatggcaagaactgcttcttttattcatgttgtaaagtttgggaatacctctcctgagctttgtccgaatctctaactatatacgggcccccaatgatgacttgtaaatgttcgtccactggtggaggtagtaacaggtcttggttattgtctacctgggcggccctttgattctggtcaatcttgacatatttttgcacatgcgggttattttttctaatcagaaattcaacttcctgcttcaaattgttgcattcattagtgtcatggccataatctccatgaaaatagcaaaatatgaacatgtctcgttaacgtatgtccattttcatgggagcaggtttcttgttcggaactactactgagtggccatgtagatggtcttcaggtcgtcagttaggatagagaaagtagtgaacttggaaggattctctcttggtgtctgttcagctttgcctgcgaactttttcctttttcccattgccttgttttgccttgttattagatcttttactgcccggatttgaactactagggtattgggggttttgggcagaccttccaactgaaggagcttgtggttggcccggtgtaggctcgatatctgcccatttaatggcttcttcgagcttgataaaaccatctgcttggtcaaggaagtcactcatagagtccatgggaccacttttcttgatgtctttccatagctctccaagaatcttgatggccccagtatagcagctaacttcccttcttcgatcaaccgtgctgcttttgtggcctctgtcatgaatctacttatgatgagaacactaaggctaaagatgttgggttttatgccc

SEQ ID NO: 71571 - DNA, 1394 bp, Cannabis sativa
gttgttcaggctattcttagttcgatctcgatgccttctatttttggtttatttgttcaagattgtcaatttattttatcttctttaagtgatgtttctattggtcatgttaaacagtctgctaacaaagccgcgcactgtatgacacgtggtgttagttattggtcaggtcgtctctttactaaaagtgatgttacccttactcttcagacctttgtattagcggatgtttctgtctaataaagattattttcattcaaaaaagtaaaataaaataaaatgatcttttacattttttgctgagaaaaaaataactttatacttgctatggattcaaattctagaaataaaaagtcatactaattagacaaataatagtgtgacatatatttatatggtatattactttaattaattatttttatttagaaaattgctaaaaaatattattggtacgtaatccaatcaccaactgttaattttgttgtaacagttaactgttttcagttaaccttttctttaccttgtatccttgtaatctcacatatgtaaataaatgcctttcactctttagtctacaaacttttatagacttttgagtttgttgtattcatcactctgttttaagtttatattgataagttcatacatggtatcaagaagccattgacgaaagtcatctatggatcctccaaacatcgaaaatccaccacgcacaaatgctccagctcgcgaacaaccactgcgaattgttcctcaatctcctccgattgctcctcagcaatcttggaatcccttttagaactatctcagttcctctcttattgttaaactcgatcgatcggacttcatggtttggaaatctcatgtgattcctacagttattggctgtagtctcgacgagatcttactcaccggacttgctccgccggctcaactcgccaatggtgatgtcaatctagaatctgtcacctcgaaaagaaaggaccagctcttgctcagttggctccgatcatcaatgtctgaaactgtattgggctccttggcttagtacaatacatcttacacggcatggaaggccctagagcaaggatttgcatctcaatctaaggcacatatcttgcaaatcaaatctcaactctccacagtgcaaaaatgaaatctttctatctccgattactatgataaagtaaagattctaattcattattttggaagaatgtggtcaaagctagtgacattttgagagaaggagcttgtaaagtggtgaatgatagcagggatactattatttgggaggattcataggtggctcatgttaaatctttctaccctaagtctagtgggcacctagagtttggtctgagaaaggtggcactacaagaaatgtcact

SEQ ID NO: 71572 - DNA, 1289 bp, Cannabis sativa
gattcggcacatcaagcaaaatagcttgacgagcataaggaggtacaaccccaattcatatggcactagccttgtgaaccaaagcataattggctaaagcatgagcaacgcagttggcgtcgcgaaatacaaatgagataccaacaaaattagtatataaataaaacatttaatattaatagaaaaatataacaaataccgtttattaatatagtggtaaaaaaaatttacagatcaatggatcaatttcaaactttagtaccagcatgttgtcatacagagtttcacctatactgtttttttaccatttgggattagttatttttgcatttacctattgaagatgtaagttataatgtgtgtgagagtctatacaactagatatggactaaattaatagccccctttaatatccatttttcttataaaattacccttataaagagaactagagaattattcttcaaatttgatttcaagtagtgaattaataaatatataaaatattctctttagtgtcttacaaataattagtcagccaaataattcatatgacatcatgaagacaatggtactagtactttattttattaattataaatattttattttattaaaaattaattattttcttttaaaagggaaattattttgtaatgcaacaattttttatatagttagcattaaaataaaaaataaaaaataaaaaatcaacaaatgtttctatgttaaaatactaatttgtggtataaaatacttaagtttaatttttagttgcaaataaatacttatgttaaatttttgacgatctgtagcgagaaaataacacgtttgatcgagtatgctaccaatcaaaatttaccgctcattctagtgtgtgcttccgaagaaacgcacatgcaagaaggaagtttgagcttaatgcaaattgctaaactatcttatgctttatatgattatcaatcaaataaaaataataatacctaaccgttaagtgttaagttattattcacgtgtcattttcttattagtatatttaacttaatttttaaataaaaaataaaaatttaaggacttgaactgattagagattataacgtggaacattgacttgacacttaacggtcagccaagtacctacggaagttctaaaaatataacttagatattattataccgacaaaaattaaatttaaatatatatctgcaactaaataagtatttatgcctcaaattaatcaaaatttaactatttttggactctattttcatctactatatattcataa

SEQ ID NO: 71573 - DNA, 1640 bp, Cannabis sativa
ttttttttgttttttgttaagcgatatgctaataatattggttgtttggctcggacatcctattctatttctgatcgaaaatgttgttccttgtaaaattaaagttacattgttaactgatttggtttaatgaagtttctcatttttactaaaaaaaacatttatagaatatgttgacaaaatgtttaaattcataagattcataataatatttaaatgcatgttattattattaaatttatttagtgatacttttgtatgatggcagaaaatagaggaattggaagagtaccactaaattggacaacaaggctttccataataaaggacatagctaaaggcctcacattccttcaccaatttctactccattacaaactccctcatggaaatctcaagtccacaaatgttctcatacaacatgatcctcaaaacaacttattccattcaaagctcacggatttcggatacttctctttgtttggctcccgaaagccctcttctgatcatcaaaacctagcagcctcaagggcaccagagtatgctcaaggaaagaagctctcacggaaagctgatgtatattgtttcggtgtgatcattttagagatcataacaggaaaaattccaggagagatatcaccatttagtgatgatgaaacaacaacggaggatctctctgattgggtacgagcagtggtgaataaggattggtcgacagacattttggatgtcgaaataatttcggctagagaaggccatgatgagatgttgaaattgactgaagttgcacttgagtgtacgaatgaggtgcctgaaaacagacctacgatgagtgaagtcttactaaaaattgaggaaattgaacatagagaataactaaagctactcttttctttaatttttaattttttttctttatttttattaaaatattaaaatgagatatatatatatataaattcttttagagtaatagttagacaacttagttggtattaggtagtaattaagcaatcgacttcaacaatattttctaaagaggaaaataaatttgttcataattattaatttctttgatcaatctttaattatgtattagtcattgtaatcaaatttaatgattgtaaattaatattaaatatcatatatttagatttaaattagaatatataaaatttaaaattatgatacaaataatactccataaagtttgcaataataatatttataaaaaatttgttataaaaatggttataattttttgaaaaataatgttaagaaatagagaatctgatttgttattaacaaagaagaatctctgattagtaatttttataaaatttaaagttcaaaatagtatttatttctaaaaactaattttctcattaaaatgttaaatgattttatccataaatacgtgacctaatttattatttagttgctttcacataaaaaaattaatcaactattattaaaatctgaaacttacacaaaatatctaaaattacactttatatatgtatatagggacatgattttgtcccgtgattgtactttcacggaatgtattcagtgatgtacgacaaccgttagatgagtaagttatttgatctgagggcttagattgatctaggggtaat

SEQ ID NO: 71574 - DNA, 4488 bp, Cannabis sativa
  modified_base (2898)..(2904): a, c, t, g, unknown or other
agaataattaaaacctcaaatcagatatattttattgcaattatatattattaaataaataaaatgtgtggtatataaaatttgaataaactagaggttcttcccttcggagtttgggaacgacgtggatcgatcgagttcatgccgttgaaccagccaaatcggcatttgagattaaggctaagatccggcgagctatagaggcagagggaataccgtacacttatgtgtcctccaactatttcgctggttattttcttcctaatctcgcccaagttggtgcctctgctccacccagggataaagttgttatcttaggtgatggaacccctaaaggtaatactaatcatcaaactattttgttattaattttatttacgaataccttttattaaaattttattcccaattgtaatatttggtttatgttgaaatgtgaagcaatttttaacaaggaagaagacataggaagttacactataagagctgtggaggatccaaggaccttgaacaaaatcttgtacataaggccaccagccaatatttactcatttaatgaacttgtggcattatgggagaaaaagattggtaaaacccttgagaaggagtatgttcctgaagacaaactcctcaagactatccaaggtttgtttttgaaactggactttcgtattataatattaattagcttcacaataagagatttgttctgaaatttaagtgtttaaaattaattgcagagtccccaattccaatcaatgtgatactatcaatcaaccattctgcttttgtgaaaggagatcatacaaactttgagatagaaccctcgtttggagtggaagcttcacagctttatcctgatgtgaaatacactactgtggatgagtatctgaatcagtttgtctgatgttggaggttgagggctagagtagccacccctcctattgtttctatctttgattattcactaaataagtcataatacacaagatgttgtctctgtttcagtgttttgtgtgagaaaaaaaggctgaacatctcttagtaatgcaaatattatcttgtatccaagttaattgaactctgtgactttaaaactagggacacatcatataaatatttccttagctatctttgttataagtatttcttgtatatactaatatcacagtacccatatcctattttattagttagagtacatacaggtgtttccttgagggaattaacttatcctattgaattttgatagaaattaaaaaggattttttcgtgtatatactaatatagtaaaaatattacacataaattgagcaggtcctataaatatttatctgcaacaaaaatttacaaaaatctctattgctctatccattcaatcttacccaccttcgacaaagacaacttccaaaaactaaatcaacaggccaaccaaaaagaaaccaagttaaacgaagaatcaccataaatttcagcgacatcacctcagaagaagactggaagaaatctaaacacatacaatttcacatttatgagaaatcaggcaaaaaaattagttcgaaactaaaattcagccctgaattacaattaaaatcatagaaaattaatcatcttaatatcaattttttagatttataaaatgtagatttgtctgaaatagatctggagttcttgatcaatccaaatcaggtataaaccaaagaaaaatgtacactagctaatgattttctcgttgcattaacgttattttctaaattttcaatagtgaatttattcatatcaaatcacgaataagaaagaaaaattgaattcttatagagccacgtacgtagaaacgttgttctagttttaaagtttctgcgtagttgcattgcagttgtattaatattttactaatgttttgaaattagacatatcaatgattacaaattgtcaacgatacaatagattttatgatatttgtaggtgtttcatatctataatccaacacaaagctcattaaaaaaagattataacatgttagttttattaatatattcatttggttgttataaagttggttcacaaaattctaatagttgtttctccacatattattatattaaggtacaatttattgttgattagtgacaaaaaaaatactaacaaattttttcatgacggtgtccattcaaattttctatttctagttgcatttaagttgtattttagttgaataatagttgtgctactacaatattattatttttttaaaaaaatagggctcgaaattggcaatacacgactcaaacagagaaaacgcgattgtggtaagttttgtttgtattacatatgggcattattagttgttttaaggtttaatattagttgcctcacagtaaatataactgatgcattacaatttcatgacagttatcccatggctgacttacaatgcttaaatttttaaactgtcaggaaaaagacacaatttcgtttcttatattttgcaatgaacagtttgatcaaggtacgaattatgtaaattacaaatttactggccaatacatttcaatagattgcaaatatgaagaactagtacacaagctgaaacaggtgctggaatgcaattaagaaaacactcaactgtaactgaaataccaagtaaaagtaatatactaaccgttgaggataaatgacgatccaagcctattcttctacatgcaactaaaattgaaagaaccttacttcacaaggtatctattgtgtgtgaacatgatcatcaacacaacaataacctacaacacctccttctttgcaatgagcaactcattagttgaacaacaattgttttaaggttgtatgacatatataaaatattaacagaaacatacagtattatcaacatcatatttgacnnnnnnntgtgaagtttcaaaacttttcttactacattgacaattctattcaaaattttcttattattaaagtactgcaatttttaaggtccaagataagtgttaccatggggactcgaactctgaagaataaccaaatgaggaaccttatgcaaagcattccaaccaactacaccacacactcggtggtacaattaatcagtcaatttaaaaaataaaaaataatcaatacttttgtataaaaaaaaaaaaaaaaaacttataatccttagagatatttaaaaaaaagaataaataggattttttttctcctaaagaaactattaataagaaaagttagactctcatcagcttggttctcccctttcttaactccggggaggagaatgttttcagcaacattaaactttactttcttcttgacagggtgacgatcactttttttggtaggcggagcaaagtctgaatcatcatcttcaacaacgggccatttgcctttagatttgttggcaagagatttaacactcatttttgaaggttttttcagtaatagcaatggggaagatgaagaccaaataatgaccttttctaaaatagaaaaaagaagaaaaaaaaattagaaaaacgtggtcaggtgatggaggaagatggataaaatcaaatttttttgttcaaaaatagttttgatcttgggagaagtttttaaatagaaaggtacaatgtaaaatgaaatgaaactgaaaaaaaaaaaaagaaaaaaaagaaaaaaaaaaagaaaaagatgatagaaaaatggaataattacaggaggcgccattttttgtaaaaaaattatatttttacgtttacagatttctttttacatttttacggttttctataaaaacaacacgaaaacaataagaaaactacataaaaataacatgaaaataacatttaaataacatcgaaacaacaacaaaaaataacatgctgataacaaaaaattaacaagaaattaacaagagtacaacataaaaagaccgtattttctataaataaaataaaaaaaaatcgtaaaaatatttgaaattctgtgaaattgtatttttgtaattttttgttgtttttgtgtatttgtgaaataattcctagaaaaaaaggaaaaatagatagtgtgtgaaggtggtataatgacatcatggatgtttaagaggtattagtgtaaataaaataaaaacaatgataaaatatagaaatagccttgtatttttttttaaataaggcgttttataaataaaaatcaagttagacatcatcgtcgttacaaaagatagaatctggtatagaagatagctctaccataccgataacattgttgataaaatccacttgcccatgttacgagccacaaatttataagttctaaaataaaagaaaaattataacttaacataaaagtagacagatgtttacaattacacacatagttatcaatgctccaacagttaccggtacctttcagagccttgataactatttcagaatcactctccaccaacacaaaaggatgatactatgaaatggtgtctccatggctagcagacaagcc

SEQ ID NO: 71575 - DNA, 1330 bp, Cannabis sativa
aaaaaaaaaaaaacaaaaattaaacataaaaatataattttttttaaaaaaaattatgccttgtgtaattatccctaaaatattttcaattaataatgggagatgatctcagatgacctattgattatttctttcttaatttggtaaccctttattgacaagcatccaaaacttaaaataaaaagagcacaaataattacaaaagggttagcgtctattacactcaaaacttactcttttgggctatcttgtaattaatacactttcttttttatacagaaatgcaccattattttttgtactctatgtgatatcttgtcaatctcttattataatctcttagtctatttctatactcaaaaatatatatcaaaatatttcttttcaaaaaaaaattcacgatgatatttgttatagttacagcatcatctatgtcaatttttgaaaaatcgaatagtttacaataccgaaaataagtttgaagtttttaaacacccatagtagactgtaatatcaagaacactatttttcagtactgcgaattattgagaatttttcaaaaatttacagagatgatattgttgtaactataacgaaaatctctatgaaaaaaaaattaaaaaaaaatattccgacatgtgatttcggacgtggaggttgactaagagattgtaataggaagttgtaattagcactcctctaataacttttagggagtatcgctaaccaatcgcagaacgatacctctaaaaaatgctaggtaccactattaccctatactaatattttttttattatatgtacctaaaagtgttcaatattatactaaagcagcctactataagtaatttataattttatatattattaattaaattaaaatatgtaggaggtaatattaaattataccaatatattattatactatctttggctttgacaccttaagaaatgatctagtaaaactacatcacttatgaattagtagtagtcgtgttgtagtttctatccttttaattataaagagatttcaaattaatttttcatgagtactcttagtgagctggattggaaattataaatagattattagatttgatgaggatataattaattatcatattatgtggtacaatgtaaagattaagaacatgtaataatatattttaggaaaaaaaatgaaaacacaaatgtaattaggacgagtttatgtaattgtttcctcaaactcaaacctgtaaaatccaaactcgaaaactcgaaaactcaaaacttgttaaaaatttaaattttttaatttttacacttcaaaatggtttttttttttttt

SEQ ID NO: 71576 - DNA, 821 bp, Cannabis sativa
atttacagtgttaaataaaatttaaatattttattagataagtgattatttttttgtagtaaataattgtttaaattttatttttagtattgtaaattattaaatttttttaataaaatttacaaactgtcttaaatatttacaacaaaaaatcctcctaaatactaaaatggattggggtctattgtagtacaagtttttcttatactataaagaataaataaaattttacactttgtctcttgaattttttaattttaaaactaaagaaaatgttataaatgtctttattgcattaaaaaaaggaaagttccttcttgtctaaaaacagaaaaaaaaaagaaaaaaattctttctgtggtcatggacattataatacgtgaaatctaatttaataaattattacgcatattaacattgcattagtaccacataatgtattgttttaaaaataatgaaatttgagaaatttattctagtacttctttgcttgtttccgaaggagaaaaaatggaaaaagctttgaagaattatcaattttgcaagagccagagccttaaaggctattaaatgtatttacattagaagattcctctatagtttgaacgttgactgacttaatcaatggcttcctttatgatgaattattggctcaactcattctttattccatacacaccaataatcacaccatttatctatctagctttgtttctaggcagagctcaaaagggtcagacttaaagatgaatcagtgtctgtaagaatcttttactgcccaattcggtttgttttaatgtttttctcatgggatttgttca

SEQ ID NO: 71577 - DNA, 996 bp, Cannabis sativa
atatatttatatgccttgagagtccttcaagcctatttcaaaaaaaaaaaaaagtttatattggattaaaataattttgaaatatctatagattgtacaaattagtagtgacacactctaatatatacttgttatagccggttcttattgtagaatatatcagctccaaagttgtatattttttaagaactaacttgtatatatataaagagcaatatatgcatacaatgagtaataatttacatccaggaactaaattgtatatatatggggcaataggctttggatgaagtcacgcacagtgtcaattgcatgactagtcacgcacaataaataatatatatatatattatcaacaaatatagtacaatctaaaaaagtgacacatgttcgttttactttttctttttctgacacctatattattttaagccaacaaaaattacataaaggacaatactaacctaatataacgggttatactaaccggttgagttgacacaaacatttactaatatattttggtaattttatatgtgctaggtaaggatacaagtataatttcacattaagttttcacgcataagtaatctattacgtacgtttttgagtgaatatataccacacataaataatatagatgttactgggtaaataaagaccatgcatgaaaaatattagtttataagaattttctttaggagtacaagtaatatagtaatttgttttattgaaaaaagaataatattaatttgaatatttattaaaaataaaaataattaaacttaataaattttatatattttaaattctacttagttatagtattttctttagtttctcttaaaatacatttttttaatatagctaaaactaataaacctatttctaaaaaatatagatattatatgtgataaactatactataacgttaataatataatttattcaattttatacttcattcacaataaattgggtataattttgtttttg

SEQ ID NO: 71578 - DNA, 1225 bp, Cannabis sativa
gttaggctatttatagcctacttttggataactttttagagttattttctttttatgttgttactttttggacaattttatgcttattttcctttattttaggttcacgagttttaaactgcaaaatttgtttactaccgaaaggacaagacggggaaggaaaagatgagaaaaatcatgctgaatttttaaagctcgtcacggacagaccatttttggccacaactaatttttatcgtggcaagaaatgttgtggtcgcaatcaaggagcctaggcagaatcgatgattttgacctcctatagtcaccgtaacaaggctattacagtcgcaacgatgactccgtatggctcaaggagattttcgtgtttactcaattttaagttttaaaatgggggttttaaatttgtatagggaaattcagaaaagaaccctaaaaaacaagagaagaaaactcttggagcgagcatgacaattcgatcgatttctccatgtaatttttttctcttctctttaatttattatgttttattttgtttttattttaatcatggatttgaatatgttgagattatgaactaatttccttatttagggatttgaggaatgttggatgattttattccaaaagttaatatgatttgctattttttctttcttggttgtttgatttattcatctttgtacttattacatgtgttttattggccaccttatgaatgatctatgatctcaatacgaaagttgaaaattgagtattgagaatgctctaaatgaataaatataggttctaatatgaaacaatagtattcacacatgacccttagattatttattaatgtaaattatatgttattctatctcacaaatgcaataaatgacacatagtctaggacctttatcatctgaagagtgtttaggtcattttttatagtctgtcatcactttctttgaaagaagaatagtaaatagtattatcaattggttaattgaaacaacttgattcatatccttaatctctcattcatatttgaacaacttttatcgctttctttaattttttgtcaatttatcttgttctctttcaaaattatttttcaaccaaatagaaacacaaatctagtttagtggtaatcaatttcaataatgtgggttcgaccaaacctgtgtgagtactatttgatatgtacacttgcctagcataattttcgtaacagcgagctgtt

SEQ ID NO: 71579 - DNA, 865 bp, Cannabis sativa
  modified_base (350)..(352): a, c, t, g, unknown or other
  modified_base (788)..(790): a, c, t, g, unknown or other
gagagagagagagagaaaagtttgagagaatggctaacttagggcttatgttccttttctaaaaataaagagtaaataaccattttaattaacaaattctaattaaaaaggctgaagcaaataagacaaaagaattaacatataatttcttttaataaattaaatttcctttttcctttaaatgaaaatcaaagattcttaaaataaaatagattaataattaacaagggcattttaattaagaactaaacccgacaaaatccaacactattaaatctaacgatgacgccccgaaaaaaataataaattgctttaatacccaaagtacgactctctaaaggcccaacgtnnntttccacagcttccgaacacaaatacaggagttgggtaatttatattaaatagcataataacataaatgatattaaatatattttcaagatatacatttcataattattaattaatctcatacataaatcttaattatttaataattcaaggtattaaccatatgcggtctttacaattgtcgctggaaaagtcaccaagaaacaggtttcttaatgaggaaactggtttcttggaaattggtttcttggtaattttttcggtaattttaccagtgacaatgccaagtccaaaaactattgtggagtttgatgtcagtgccgaaaaagtcgccgaagtagttgtcgttgtcagaaaaatcgccggagttattgcgggcgtcaaaaaggtcgttagaattggcattgtcacaagcaaaatcactagaaaaatcaccnnnaaagtggttttttcatcaagaaacaaaaatgatatacactgaaaataattgaaaccagtttcatcaatcaaccaa

SEQ ID NO: 71580 - DNA, 1687 bp, Cannabis sativa
  modified_base (785)..(790): a, c, t, g, unknown or other
ccccccccatgccgctagttgtcgtgatttggctatttttattgtttcacctctgaggcaagttttgtcctcgctctgacaacaaaaagatttttcctatttcctaaggaacttggcagaagtcttccttgaagctgatctttgaggagatcctagcctcttctatcggttctttggttgaactatcttatgagatcgttagactatcgattgtggtgatctaactctatttggtgagatcgaaggatgtactcctggtcatccatccatctcaggaatttgcatctcaactgagcaaaaacatcacaatcaatagtgcgtggttcttcaattaggcttgcacgacctatagcttccctgaatctggccagctcaaggtcttcacctaaatccaaatgaggctcaccaactctggggcctatctctccagcatagaatcggagtcgataaccagtcgttgtcccagggagctgtcgcccctaggtccttccttcactaggaggcaccaatggtgggtcttctctttgaggcaagggcctgccacttgttccactggatgtctatatcaatttggccagctatagtggccagactggtggcacttgttgtggtgataggattcaccatgtttgtagtgttcatggggattctagtttagattggaacttgagtacttggatctgcaatctgtgggtcttgacggagacccaaagatgatgatggtgcgataggagttcttcttgtgttcatcatggcatttgatcagatacgatatccacgctctnnnnnnaagcaccaaactgttaacctcaaaaaatggtcaatcgatagtaagatctgatgcttgccatgtgttttcacaaataagaatgaaaaacaataaacaacgaatttgttatagaggttcggcccccttatgatagcgggtaatgacctactccccgtttagttgtattagcacagggttaatactatccagatcactttaggtaggatctgctacagcacccttaggaatacaaattatgaatcaataatggaaaaactcaagtgttaagatgatgctagtgtaggcatgtaagacaggaagtgaggatgagagagattgttagacttaggcttagagcttggaggcaggtttcaagcttagattcaacttaggtttctaggctagggttaaagcttttatatgggaggcctaaaccctggattattttttaaacccctagatatttgcatagtttgttaggtaatgacaaaagactaaaatgcccttgaatctagatattatttagccattctgttggagttttagggcccaatttgtagcttattagttgttgtccacgggtcaaagtgcaaaggaaaccctgcagagcaactcttggctggcaaggcccttgtggagggtcggctagtcggccatggtgcaatctaaagtatggctagccatagggccgactaggggtggctggccagctcttgtgagggagttggtctctgtttgcttaggtgctgacttggccttcttattggtgagatgtaataccacgtggtattgattttttccacgtaagtatgccatgtcaggacgacaaaaattcagatagcgcatctcgccacagtcatactctcaatttgtgcagtaatgactaggggtcgttgtgtggggaaactgttggaaata

SEQ ID NO: 71581 - DNA, 1059 bp, Cannabis sativa
ggatggatccaatctgatccaatagaaaactagttaatgcatctaatggttggaaccgatccaatccaatacatctattagatcagattggatcagatgactcaattcaattggattagatcgaatgacaaaatctaatatctaataaataattagatttgatcagttggatccaaatccattggatgtgatccaatgaacacccctatctgtaagacaagaaatgaaacatcaacacgaataattaaaacagaaagaatgtggtgatttaatctcccacttaagagtattatcataatcatcagacgaggaagaagagctataatagttactaaattctttagaaccagtaatcatgaaaaggtcgaaagaattaagtggagacaagtcccaatctgaacatccgaccctatcaaaattagtgccatattgactagcaatcccaaaataagaaatgttactgcttaacaggacgtggtgttcagggaacctactatcaaacctatgagaaataaggtctacatagttcaagatatagaagttatattggttatctctaaattgaactaatgatgttcgctcagccctaagaacaattggggcccatccacaagcaccaaagtcattaccttgggaggcatcatctttggcttctcaaagggtcacattcctcagataatggttgtgagccacgtagtctcgatcctcctcatcaacaggtactggaacttgctgccagtctgaaaactttgggaccttaaagtcattggtagactgttctctgtcgagaagggcgcaagccttcaaattgctctcatgcagcaggaagtcaaccactcgcaacccatagggaaggccaagaatgtgccttttctcaatctcaggaattgggatgggtcttgcagtgatcgatgttaacacaacaaagaacaaaattagtaaagtataaaaaatatatttaactaaaactcaaaaccaagaatttaagaagagttatacttacgtataatttgaaatttcgttgtgttgatggaaaaaagaccagaggtccaaaagaag

SEQ ID NO: 71582 - DNA, 1294 bp, Cannabis sativa
agactaagcaactagatctacctagaactatccatttgactagtaacaactaaattataacaaaaaaaaaaaaaactaaattataacattctacttcataaccttcttggtaacacactccataattaagttcacaaaatgagtaggaaaattcataaggcatcaaattgattttcatattatattaatatatggtttgctaaatattgatttattgtaattaattttgtatttaattttttttaaactatttaagtaattgatttatgttattagttaagttttaatttaattattttaagtaattagtatttctatatcctatttaatttatcttttcactattttaagtttcatataagacctaccccatagtaatacaataaaaacaataaatggattctaaaaaatttaaaattcataaaaatgttaaaaaaatctgaaaatttgtatttgtaaatctttttgtcattctagtaatcatgatttcatgaacatcaaatcaaagtcagagtctcttttcatataacgtgtgtatcaagtaacacattatatcacaaatttttctttcttccaattatcattttcaggtcactcttttctttttatttattaaattttaacataacatcaaattatccagtacataaaatccaagactacttcttgatcatcactctctttctctggctctgcttcaatggcacccatccagaaaaagtccacactccgaccccttttcaccttggtagtggatgaaaaagccattgtacaacataagctggtaaatcttctttttcatttgtttttgttataaacttagatgaagaaactatacattctcttcactatagaacataactaatatgctctgcttttaataatatataatgatatccaacaaaatttgtatttattcttttggggtttggttttaaatttttcttttgggagtatctaatgtatggtggcttaatcattttcagaggatcccaaaaaaatgtgtgatgttatttggtgaagagcttggtgagatgggaactctcactgttcctcatggcaatggtaatcgagcatggaaagtaagaatagtgaaaaatggaaagaataagaagaaaaagtgtcataataacaacaatatttggtttaaagatggtatggaggaatttattaactattattccattcacttacactccattttacaattcacttaccaaggaaactcaatgttttctgttcgtatttgtgatgctttgggttcggaaattgattatccatttgatgaagaaga

SEQ ID NO: 71583 - DNA, 1706 bp, Cannabis sativa
ttttttttttcatttgcacccgtaaaattagtgggtcttaagtacgggtctataaccggcttatacctaggaccggtcctaatattgcatatcaatatatatttatatgagtattactaaaatgtataattgatttctagcacttttttttttttgatatcatagtgttatatattaatgtaatttattaaatattgagtcacatataacttaattaaaaaaataattcttgaagaatattattaaccaattataggacaccacttgtggagaagtactggccacacagcaatatatatttggcttgaactaaagttcaattgatagatctaataatgaagaagtctggttgaaatgttctcaccatccttgatatttaattattattattattattgcgatactaaatttgcatatgcacttcatatattttatatgttttttttttaatgaaagacatatattttatacgttaatgagtcctctttatgaaaatacacttactttaataatagctagctactcttcttgatcagcaactaaacgtacatagagttacatttatgcaaaattcaaattgagcccctatatatttcgatttattttaaaaaatagataccctcgtttattatatcatcacatttggagtaatttaaatatataatgttccttgtatataatatatttccgtttaaaatatatgtatatattaataattattattatgataagtcacttatcattaacaaaatgctatttttaatagaggcagacctagtcattcttaaaaaacgaaaaaaaaaatgtacatacattttagttaattaagataataaataataatatttaaacgtaatattaatattagtgtaataattaagttaaataacatataagatagatgttataattgtttttgcttttcaaaaacaaaaaattacttctccgactataaatcctgagtcctttactgtataatagtgttaacactatgtactaatatctaataataatagcaatattaatttatacataaattatttaaataaatcaaactttttattaaaaaaaaaaaaagaaaaaaaaatgaaagaaggcattatattaaactttgttttggagaagtattgttaattagagttgttggtccatacgcgtcataattaagtttgattttattatatagtacttggtaaggtaggaaatccaactatatttttaatgaacttcattaatcgaatttattacaacttactatcaaattgtgcattatttgaaggctagctatgtaattattttgaattcagtaattttgctattaataataattttttgtttactttcagatctctgtagagagataattaagcttaattaatttagatactaatctatatatatttaggtaaaccttcctttaattttttttaataaaaaatcagcattttattaatcattaaactcagttaccgcaagaggtagcaagttagtaggaacatgttctaaactaaaacgacaatgagcgtgtaatatagaataaatttttaattttttttattagtcatcactcctcgaaaataatttttttttttaatgaaaaataattttttttgaataataataatcaaatttaattataagttaccatcctttgtttaataaaaaaaatacaagttaacatttattaataaataaatatatttatt

SEQ ID NO: 71584 - DNA, 1268 bp, Cannabis sativa
aaaaaaaaaattaaacaaaaataaaaaaaccccttattattaatattattattataaattttgtttgtgaaatattattagttagaaattttataatttgttgtgaataaaattaaattggtgataatttgtatttaaattagtagttacttgtagatttgaagtttcagaattacaattattctaactttttaaattatagtcctcatcacgttttagttacgcgagattatagtatagcatgcaaaaaaaaatgtataatttaatacaatgtcaatcatacatacctaatcccttaaatattatttgtcaataataatccccaaaatactcccaataattaaactccagaaatacttatcacttccaacatggaactccaactactctatttccaaataaccctcttgatcatcatcatcattatctcttttgcttttgtttttaaggtagtgaacataatattactacttttgaaaaaagctgatgatcatggtcatcatacaaaaaactcatcttcaaaactacccccaggaccatggagattacctttggtgggaaacatgcaccaacttatctcattattaggctcaaattcttcattacctcattatacactcaagagaattagccaaaaaacacggaccactcatttacctcaaaattggacaagttccaactttaatagttacatcaccatggtattgcttttacatctaggcctcagattcttgcttcaaaaatcatgtcatatgattgtataggcattgtatttgctccatattggtgagtattggaaacaaattagaaagatatgtgcttttgaatcccaaaattgttcaaacatttcaacccattagagaacaagagttgttaaatcttgtacaagagttagctgcagttgctagatctgattctatggctattaattttactgaaaaggtcatagctttaacttataacatcatatccagggctgcctttggcaagaaaagtagtgaccatgaagagtttatattgattgtgaaggatgttatcaactgtgaagactttgaaattggagagctttttccttttcttagctttgttgataaatggggtaaagggagctaagtatgaaagtctcaaattaaaggcttcaaagatattggaaaatatcatcaatgaaaagtcatcatcatcatcatcaagtgagaaaagtggaaaagaagaggacttggttgatgatcttctgaaatttcattacaatgtagatcttggattcaacg

SEQ ID NO: 71585 - DNA, 865 bp, Cannabis sativa
aatgcctaaatacttcatgagcaaacaatgcaatgagaaatgaacgtaggaaaaataatagatattttttattaaattcagcaacaatgaaatcacccatgaattgatcacaaagcacccaaacaagacagaatattgttatcagagaacaagcagcgacacacggtagagcagcccatagaagaataacacaaagtcccaagctaatttagcaacattagtccattgaggcatttttacaaacacataatatgcatcacaaaagaagaacccaatgaataaattacttacattattctgactttccgatttctattctgagttcgctctggtttggtggttaacggcggaggggtctcggtggacgtcgccgatagtcctggctaagtctcgctcgggtaaggggtggtggtgcagccggaacaggatgggatttagtgcttatttcagtttcagaggtttggctcttgggtcggatctatgggctcgggttagtggttgggggccgggctatagcttgtgaaggtggtggtgcaaaaatcggttccaatttggggctttcttatgaaaccaaaaaaaaataaaaataaaagagaaatcatcataggaaaaaaaataaataaataaaggggtctctttttcttttttaacgataaacacattcaaaataatttgtgtaatacatatcatcatataaaaaagttgagatttcatccatttatattagttcattatctattgtgagtgctctaattcatgcatataacaaacataacttgatatgtctcaaaaaaattagataactaagaatattttttttttttttgagtgtagcgtaataatattttacaatcatatattagct

SEQ ID NO: 71586 - DNA, 1074 bp, Cannabis sativa
ttatcatcatctttatttttctgcttagaagcttaataaaatttgtatctgtaattttttttaataattagtttttactatatggagtggatgttacaatttcttgtaccagtaaaaaaaatagtaagattatattatattgttgcggtctcattcttcttatatataattttttttttattaaagtacttttatctacggccaacaaaaaaaaaaaaaaaaggtgtggtgggaagaaaaatattagaaacaaatgtctcaataacaacaatatatgaagcatgcatatccttatttttttcagaaggcaattagcctcttaaaataaattattagaatttttccatgagagtaaaaattctaatcattataattaatatagttaactttgagagatagtcaagaggtcccatatatgtggaaaaatgttgtgatgatatgtaggggtgctcgctatgcaagaggtgtcatagcgatatgagttcatcttactctttcgtgatgcaagagaggttcctgtggccaaatcatgaggctatgttaccaagatgaggctgcttgttattgaaagcggcgttcgcaaggtagctaatcgtacccccttgaaggcgagaccccactcgttgtacttatgaaaagaatttcttgtgtttaacatctattagtaataatatttttgtgcttaattaattatttaattaaataggatttacttgtagactaaataaattagtaaaataagaaatgcatttaatttaatacaacaaagttttacaaactaacaaaatttgaagaaagctaaaagttttgaattagaatttatacatttttgtgatgcatgaaattaaatactcaacaaaagttaatatttagaggggaaaatataatacatacctgagaagccatgatgatcagaaagagaaaacaatttgattgcatgacagaatttaatacttgttttagagtataaagagagatttaattttgtaatttggaaacatatttaaaaatttggaaactaatatatatgtaatttcatagagaggatatatatagaacactaaattcacaaga

SEQ ID NO: 71587 - DNA, 1148 bp, Cannabis sativa
gaagttgacactgaactccctgcagtttgaactcagcaacttcaggttctgatctttccgccatagatgaccatcttcaagctatacaatcagacctgtagaaacaagtatttctattttatggataatctgtttacagaatgaaaccgactatttatacccaacaaaacagtccacctgacactaactaacacctaacgataacagacttaacagttcgcaagtgcagatataacagactgaaactccaaacatgactagacattgtactcaaataatctgtcacaaaataacgacacttacagaaaccatgttagattgattttttttttttatgtaatatacattaaaattgtttatgttgtatttacattaattttaagatatacttagcaaaaatagtaaatgaaatatatatatatagaacacaaattatatgcttatgctcatattaccaataatattttcttttttgtatagttaccaactctatatagtttattatggtttaaatttgtgtatatatgaattgcacgatttgtagtattgtggtggtggatttgtttagaatttttttttcttttttaaaatttattttgcttcggttcataattgacgcaaaaaactaattactgtcggtgcactattattttcttcagttatgaaccgaagcaaaaaaaattttttttgcttcggttatgaacagaagaaaaaaactaattagcgtcagttcataaccaaagcaaaaaaatcaatttttgcgtctacagttatagcgtcagttactcaagccgaagcaaatactttatatgtcacttaaaaactgaaggaaaaagtcttttttgtagtagtgtcgatatgctattgtaaagagcatgcatgtccttgtgtacctgaccaaatgatccaacaactagggataagaaaattcaaataggagaagccctaaagcgacacgcgtctgaggcccgctcgtacgatttcacacccttaaatgccaaatgggaaatatagcacctaccgatcgaacattggatttcacccaaacgatgatccatccaaggtagtgcatgcaaaaaagttggcctataatatccgagacaaggcccaagggagggggacttttctttcggatcgattcttgataa

SEQ ID NO: 71588 - DNA, 760 bp, Cannabis sativa
atcgaagctctctctctctactctgttgattttgtttctctctctagcttctgagaaaagcttctctcactaaatggggttttaaaggagactcgggcagagaaggtagagaaggaacgcgacaaacgtgttagtaccacacgtgacagtatttcagttgttgaatctttctcacgcgctccagtcatgtctactcgcactctggtaggttgagttacacgtggcggtttttcattggatctgtatcgtcactaagatgaaaattctgaataaataaaatctctctttttttttctgaatttattatttaataaaatttcagggaaaaaaaaatacttgttgccatgttttataatttgaagaaaaaacaaagagtaaatattgtggtgttttgcaaaaaattaaattgacacttttgtttttttttttttttgaatgatacaaaataataatttgagtttaatgtagaaaattagtgatcaatggttatatgcttaatctagaaattaggtgctctctttgggtagttcctatccttatgaagggagtaagcattggaagttattttcgcttcaagtttttattgggctcttacattcacggaatgatgactcttatatacaagtatgtcactttggctgcttcttagaatgacgactaaccttacaaatcaacacgaatattttcagcgtgctttgtcctcacttgtacacttcttaggaaaacttctcaggaggttacctatcctaaaattacccca

SEQ ID NO: 71589 - DNA, 1039 bp, Cannabis sativa
  modified_base (28)..(30): a, c, t, g, unknown or other
ttgtttttcaaaaataaattttttaaannnaaaaattttactttcattttgtaattaaaaaattaaaaaacaaaagtgttaccaaacgacacctaattaataatatgattgtggatgttataatactaagtctttgtttacttttgattttttttttttttttgaataatttatgatgccaaaaaattaagattcaaatagttagttgcaaacagttttatttattttatacacatacgataaattgttttgaactttattttttatactataaactgagaatttcttaaagatgaacaagatacatattacaactacaatatgcaacctcatataaaaaatttaaatttgatttattcttaaagtataggaaataaaaaacgccccacggtagaaaagtgatgcccctacatgagaagttgttagttcaagaatcatccatgtgtataagagccataaattcgcgagagaaagcctaatagaggcttgaagtggagacgttacaaaatggtactagatccttaattcaactgaaagtgtggtcgatgaggacgtcggaatctcgatgggggtgattaagacagtcagagtcccgttgatgcgtgtcgtaagccacaacaaatttacttattattttaatttttatattaccaattactttagtataatgataaatacaggtcgatcccatgaggattattatcaatttattattcaaaaattagtgacaagaaataaaagattttgattatgagaataaaataacatgaattaaaaaaaaatgtgatactacgatatgagataaaaataatcagagattattctccaccctcaacaatcattcttaacttctattaatgaatgtaattttaatttttcaatcaaattaccaattctgtagataaagctaaagcaatcaaattatttcaatcttcctattacatgtaatcaaggcaaagcgctcaacctaagcagtaaatctacgaagcatgcaatttatttaacttagataaatttttaagatttatggagatagact

SEQ ID NO: 71590 - DNA, 1635 bp, Cannabis sativa
  modified_base (50)..(55): a, c, t, g, unknown or other
  modified_base (87)..(91): a, c, t, g, unknown or other
  modified_base (511)..(514): a, c, t, g, unknown or other
ctcaattaaaaaattgaaaagtaacaacagttttatagaacatgtttttnnnnnntattttcactttttcaattttaaaaacaaaannnnnattaaaaaagtgttaccaaacggcaccttaaattacacattttaacatttatgtttgtattccataagttacaaaacagttactattttgaattcttatttatgtcacaatatttgatttataataaactatagattataacactataatatatattagtttcataataacatatatttatcacattttaatctatattatattattaaataatataacatataaaatataaaggttttgtctgatgtaagtaattatatataacattatgtttattaatgtcgattaatataatacaattttttagtcacaacaaaaaaaaaattatgattaaatgtaacttttagtcacaacaaaaaaattatttgtgactaaacatataatatttagacataaattatcactaatttaattttagtnnnnacaagtattgtgactaaaaacacatttagtcgcaataaattgtgatttttgtaactaatacttttagccacagacttttttagtcacaaaatgaaaatttattattagtcacaactttttcacttttagtcacaagttctgtggggactaaaagtaagattttttgtagtgactctaagcccacaaaataatttttaaagtccatcattgattaaaatgccgtttatattatttacttttcatttacacataaactcttcataataaacacaaaattctagtacatatatatgtattgaagataacaaacattacagacttgatgttttaaatatatatttttaatctatacccttttcttttcgactaattcatgctactttgatagtaaacaaaaaaaaaaaaaacccaaaaagttgatgaattacattattcaactaacttactagctataatcacactatatgtacaagtatacctaatgtcaccctttatgaaaacttgattcaaatgtgtgacttattattacttaatttgcttacttaaaataaatgctaaatgtatgtaaaacttacttaccacctacttataaataaatatcatatataaatacatcaacatcctacttgaatacacatctgtacgaatttcacaatggaaattacattatttttattatcattttgcttacttttcattagtttacatttgtcttcaccaattacctcaaaatcattacaaaaatgctacactagctttaacctaattcattctcattcaatccacaccttagatgatattttcacacatcttatgcaattggactcaatgcaatgggagcatagggtacagaatcattcactatgccaacaagtgatggtggagtgcagtgcaggtaataactcacaaattattcagttgtgcacaaaaataaatttaatggtatgtttggctttagataagaatgaaattctttcctaaataacttaggatcatcattttcttattgtataggagacttgacaaatacacaaaatagttatagctatggtgaccatggttatggtatagaaatgttaggaaaagtggacactttgtaagattaatgaaggtggtaatta

SEQ ID NO: 71591 - DNA, 1083 bp, Cannabis sativa
atccaaagcaggattcacagctcctagataaatccactgtcaatcaatctcagcagtgtacaagtctaagcaatccaaagtattaaaggccaaagctttaacccaaccccaatttctctctgttttctctttcaatttcctttaagcaaacgagaaaacaaagcatgtacttgatttcaccttctctcactgttttatttactccatttgtctgcaaccaatcttggtctactaatctttgattttatcatgtgcacaagtaactctttaattacacttgcttttttttttacttgttaaaattacacttttactaacatgtgttgctaaaaaaaatcatcttatgcctaacatccctaataattactttaccactccattgaaaaataattactttactacttaatacttcctctatccatcatattattcatcattctaagttctacatccatcattgctaaaacacatagcaaactcgagttctctaacaactaatttaattagattccttcttagagcaagcacttcaagccaaaaaaaaaaaaaaaacgcattgaaattttaagatcaataagataatgtacaatactaaagttgaagtagcctgagggcatcataaagacccggacaagatgatggtgaatgtctaggcattgaaacaatttagtatactctggtttataagaatacacataagaaatgcaaattaggtagtataatcttttaataataaagctgtacaacagaagaaaagtagtgaaatgaatgatctaaaaactacatcaatacccccaaaacaacgtaggcatattcaaataaccttctcccaaatcaattgtgatgcttcatgctttgaaattgccgactgattgagaaactcccttcccaggtgttcttcaagttagaaacataccacacaaaataccaaaagaaatggccaactattacctacatacaaaaaaagtgtactactgctctccttctgttcctgctcagtgagacccaatttgaatatattagagcttcatcagcacagcacacaatatgcatccaataaatattgagattcatcggtgatct

SEQ ID NO: 71592 - DNA, 2655 bp, Cannabis sativa
  modified_base (1728)..(1731): a, c, t, g, unknown or other
ggcggaagtggccgcggcactagttctacctcatcatcaagatcaccataatgaatatcatcatgatgtgatgatgataatgatggtgatcttcttccatgtagtaccgcttctttctgatgttgatcgtgatcatgatgatggtaattgttctcattatctaataaccccatatcatgatgaaaacctgttgttctaaactcattaataattatttcaattaaatatatatagtactttttaaattaatttctaagatatttaaggaaaaaatacattcaactagctagctatatagttaattatatatatatatatatataaattagaaagagtagtatataaaattcttacctgaaaaatgagtagttgatctggctgaagatactaaaaataatgtctggtatttgcaaaggaaaaataatataatcagaaaattcatcatcaagatatatcgacttatatataataataagtaccactacactagatcataacatatatatatttgttccaagttgcaagttggtggcccttttatgtatttattttatgaatatatatatgtatatatatgtgtgtgtgtgtaagtgatgataatcattatatatatgcgtgatgataaaagatagagatagggttaattagatatcaatcaatagctaagaatttttatatatatatatatattacctaattaagactattgaaaagtatataataagttaatttcattaaatattatatgatctgtgaatctctgctgcaggcatataagaaaactcaaaagacagtattttggtacatttttaatgaatttcggtatcgaatattagttttctgttttatttatatatataaatttatatagtcgtttttcttatttactatcaactagctacaaataaatttgtaaaaaaaattaaataatttacaatattaaaaataagcacaacatacactaatatgaaaaataagcacaacattaaattaattatattaattattgtgcggtaactattttaccattttatttcgatatgataatttacagataatgttaaataagcacaacatacactaatatgaaaaataaataaactaaaacactttcttctatgtcaacaaaaaaaaatactaaattaaactatcttttatgaaggtgtaatataaatttgtgctgtattttttatatggatttaaattagataaattaatatactatatgtggggtttctttttgtttctttctagctctatagttatagctatataaatttttttcattttagaaaaggaaagggtattttccatgtcatgaacgtggtcaatgatcttgacataatattaatatcatttagattggtagagaggtgactatacaaaatatataaataaaagtgataacctaaaagatatatggacagatgcagagaattgcataaaagtgttattaatttatagcttctttttactcctttatggccatttcctcacttgcaattatatatatatcacaccaaaaaattgttacaaccttttatactttttgttactaaatgttattttcagttaaaaaaaattactaactgaaaaaaattacttattactaaaaattgtatttagatatagttatcattaatttaattttagttacgtaatgacgacaaattataattttttgttattaatacatttaactaactttttataataataataataatnnnnataataataataatatatataaattatgtttagttataatttttttaatttaaccacaaatttaactctaaatgaaaggaagatatttttaatttaattatatagatatcttatattatatatataatcaatcatttagttcctgcatggaccacacaaattaatcttaattaatatataactattctcatttatataaaaagatgcgtacgttatcatttatatgttgtgttgatgtctaatcagtatcttttaatttttagatcatttgcatatataggcactgatcagaaagatgcgcatgtaattactatcctcttccatgtcaagcacaataaaattaattaattggaaaaataaatttgaccacattgagaatgacatcttcaattaccccttgaattagttaaagatcagttgctagttgcaatcaagtgcaatattaggttaatacttgcccccaaaccacgtagaatattgattcattccatcctctcaatgtgcaagggtcgatggtaaaactcctaagatctctcaattaatttaggagggagcttcttttataaaattccactacatttcctcttgtgtcggtgcttgtgcctgttgacctaaccatttttttcaactgacttctgttcactaggcctctcataattcttcccatttctcaaggtaattgccttgcatttttcttttgaatttacttatgtggtgcttggaaaatttattatctatttgagcagccaattgctctatttgaatctcaatgtttcgaatagaagaccgagtttctgccatgaactggcttattgcatcagactagttctcggaccttccacccaaaaattgttgttgttgatgggttaaaatttttgctgttgttgtggcctatttctctactggaagaaaccttgtttaggt

SEQ ID NO: 71593 - DNA, 912 bp, Cannabis sativa
aggcttagtaataagagaattatcacatttttctaataagtaaaatctaattatcctaatttaatttatatattatgtacatttttttctttttttaaaaaattagggggagccatggccgctccatagctacatgtagttcagccactatttgtaaatttaatatccaaaacttatatttcatgtttttgttttcaacctaacttttaaaaggtaagttactaatttttatacaagctacaaacagttttttttaaaaaaatttatttatatatattaaaataaaaatagcagttatcttttctaaatttacatgtaatgagttcctctatttctcctactctatttttttggctcattttctcctatatgttataagaacgatcgattctttattttttttggtctactttgcatttgtattttaggatttctatctctatatcatttccttctactatattatttttggatccttcttcttcttcttccatattgtgttcatggattgctcattgttcctttttttttttcttattcttctctattcggtggtaatcagagctttctactatgttcgatggtcatcgacagtagctccttccttttgggttgtgtgttgcttaagtgtgtggttatcaatagtattttgaggtgtgtgtctcattattttttttatatttccctttatttatctattattttcttatttgacattttgtttggttggtattatgttatatgttgactcaaaaatttggactaaacttctaagccacactcgctcgctagattagcaggaatgaatgagtagttaagcaattataaaagagacacgataaatttatagtagtttactccctgtattacgacagtaatggagctacgtcaactttgagtttttatttctca

SEQ ID NO: 71594 - DNA, 2095 bp, Cannabis sativa
gtgttcactttattttactattttcgctttctttaatttatcttatttaatcactttatttttgactcactgttgttagctagaagcgaggtcaacacatgaaattctaagaaaatattttcttattaacggacacgtattcaagtgactagtgaatgtcggtcattttttttattagataacagagtaggttattttattaaacaacaaactatataattaaatgtaatataagtttagagtggttaacccagtatgtcgataatattgattgcaaggaagcaatggtagcatatgaaccatggagtaaaatcttagtggtaatgataggaaaataatacgagagtcttagatattgatgaaccagcaccatcaacgggagactcactataaggttgtatggtagttcatacccaaggggtgttgtcaataaaacaaaaaaaatatagtacttgaggtatgtatatttctagatgtgtttgaaaagattatcaaaatttctaccaaatacagacaacaaacttcaggatcaaggaatgatctttgattaatttgattaattgtattaattgttatcagttttatcagttgagaatttgagaaatgggtacttccagtttagatatgggtgcccggaatgagtaatattgcccctaccgtatacgttgaatcaatttactttacaatactggttaactataaataattgagaaatttaaaagttgtgtcagtttgagcgaaattaatatagattaaaataagtggagatgaagaagattcaaattgacaataaaatggaattactcaaagttaagtgaacaataccgatgagaaattgtaagaggccaatgaaggaagtcatgtaaattagatttaattgacgaaggaataaaagtaagaacgacaaaagatgcattttctttccgattacccaccatgagcttactttagagtgaagcatacttaactgaaaataatgtcaagatgggaagtattctggaaagttagctcgaaaagcgtatgaataaagaaaaagtatgctatgaagattcatattagaatataggatcagtagtcattccaaaaattatcaagagaaaggaatgtgttaataagtaaggaatgttataacttaatatccatcagagaaaacattcaacttgttaataagttcaataagtacattaacaactagtaaggttacatcagcttggaaaatcccataggaaaaataggaaccaagtttttagcaacaaaattttagctatcaaatatagttggaagtatttaattactattagttactaaattttcgtagcaaaatgattttgtagcaagttctaataaaaaaatactatatgagtttcctaccaaatattttagtagcaaatttatattgttagttacaattatctttcgtagctaacattttgtgcaccaaataaaaatttgctactaaattttagtagcaaaatgagttttaatcaaatgacactaaatatgctcgctacaaaatttttggtggcatataaatacttttaggtacaaatattttttttgtagctaaaattatatattggcgtaaaatatacgttttgtgtatagattggaatttattgcaactacaaatttattgcaactaaattatatcatatttttacactaacaaataaaatatttctagttgaagtgttttatgtattactaattaataaatgcagaatataatatatataataaacatatgtaagaatagtaaacataaaaacataattaaatctgtacttgtgctccaaataaaaaaaaaattaaactatattttcttaagaaataatttgtatataaattatattttgttctaatattataaagaaaggtaaaaaaaaataattaaatttataataaattaacaagataaactaaattaaaaaaattataaatgccatacaaacttgaaagaaaataatgtaataaacaactacataagtcatataggatacatattactttgttaaaacaaatatactacatggaccctctagtaagcctctgcaaaaaaatcaaagaaactaatatccaatatagataaaaaagc

SEQ ID NO: 71595 - DNA, 1198 bp, Cannabis sativa
ttacttccatactttagaagaattacggattattaccatctttgtccgacccaattcactttgaagggaatcaagtatttatctgccttgttcattctctatgcctcacagtgatggggtgagccatcttcgcccaacaccaacttgttctttgatctgaaatcaacccccaagcagagcaggtctgggtatttctatttttctcagatcgaggagaagtggctgacgagcactgtggacttcgatgtgagcaagatagggaattttgtggacgatgtctattagagttatttttatatctttaaacttgaattttaaactaaatagtagagtagttagtgtctattttatgtaattgtctttagtttgttgtgtcattgtagtaaatggaaatgtgtgtgtgtattaagtgttaaagagacttatgttactaattttgtgtatattatgcagaaaaaatgctaaaataggtgttcgggagtgtttgggacaagaggaaaaagagcaggaaaatgcttgttgctgacagtcattgctatagcaattatcgcatagcaattgacaagccagtaagagaatcatgcagaaattccagtcagcgttaatgaggaataattgatgcttatgtggtgaaaatgtgtttaatgagtcagccaatgtgtgaaaaaaaaaggaacaagaagacaatgactcagatttccaattagggtaaactttagtaacctaaatggagggcagctaagaaaatacagatatatagatggtggctgcactttgaatggaggaggagtacgaatttttcagaaaagaagtacaaaaaaaaaaaagagtgcaaagaagaaaagaagaagactaagaagaaggagagaaggcaacctcaatagagaagatttgagctcaccaactcatttctttgctctcctcttccattttgtatcatcttctactctttgatattttctttaaataaattgaattgttattttctggttttaggtttttaatttcagacatgaactaaaatctttggagatttgggcggttatgaaccctttgtatgaacaagtgctttgatttgcaatgtttgaagtaatcatatctttgatcaattaaatgtgatgaaatgtggattgaatgttaacttttggccatatttaacttttagtaagctagatcttgttcgaaattattttaccag

SEQ ID NO: 71596 - DNA, 1433 bp, Cannabis sativa
cacgcccactatttctcttctccacttgagatttgccaacactaattcctacattgttaccttaggagagctactttagatcccacctatagtgatttaagtagtattatctcccaatatccatacaactaaaaggggaataggtcattacccgctaactaagggggccgaacctctataaaatcatgtgttcatttactttattattcttatgtgtaacatgtgggaagcatcagcattgaatacgactccactatcggttagcaaaatttgaggtcaacagtttggtgctttcattgagagcgagttgatatcatatatgatcaaatgccatggttaacacgaggagaactctggccatagcctctgcattatcgagtctccctaaagatcctctgactgtagatcctgatgtccatgttcttgccacaactagaatttccatgagcactgtagatgtggtcaattcttccatctcgacagacaccacaaatctggccactacaactggccagagtgacacaaacatcccggtggatttgaacaatctgcccatacctccaagggaagaccctccacaggcacctccgactgaaggaaggacccacagggaatagcccccaagtacaacaattggacctcgtccctggtactacactaaaaagacgagtctaggaattggcgagccccatgtagacttaagagaagatctcgagttagcaagacttagagaggctgtctgccaagctggccaaactgaagaaccatgccctactgattgtaatgtattcgctcaacaaagacataaattttctttggggatcatgcagacaactttgggcctatagaagaattggaggaagtggatgtcgatcccacttctccacctagaagaccaaagattgggaagggtttagcgctagaaataaaatcgttattgataaaattttctaagggcaaacatggacctctttgcatggtcacatggacacatggtcgaaatcgatccatttctgatgatccatgatctcaacattgatccaaactttggacctgcataatagaagaggaggttgttggacaaagaacgcgcccaagcactcaaaacttgtagttgagaggatacaagcccatgacttcataacagaagcattctatccaatttgggtatccaaccttgtgctggtgcccaaacccaacaaaaagtggagagtgtgcatcaacttcaccaacctaaacaaatcatgtcgaaaggattgctttctacgtccaagaattgaccagcttgtagacgccacaactggccatgaaaaccttagtttcatggacgcgtattaaggttacaaccagataaagatgcatcttccagattaggagcaaacaaaagataaatgatagacttaggcctatactgctacaaagttatgcccttc

SEQ ID NO: 71597 - DNA, 2865 bp, Cannabis sativa
  modified_base (46)..(46): a, c, t, g, unknown or other
tattaggatgttaatgaaacatacgtgttagtaaatctagatcctngtaaaatatttccaacaacttcttctttgggtttttcaacccttctacaatcagccattatgtgcccaaaccctccacaatgcttgcatttaacaggaagccactcatactcaatgttttattccaccaattgaccatactcattcacaaaccagaaagatttctccggattatttgtgatgtccatttcaacaagaacacgggcaaattggatcctagtacgatccttcatgtgtttgtcaaccataataggcttcccgattgtgctaataagagcacttagagtgtttttcctccaatattgaagccccgagttgtgaagcctaatccaaagagggacccatttcaccaacttaattgtgttcaaatttgaagtccaaggtcgaacaattactggtttcctgtcgaattgaatcattccattctcaagaacctcatcacgagtagcttcatcattaaatttaaccatggtaagaccttttgtcatccttgcaatctgctgaatgcccaaatgtccccatactcttcggataaacccatcaaatactgtagcaggaacattagcccccataaccatacatataacaaccgaattccaacttgtttcttccaattctacctcctccaaaccaatttgagcaattttcctaccatccttaactaatggttcagtaaatttcagtttagcatcagagtttatgctcttacctgttgtgaatttcttccattggttctgagcagtcgagcagtggttctcctccacttcgtctgcccaactcttacttctggctgacttcaacgattcagtttctgcaccaggttcctcctctactgtcatattagggctttgatctccagcgcatattgttgctccagattcctcacagagaccagcttcttcctcaatctctgattgcttaatgggcgatcctgtagtggttctagagatcgaccttcgacctaccttcctcttcttcgccatggacggaagagaggatgagagcaaaaagctgtttttcttctaatttttgatcttttattaattagtaaatctgattatattaaaattaattttatttatggcacaaaaccccacagaaagaacaacgtgcaaatatcgttgtaagtcttgtagtcacctgcaatcttgatcaagaactaggaagaaaaaagagcttagatgatcattctacatgagtacccttttatcgatggttgaccatagtgaatttatagattgtgcaaacacaatttctcctatgtttcatttgatggcaaggaatacaataaggcctgacattatgaagatacataagcttgagaaggcaaaatgtagagaaattttgaagaaaaataaaagtagaatagctttgaccactaatatgtggacaatcatcaaaagataggatatatggctgtttaatgcttagaccttgaatagtcggattataagatttgagtatgtgccatacccacatgacactccaacacttacagagacactaagttctttaatgtctaaatggaaaattgaagataagtttagtacggtgatacttgataatgcatacactaatgatgcaatgattccacttttgaagaaaaaaattaatcctagttgctttattttgaatggagagctgcttcacatgtgttgttgtgcgcatattttgaatctaattgttggagatagtttgtctgttattggtgataacattgataagatttgagacaatatcgcttattggtcaggcacacaaaaacggtatgagaaatttgaggagaatgctcgttatcttggagtgacatgtgttaaaaagttatctcttgattgtgtaacaagatgaaattcaacatacttactgatgaagacaactttattgtataaaacaatgtttgagctagtaaaactttgtgatccaaagtataaatgttttccatcaaaagatgattgaattagtgctcaaaggttatgtgaaaggctaaaatttttttatgaggtgacagagttgttttctggaaccaagtaccccacagccaatttgtttttcccgcatatgtataaaattaaaaggaaaattaaaaaaggaaggacatcaaatgagttattttttaaggttaaggcaactcaaatgatgtttaactttcaaaattgagaaaagaatcatgggattatgactattgcagtggttttggatcctagatacaagtttttgttgctccaattttatttttctcaactctatggagatgataaattgaaggttgaaattagaaaggtgtgcaagctttgtaatgatctattcaatgaatacaaatctaaatgacctactttgagtgaaagcaattcacaaatgtataatgtgtcatcatcttcttcaatacaagatcatctatctgattatgacttatatgttagaacttcatttggtgcaatgaatgaaaaatcaaagttggatctctatttagatgactaagtgttactcatgactggtgaattctttgaaatttgcaattactggaagataacaagatccaaatatcttatgttgaacatgataatcagagatatatttactgtgctggttagcattgctgctttagagtcttcattcaacaccgatggtagacatgtgagtccacatcgagtgagacttcatcctactactttggaggtattggtatgtactcaaaattggttggtaattgacaaacaaggtatatttatttatctatttaagtctatacattaattaacaatatgggtgactacttaatggttacacttttattgtaaccatcatggttatatttttctt

SEQ ID NO: 71598 - DNA, 2666 bp, Cannabis sativa
actaattttatattgggataattacattaggcaccttaaattagatcttaatatcaaaaataacttggccatttaactattttattttaacgttaaatataacgttgccacataattacgtgcccttttttcttgttaggtttagtttagtcgcccacatttttagttttaatctacacactgcttttattttttttttattttttttttataaactttaattaatctacaagctaacatattaacaaaaagaatcatgaggtttcacatcgtacacatctttattgcttttttttattatttttattattttttttttccgaaatgactataggagttgtttagtggcaatttaattcacaaaatttattgacaataaattaagtaaattatactgctaactatataattttatgccgaataaaaataaaacaacagccattgtcactcataattacataatatttcttcttcttttattttttttaattaacttgccatttttcttattaatcatttttttacttggaatctgatatttatgtatgagagagtttataagtatttaggatttcttttaggtaattggtttattttgtatgtatgagtatagatatagtataactatatatgtcaaataaatttatgagtaagaaattttatgtgagcaaggcatttcatcatattcaacaagtgcatatattattatctaaatttactatgtaagacatgttacggtcatgtactttgtatacatccagacagggccagccctaggcataggcgggctaggcccgtgcttaggatccactctttctagggacccatttaaaattttaagacctcattatttaactactatatttatgtgaaattaacacctaatatcattagattaagcccaacgtagtagtagctgaagataagatttatgttagctgaggacgtgagtttgatctcaccaaactttactttatagtattaattttttttttttaaataaaaatatttaagaaacaactacaaacatgtacacttaataactaaagccaaaattaaatacatgaatattatttaatatttctttctaaatttaacattttataagtttgtcaatttttttttattttctttatttttatctatttccctacttttccttatcatgtttttcttttcctatatattttgctttaatcaaaattacatttttaatattatgaaaaaaaaacttattaatcaagatataatatttaatttcaataataataaatattttttttaaaatattatttgaagtgattttaatttatatctttttaaatatcttattataattatggactatagtctaatgtagttgttataaattattttagctataggtaaatatagacttcatagttttttctttatttttcttttatgaatttgatttattgtatggttgaaattttgacaagataaaaatattattatggatgatagagcaaatttaaaaatacaaatatattattttagattttaatattttttttacttttatgtcatgaaatgtagtagataattaggtttattttatttatttatttatttattaaggggcccaaaattttatatcgtctcaggcccccatttcttcaaggccggccctgcatctagatttgatgtctagactaaaacaaaaaataaactaattaatttgttatttctatagtacaaattgtgtttaaaataaaaaaaatgaatcgttgttccaatatacgaaaaatagactaatagataatttattggtgtatattattatgtttgattatagttttctttgtattgaaaaatataaaatgttgttccaaccaatagaaactagtaagtttatcatttcaaaaaaataaactagtaagtttattgacatacataatagtaggctatatgaaatgaaatgagttgttctaatatacgaaatgaaaatgaaattttgattcaaaatgtcaaaataaactaatagatttattagcatatacgatattatagactatacaaaaaggctaccatgtaaacaaagtatgaaaatttgtgtcaatatgccaaaataaactacgtatgagtataggcatagtacaaccatatatgccaaataaacttatgagcaaggtattttatgtgagcaagacatctcatcatattcaaatctttgacaagtacatatattgttatcgaggtttactatgtaagtttgtaagacatgttacagttatatactttatatacaaccagatttggtgtctcagcctaaaaaaaaataaattgttgttccaatatacgaaaaatagactaataggtctattggcatatatcattatgtttgattatagtttactctgtattgaaaaaaataaaatattgttacaacaaacagaaattagtaggtttattgacatatataatggtaggctatatgaaatgaaatgaattattgttccaatatacgaaaagaaaaataaaaatttatttcaatatgccaaaataaacctatagattttgaaaaaccatatttttgcaaatgtcaattatatataagaaaatataaagctgtatgcgtctgcagaagcagaaagtaattctgctactgcagaaacccattttgcagtaacaaaatagaacag

SEQ ID NO: 71599 - DNA, 638 bp, Cannabis sativa
tggacactatggaagcttcagcatcatctcttgcctttataagggaccttattttagcctcaagcttcttacaatcctcattgtaggattacttaatcttagacatgtgctcatagtacattcatttttattgagtattggcatccttgaataccttattttagatttctttagccctcctcttaatgaccctaatttttgtctcaacttgggctttgatatccttaatttttctccagcctaggccttcgtgttttcaactttagaggacaagttttggttctttgtgtggacttgtttaagctccatgacaacaccaacctcatgggaagccctctccacaatcatttccatctagcatagcaaagcgtgataagaaaacatgttgaaaaacaacaagataacaatcagaaatttgggctagtacacttacctaaactgcctactgtttggctacaaaagtcaaggcaataggataaaagctactacaaccagcccacttcccagatgatgagtcacacaaactattcgctatttgatcgatgagtttagaggcaaatggtgctaagtcactcccgacccttagtaccaattcaaagagaaggacattcggactcagatcttgataatactctacg

SEQ ID NO: 71600 - DNA, 1009 bp, Cannabis sativa
atatatatattttgtgggaagcatatcgaaaagcacaacataaaaagaaatagggggtggaaaatacagcataagttatttgttactcttagatgaagaaatcggtcagtcaagtgcattcaaaccgatgtttgttttttcggtatcactacaattcccataattcttttacgagtaattaaaaatttctctataccatgtgcactatcactacaacatgttcctttttggtaacacaaaaaaagcggtaaattaacaaaacacccaatagccatacatgaggtaaaaccacttacctcactgacattactgacagcatagagtgtggcaccagctataacaagcacatcccctttacgtgggttgcttccacctaaaagcaaaaacagtgaatttgacaaaagaaagacgtatgtgtttggaaatatgaacattataaatagaatagatagttaataaacatgttatttttactatgcctcaatattgtgtttgttctcatgtaatgaacagggtaaaaccactaagtaacttggactactgctcatagattttactttaaccaatgagatttttgcagtacttcggaaataaacagattaaataattcaaaaatgaacatgaagaatacagttagcaacaaaaaaaaatttacctgctctatcacctgcatgtacatctgaaaatacaacagtaacaaggccagcaatacagacaaccacaccagttatctttctatatctatattttgttttcaagaaaatccacgtgagaagcattacagatggaatagaccaacaatcgagcaacattacacttgtaatagctgtatactgataagccttgaccactgcacatcaaatgaaagtaaatcaggtcttcatattaccatgacatcataatgaataaaaatacatttcaagggtgcaaagagaaagacaatatagcaaacacaactctatccttggtaagagagaattataaataggtttcatacttgtttagtggt

SEQ ID NO: 71601 - DNA, 1060 bp, Cannabis sativa
tgttcttacatcaactcgatgttaacaatgccttttttcatggataataatctatatgactctacctctagggtacaatcctaaaggggagaatttgctaccaccaaatacagtttgcaagcttgaaaagtcattgcatgggttaaactaggctttttgacaatggtttgaaaaattctctacatctctcatagaggaaggatctctcactccgcaacagaccattcaatgttcatgaaacattcttctagcagtctcatcatcttactagtttatgtagatgatgtattccttgcaagtaataacaacctcaaagaattagaaattttgaaactcaggttgaatgatagattcaaactcaaatatttgggatatttgaaatatttcttaggccttgaagtagcatgatccaacaaagggatttttgtatcccaaaggccatatgctctccaacttcttgaagaccttgaatatttaaggagcaaactagtcaacaatcctatgaaagctaatctaaagttgtcgcaagatgaaaatgatactttagctgaccgaaccttgtataggaaaataattggaaaactgtagtatttagtcatcacaaggctagacattgcctactgagttaatgaactaagccaattcctcactactcctaggacaaagtatttaattgctgcacaaagtattttacaatacaataaatcttgttcgggccaagtaatactattttctacatcatctgatattcaactacgagcctatacagatgcagattgggcagcatgtatggatacaaggaggtctacgacaagttttgaatatttcttggagacttatcatttcatggaagagcaaaaagcagcatactgtctcgagatcttcaacataggctaaatatcgagcaatggcaaaccctatcagtgagttaatttggaaactatcattgctttaggaatttaaaattgggcataaaggacctaccgtgatgtaatgtgacagcaaagttgcacaacatattgcagcaaaccgagtttttatgaaagaacgaaatacatag

SEQ ID NO: 71602 - DNA, 1430 bp, Cannabis sativa
atccttaaataattattagtaattttattagtaaatcgtttaataaaaacacaaataatattaatattaatatttaattataagaatagtaatatttgttttaaaagtacaataaataatttctagcaaatggcaatcaattcaatatcaataatagtaatatttgttttaaatgtacaataaataattcctagcaagacaagcaatcaattcaatatcaataattttaatattaatattaatattgtctatttttgtcaaactctcattataaattgacaaatgtgagtagtcacttcatgttatctctctcaatttcaatgagaaaaatagtatttatttaacttgttggttttgtaatttttatccaagttcaatttaattaatttcccacgattttatatcatgagtactaaattacatctcttatttttcacattttttaaaaaaataaaattaagttaggagatcgatggagagttgtgacatgttaataacaataaactacaaaagatgttaagtcccattataatttgtcattaattaagggaacaaaaaatcttaattaggcaacaatgaattatcattatccaaattaatgtaattattttatataatcaaaattattttcataaaaatttgtagctatataaagtaaaattattattactaagcaattatttttatagtgatacaacatatatacatactaaatccaccattattataattttgactatttttttcaaaaaaaaaaaaaaaaaaactagaaggatataatatataactacacactaacaaggtattaaatattattttaaattttatattttataaaaattacaagccgaccattttattttgctaaataataatttaaatttatttataaaatataataatatctcgagttcacgattgtagtaaaatgtttttaaaattagaattgtattattaaaaatttagttacaatggttaggattaggaagaagaagttttaggaataggaatagagtttaagggattaaggtaattttatttttattttatttttttgactaaaattgaataaagtgtgttattagttatgttttattttataaaatgtatggtctaaattattattaattaacaaattacagaaactataatacaaattttaaaagagtatttaccctttagagtcactgcttatatcttgttcgataattggtagaaatagactgtttatatgtcactttataaaaaataatactatttatctctaaattttacaaaatagtttctatatggaataataaaaaaattgtaaaatatattgttttaataattaggtaaatattatgtttagtgtgattaatttattaaaaaagagaaaatgtcatgttagactattttgcaaaataacaatattattattattatttaaa

SEQ ID NO: 71603 - DNA, 1895 bp, Cannabis sativa
agagagagagagagagaaagtaaaagtaagaaagaattctacctgctcatcaaaaattgtttgatgaacttgacgaagaagtaaatgtgtctctttaataatacattcatcatcactgcttgcatccttttcactttccctggagtgatgcttatctgaggtacggacttttacattattggtttcagtactatcacatgaatgagtaccaaaaaaaccaaactgaagagagcgacatgaatttgaaggtaaatttattgctagcatgccagctgggtcatgttcaacacgaaccattgacagagaagaagagcggtatacagaagctggatcatacaataaattgtcaaaaagatcaatggtgaagccttcatttccagatgatggagctgcgacacgctgccgtttaactttccagttctgctgcaatctatacactagtcaagaaatgagataagggatatcatagaaaattatacatttagctgttaatctttcaaacttcctttgacttgtataaatgcaaatggagtaaatttaattattcaattacacatcttcttagaactaaattctatcatgcaaacataaagctaatgaattagtgattacttctaaaaatggaacacatgaaaaataaattcccaaaaagaaaagagtaagatagtacatttttattagcaagacaagcagtgtgtttggcaccatatttgttttgaaaactataaactatttagaacacaagtaggggtgatgtttggcattgttttcagaaaacaatttaaaaaccaaattacaaaaaacagaaaattttaagaacaaaaagttgttttatggatttttcataactctttctttcaaattatcttatcttattattatttaaaaattttaaaatatttatccttctataaataaatttattaatttttttattgaactatttttttaaggaaaaatctaaaaattgtttttagaaaacatcaaccaaaacacttttgtttttgttattttttttttttttgaaaactacaaaaactattttgtgttctcattttttataacacaattttgaaacaggaaaacaaaaaacaatgccaaacaagctctaaacatttccaaattttccagcgaagtaagggatgtgaaatcaaagtctcgaaagaagagccaacctgattaaagcaccataaaatcttgcttctctagctatctgttgttccaaggatttggcagattgtttaaaatatttaccaagactctgcaacagaaacaaagaacacttcagaagagatttcaacaacatcttgtgaaatacaaaaatgaaaagaaatatataaatatatatatatataattgtagatgtagacccagcgcgcatatgtgtgcaatcaatctgaagatcagccaagaattggatgtcaaattttattaaagcggaatacaagctcagacaaaatgctggtgaataaggttgcttatgcaacatttaaaggccaatatttaagttttaaaatgcagataatcagctaccctcctacagaatcaattgttaatacacaataaatatgttcgtgacaaatgttacagaaggttatttctgatttttgagtgtgcatagttcaagatacagaagtttatacttttaatcacacaactataatcataatattggagggccttgacacaaataggatatagaaaaagatttaaacttcaaccgcataagatcaatctaaagacatgttagagttcaatctacaaactgaaaaatgagattaagtatgtaggagttgctatgttgtagtttcatgaagcaggggcataaactcaggccatataaatctcaatgagactatgcaaagaggtattacaaagagaggaaaaagtattta

SEQ ID NO: 71604 - DNA, 746 bp, Cannabis sativa
  modified_base (651)..(679): a, c, t, g, unknown or other
tggaattatacaatttttaattttaattccttttatataatatgttctctctaacgttatggatggcaaatttcacttatttgcattgtctcaacaattcgaatcatttttttaaaataaccaaaaaaaaaaaaaaattgcatagaaaaaataaatattatgaaaaggaaataaacattcactggtcttcggatataaatctgcatttcatcatttgtgtgctgcacctgattgtgtacacctcatgtttgacaggtgtccttgtggtctaatattgtgtgggagataatgattaggcattctcttagaatattcccttagggaaatttttattgggatttgtattctccacctgtattggaactgttacattatactgtatctttgtaacaattactctgtattataaatatcagactctcaggctcaagttcagtgagctgagatttcattttgtcaaattcttctctaattttacttagtatcagagccattctcgccctcgtaaatacctacccacaacagccaacaactctcaatcaacccttctccttaaaactcgacagaaacaattacacattgtggaagacaatggtctccaccattgtccgtggtcatagactacatggctattgttggaaatattttacnnnnnnnnnnnnnnnnnnnnnnnnnnnnntcattaacatcctaatatgaatatataaaacaatgaaataaacaaataagggtttaagaaaacctta

SEQ ID NO: 71605 - DNA, 1181 bp, Cannabis sativa
ttattttttgtaatatataataattaattaaatatatttttagtgcaaaataatttattatagagtcttttaatcaatcaaaacctttttccaaatattaggttgtaccttttttagtttttagctagtttctccctaaatttttcaataaattatttttaagcccttatcaaaacctttttataacaacttttttaaaaagcacattttagcttttcaaaaattatgtcaaacgagccgataatcatgaatatttatatatatgaaacgtttttcaaattttttttatgttataagctcaatcaatactctttataaataaatttaatcacatttaaatattaatatatcgtattttcattattttttatgcttatatatttatgataaaaaaatattaattttagtaacttaaataaaatattaaatagacttaaataatattttgattggaaaataaaatcttcattagttagttttaatagatattgatgtttgtgttttttacttgtattgacgtgtgcccttcttaaaacgaacagataataagatttctctaaagtccaaaaaaacccaactgtaacaaaatcactttaggcaggaacaaacccaaactcaaggttcgagaagtgcacacattagggacggacctagtagtgttgatatgggggctatagcccccactaacataaatattgccttttaaaaaattaaatgtaattttttttaatttgataattatagactaaaatagtagaaaagcccctacaaaattaaataaatctagtaagagtgataataatataggtataaatattttttaatgataaataagcctctacaaagtaaaaattctgggtccgtcacaataatcctaaataatgatctaggagctagctagtatcgacgatccatcttctcccgtgatagatcacctaagggcaccatcaacaagtcttagggagaatatatagtgcttccataaatcctttcaaccataatgtttccttaactccctttgtagtggcaatatatattcagattcagtattggataaggtcactactggttgtaattgaactttccaactagtgcaattgcctcttaataagaaaaaataggctgatgtaaattttctagtgtccctatccctattctaattagtgtcaaatatttttttt

SEQ ID NO: 71606 - DNA, 641 bp, Cannabis sativa
aaaattactaattagctttagatttaatattgaatcatcaatatcactcaaatagtgaaacttcttttattttcttttcttaacagatttatatcataattcaaattcatgtaaaaattacataaaatatggcttttaaaaaattttatcattttaatatgatacttttaaatttgaagaattttatgacatttttttaatatctaatattttaatttgagtaggtaggatgatgtgaatttcttcttttgctgtgttgaatcttccttactttgtgttttgaacatgaatttctcttttttaagtcatcaattgttgctgtgggagatggacgtcataattgccagattttgaaggagatgatcgagatcaattatttgtgattggtgttgtgagatcgatcggtggagaagagattcatcagtgctgtgaggttgatggaagtgagagagagataaatcgcataaatggcacagagagaaaagaaaagggtgtagagagaggttttacttgatctttttggttagtttctaaattcaaaagaaaaaatctgaaatttttaattttttttttatggtaatagacatattatctcccatatttattaacttcttttattttgaatgccatatttggtggca

SEQ ID NO: 71607 - DNA, 1580 bp, Cannabis sativa
tgaaaatatcagaaaatcatggtattaatatgattttcaactttaagttattgcacttaaacatcattaattattatatatctgatcccatcatttttatataaatacttttacgtccctgtacttattaattaagatatatatatgtatacgtatatatatttatataaattgattacagctataattaaatagatatataaacactttgttatctaaatcaacacgttattattacagttattactttactataattgtatgcatgtaattattatcgtgcataattgtgtatatatacaaatacaatatagtatagtatactactcatggctcactagctaattaatcttttgacctgagtgattatttgaatgctatatatcgatttaataataacaaatctatatatatatatactttttttatattcggatactcactatttttgtacatttgtcaaattgattcttgtcattttgatttttcttaagagaatatatatgatctagcaacaaaaaaattatttgagaagggtcgttaaatacatttttaataaaagtaaaaaaagaacaaaattataattaaaaaatatttcaaaaaaattatatgtgagaagccaagtccccataatcactataaagcgctatgcgcctccttatatacatatataatatatattaagatagattagatacaaagaggagcccttatatatctatattagggcttgtttagtacatgcactttgttgtattgtattagaattattaattaatataatattatatttggtattaacttatatatttaataaattgtgtaaaattatactatttataccataaacttgacacaaccacaagttgaactcataccccatcccaatcaccgacctcagacctgaaccttgattctagatttagtttcggggctagggttagggctaaggctaggtctggatttggattcacagtctggggtcaagtttaggtccgtgtctgaggtctgagttcagagtccgagatcaataggatcaatgctagggctagatttgggtgtgggtccaggatcgagaatcgaaattgggtcagggtttagaaccgggtatatgatgaatactataagaatatataggattttattcctagctagttaggtaggccacagagatgcaaatataaacatagcagaagaaggagtgttaaaaagcgttaataacttttttgtgttaatattgttattagtgcaccttataaaatttaatgtaataacttttaacgaatattattaactactcacaaaataacatatctaaaagatgttaaacaacactattacccaaatactcatagcagaattaaggtcatgcggatgaggttgaggcccttgagggcatgactttggttttggacattcatttattcattcattcattaaataaggtcatttaagagcttggttggaccatagacatagatgatcagagctggcaaaagatttttatatatatatatgtggtatttattaataatcaacactcatcctcatcattctacactactctccactctccactc

SEQ ID NO: 71608 - DNA, 2591 bp, Cannabis sativa
aaagccatgcattagagatcaatccaacaccatcaccataaaaaatttgaataaatgtgaatgtctccactaaaacttaattaatgctttaatgctatatcaaagttgttatcatgagttgaaattagttaggggctttgctaaattgagttggtttctgatagttagctactgttgtaactaactcattcttgtatttgtgtataaaaaaaagacttgattcgttttctttctctgtaatgattgaattaataaactctgccttttctatctctctattttcttcctcttcttcctaaaatgatatcagagccatgttaatcatggtgctttgttattcgtttcgtttatgattattggtttttctcttgaatctcttgttttccatggcgcgaggaaggatcaacactcgaagccagacgactcaagggactacttttgaggatttaaatcccttctctgttcttgaacctaattccaaatctcataacgatcctaatcgtgattcgtattatccctccaacaatgatcatcctagtgccaattttgtccctaaaattcttactgaaagtgataattatcactcatggaagcgtacaatgacagttgatttgcttgcgagaaataagatgcaattcgtcaatagaaagcttactcaacctgatgaggatgatgaagactatgatgcctggaatcgatgcaacaaccttgtcgtctcgtggttacttcactctatatcacaagaaatttgtgaaagtataatgtacatgaatgttgcagctgatttctaggatgatcttcaagaaaggtttagacaaaggaacgctccaaggattttttaagctaacagatcaatgcagctactgaatcaaggtgctatggatgttactacctatttaactcgaagaaaagtcctatgggacttaattcaagagtatagaccactgcctcattgtcaatgtggtgctatgaaaatcatacaaggatatcaagaggaagacaaggtccttgagtttttgataggattgaatgagtcttacaacaatgtaagatctcatatcctaatgcaagaaccacttcctatgatcaacagagcctatgcttctgttatacaagaaaaaagacaaagagagatttgttctaacaactctgaaaccagcaaagactctaatactcttactgttggaacttctaatgatcaatttgctagaaactccaatttcaacagatttaaagtcacttgttctcactgtggaattcttggtcataccatgtccaagtgctataagatttatagatatccaccaggacataaatactattcaagatttccagctcgagattcttgtgcttcacaaattgggaaagctactgctaaattcttaggacctcaacaaagccagagtaatcaagtggatcagcctagagagaatgatcaagatctcattgctagccttactgtgcaatgtcagaaattaataagcatgttgtctcagaaaaattcagatcagtcctcctctcaacctaatgcagatcagccacttgtgtcccatttctctggtaagaccaattttattcataataagaaatgaattattgacagaggtgctacacaaccatgtggccctgacttatctttgtttgttgatattgtcaaaaatccctctcaatcttatgttaagttaccagatcgtagaaatgtggctattgtttgcactggttccattcacttgactgataaaattgtgctaaaaaatctgatgtgtgttcccacttttgaaacctatcttttgtctgttatttccctaaacaaatctgcttcccgctcctttttttttaccctaatcattgtactatacagggcattatgaggactcagcagattgggatgggtgaaaggataggaaatctttactacttaaaactgcctcaggaaaccagtcctcctgctgctgttttttcaattttagattctaagatttgtgatgaaacattgtggcactttagattaggccacccctcttgtatcaagtctcatcctttaaataagaaattaaaattcaatcattaccctggcaatcatttccattgttatatttgccattatgccaaacaaagaaaattgcccttcatttctaatcataacattgctaaacattgttttaatcttatccatgttgatatttggggaccttcaatgtcttatctgttgagggttttaaatatttcattactattgtggatgatagctctatgcttacttaggtgcatttcattaagcataaatctgatgctcaaatagtgataccacaatttattcagctcattaaaaatcaattcaacatcattattaagagtgtttgatccgataatgccaatgaacttcagtttctaaatttgtttaaagacctaggcatcattcatcatcactcttgtgttcatagaccacaacaaaattctgttgtggaaagaaacaccagcatctctttaatgttgctagagctttattttttcaatcctatattcctcttgcatattggagtgattgtgttgctactgcaacatatctcataaatagaaccccaacacct

SEQ ID NO: 71609 - DNA, 661 bp, Cannabis sativa
catatcatcattcataactctattgtcaacaagaaaggcagttaatttcatgttaaaaacagaattaaattgagaatttagcatccaacaatatattcttttgtgttgtgatatatttgaggaacaacttaatatataaatatatatatatagcttctattttttttttaataattttgtcaaatataaatgcaaacaatagactaggattaaaaaacgaaaaacagaaaaaaatcgaagaacttataaattagcataaattttcatttttagggcatttagatatctccaattagaatactttataaaatgtttgatcatgacataaatctattttagatatcatttaatggatgtgttactattggagtgaaaaaaaaaatactaagaaagaatgtctattaatggcaaatatattatctcgtttttattattattattttattataaataaaaaaaataaattatttaatatatgaaatgataatataatattattataataattcttagagatacttaataaacattttaaaacaaaaagtctcatctgtattaccaaatagtcaaatatggttgggcactacaagaaaaggcatttttaccggcgcagttcgtcaaatgcgccggtaaaggttgtcgagataaaacaaaatctgaa

SEQ ID NO: 71610 - DNA, 1853 bp, Cannabis sativa
ttttatttttatttttgctattttaatcttaatctcgaaacccccctcttctccaattttagttaccaatttctgaataattgaataaacatagttctcgtgagattgactctcacttacaattatactaaaataattagaggtattggaaaaaaaataataaatttgatacgccatatgacacacatcagttgtactagttttgaaagatttgggacctgaagtgcttgttggtgtggagttatacgaggatgaaatacccgtattagtgtccaatagagaagaataagtggtagtacgaggagacaaactagatcaaaatccatccccctttgcatgaaccaccaaatcgtcattccgatcctcaaatagctgtgccttagccatgacatcagctaaatccaccgatttagagagcaagagttctttacatatttccattttaagatcccaaacaaagaaattcaagaataaatgcttagaaacaccagctacctttatcatcagttctttaaattcagatcgaaattgagcaacatgacctgtttgtgtaatctctgagatacgagcaagatgatcatcgtataccgaatctcttaaatgcattcacaatgcttaaagaaatgtaaaacaattcacgaatgaaccactcttctccatcaattggaaccacttcgtcgacaccccctccaaatgaaatgtcaccactgttaagcggatgcaatcctctatttggtgaagataaaaaaattgattgatcttgtaaatccaatccttaacattggattcgtcaaatttggctacctttacacgaagttttttaagaattccattgagatcacggtagtaagctggtcgaggggctgctattccagaaatttcaccttcgtcatttgagtgagaattagccgtatgtgtaaacatagctcgaatttgtgcaaatttttcctcgtttttgatttcatggttgtgcatctcaacatattgtctcgatttagcttctcagaattccttgaagcttgcctttatatgttcgaacagagcagcaatctcatcgttcttcattggatgaagagcaatgaaagcactaattgatagagtaaagagtcctcttcgagacatgaccaatctctaattgcaatatcttgtaaattcattcaatagccaattcaaaacttattacaaaagagtttacattgttgcagaaacagaagaaagaagggaaaaaaaagaattacatcctaacaaatttttgggtggctcattagcttgctccccaacgtcgctcaatcatcacgaaatcctccagccattttggtttggctcgagccctgttcttgtgagctgggatttcttgttcagcttcagcctttttcttctcctcttcgccttcgtgaatcccagctgaagccgttgtttcttcttcttcaccattttagactgagttagttagccactctcttaccttttggtccattttcagtgggtccaaaggtattgggctttttatttgggctttgctaacaattgccaagttcttattatatttgtatgtatatatgtatgttgcattccatagctttcttttagtacctaaatgcatgtatattctcattgtgagtagtgttaatttctcaataatgaatttgtgcactgattgtataccaaatagtgcatgaaacagaatttaaattgacaaacctggaaaaatagagtattagactgcaaaaatgagatttgaaaatgatcaagaccttatttaagcaatgtccaacacccaaaattggtcctttaatacaagctccccttgtttgaattttgtatcagcatataccacctatattgggaaaaca

SEQ ID NO: 71611 - DNA, 1478 bp, Cannabis sativa
attattaaaaattaaaaaaaaaaagcattgtttcaatttgtgtactaattacacaattactagaaaaatgaaataaaaatataatttgtcttaccttaaaagcatttttaattgaatcatccaaatgatgcaaaagaaaacctcccaatatagtacaaaatactccacatattaaagtcattatgccgaaaatattatcagcattattctacatcaaacataaaatataatttatatgtttttcaattatatataaatttacaaaattaaaaaaataaataaattaaattaatttaccatgtggtagagtatatatactactttgggtccctagaaggaataagcatcgaatacaaatgtgtatactactaggcctacaaaacatatttaattatattaaattggataattaatttaataatttaataataaattaatatagaagagaagaaaaataataagctacttaccgagattattaagtatgaaattcttattacagattaatttcatatcttgagatattttaagaagattcaacctgttagcaaagatatagtaaatgatagtgtatataatacacaattaaacttataataataataataataataataatatgttgaattaaggaatatgttttaaaagataatcatgcttaatttgggacttgaagttgttatgttcttggtcacatgtgccctcctcattacaaatttccacatctcttggacctgagtttataaataattaggtaagtaattaaaaattaaaaaaaatgctcaaaaacaatatagtactgcccaacaattttcatgatgtattatacaatatcgttaactattcacaaaactctatcacttagcttaataatgatacaacaaaaagtttataaacaaattatctcataaatataatcattacttactagaaataaaaatttataccttcaataaataaacttaaaaagaatagtggagacatgagaagtgaaaatattcaaaatacttgtcactacttcatttgctttccagcctaaatatattgtatatagaatataatgtaatattacattatttataaaaataaaaaagaaaaggataaaataaatttttatatactaaataaaaataaattatctaagataatagaaataatgttacttacaaatcctccaacaataaaatattgagatccataaagttttctgatatatttaatacattaaaaaaatcaatacaaaaactcaatatgtaataattgagatgtatatatataaaaaacttgcaaatttggtgcaatatcattaatgatgggtgctccaagaattaaaagcggcccttctccaaacccagccaatctataaaataatagtagtggtgaaacttaatatacataaaattaatataatttatatataataaaataaaaaaaaattaaatctaatataattcaattatattttttttaataatata

SEQ ID NO: 71612 - DNA, 1263 bp, Cannabis sativa
gttcttttatttttaatttccataaaattaataaaaaggagtgatataatacttcttttaacttatctacttcactccattaaaaataaaatttatcttcttcacatgtcaaaacaatatttctcttttcttacatataaaatataaaatttagggattttttcatttttacaatttaaaacagtttttttttgcatttttacagaattaggtatagaaacccctattgcaaccagcactacaatgtaaattgcaacaaaaaatcgtacagaaaccgtaactgcaactactttagaaacccaaaccgtaaatttaaaaaaaaaaaaggtaaaaaaaaaaaatatatgagataattcccctaacatttattacattttattctttcttacaaatcaattttcttacactattttcttactctttcttctctcttaaagttattatttttttttcactctctctctctccattaacatgtatgtgtttttttaagacacatattctaaattatttagtctggacagaaatacatgatgtatgttacttccaatttttttttaataaatttaaaatagagcctgtattgacgaaagtagaaaaaaattacagttttataaatatttgttacttataccactaaaaaaatcaatgtgtttatgccgcttacaaactcaaaatttcaggtacttatgtcgctatttagccttgtttttattatttatttgttagctaattgagttttattactttttttggcaatatagctaattttagttgggatttgatttattaagtttgattctctcaaatattatgtacgtgcatgttttattgactattatatttttacattggaagactcttaactctaataattagacataacaaattagtttcgatacaatagtaacattctcagtgaaaaaagtctaagataaattttttcttgttaaaataataattatgttttattattttatctaaaaaatcacaaccgttgtatagtaggctgatccacttttctatattaatttttttagctagttttggtctatttagttattcatatcggatgtcttttaaaggtagtttaaaattgttttgtctaaatcttagagataatttagtcttatataagtcgcattatttgtaataattcatattctcactcggtatatctttagctagatacttagcttgttaactgaaaattcgttttcgggatgattgtcatagtgtgattcagaattttttttttttttt

SEQ ID NO: 71613 - DNA, 1534 bp, Cannabis sativa
tgtgaggagggtctcgagactcaggatcaagaactggagtatcttgagagctgattgcaggattggcaccagttggaccacgtgcaacaacacttgcaggagctatggagcgtggaagagatacttcattttcatcaggatttgcaccacttgcagcaacaggcaaacaaggaaaaccagtaacattagagtgcacagcagtattatcaatgttagtaggaaacaatgatgcaatagagtaagaaataggtgcaatgggaatggtactggttgtagttgccaaagggtcagaagatgaagaaggtgatgaatgaaaaatgtgagagggaaaggattgttcatcgaatataacatcacgagagatgtaaacacggccagattggtccaagcatttatagcctttgtgattgaggctatacccaataaagacacaaggagaggagcaaaattcaagcttatgcttattgtaaggtctaatattggggaaacaactacaaccaaacacttttagctttgaataatctggggtgagaccaaaaagaatttctatgggtgatttaaaagataacactgctgttggaagtcgattatgcagataaacagccgtgcgaaaagcttcatcccagtatttaagaggtaatttggcttgagctagaagtgttaaaccattttctacaatatgcctatgttttctttccgctataccattttgctcatgagtggtaggacatggttttctatgcactataccagctgcctgtaaagtattggtaaaggatcgatattcccctccccaatcggactgaaacattttgattttggtgccaagttgcagctctacttcggctttaaaaatgtgaaatgttttgatggcatcagatttatttttaagcaaatagagccaagtaaaccgagagtaggcgtcaacaaaatggatatagtacttatatccattatgagatggcacaaaagatggaccccaaagatcggagtgaatcaattgtagaggtgctgtaaaattagtttcagagaatttgggaaaaggaagtttgtgaatttttcctaaacaacaagcattgcacacaaattgagtcattttatttatattcgaaagattacaatgagacagaacagacttgacaaccctctcagaagggtgaccaagtctattgtgccaaagctcatactcattatttgacttattacaattgacacaaactgaggagtaacaagtttgagaggcagcagggacattgttgacacaagtggaggctgtgttggcataggcagagacagctggagtaacagaatgcttggatacatttgaagatgggcaaggggatggggaggcagagagctgaaactgactagagtcaaaagtatacaggccattgtgatgtctcccagtcagcagagtagtattgctcgcctgatccttgacataacaagtgttgggatagaaaacaaagtacacattattatctgaggcaaatttggaaacactaagaaggttcttggttatttcagggacatg

SEQ ID NO: 71614 - DNA, 1222 bp, Cannabis sativa
agagagagagagcatgtggaaagcaagtgcagtccaccgaagaaaccacaatatgcttgactctgtccatacaatagtgtcggtcatttcatacgtactactctctcctcaactgcatagtaaataacatgactcaccatacatgcaaccatgttttggttagtgttttaaatatatttcttggttagtttggttttgaatattttgtaatgtttttactgtaattattattatactatttataatatgtatacccttccatcaccaaaagaatttaaagtgaagatatttttgtcaacacacacctcattgatagtttgaataaatatgctagaagtgaggagtgtaaatggtgaatttaataagtcaaatgtatattttggtaaacttatctcgatgaataaaagcagaacctaccttgctgcattcttgaatgagaacgtggttgagaattatgttcaagtattttggtacaagaacaagggaaaaaaatcattagtacaaataagttattctttgtaaaccaaagaacaaggtaaggatgttttagaattctagcactcataaatgaagatttccaaacaaatttggagaattttttagatcgtacatactaaacaatgatgttagaattttggaagagccggtagtttaaaaaaaatctcatatgttgttgatttgaagttagagaatggtagttggaatgttgagttgattagcatggtgcaattttattaataacaatctacaatataattagaacattttatctgtttgaaaagaattagaataaaaaagaaccaattaactagacccttaatacttgaatcgttttataaaagaaactaaattaaagttaaatgataaaaaagattgcagcatcactattaatttcaaaaatacatatatttattttaatccactttttaacaagttcattcaactccttagcttgagcattcaaccccttagcttaagcattcaactattatagaaggtacgtaactctactattaacaaacccttcagccacaagaacttattacaaagataaaataaaacaagattatgtcacaagacaagactaattgcaataatctaaacaaaagacacttaaatcatgtcacataaacgagactaaccgtaatacaaaactacagatttcgacggcctaagccagagaaggtcaatgggcctaactaaagaaggccgatgggcctga

SEQ ID NO: 71615 - DNA, 1640 bp, Cannabis sativa
agtatcacttgtgatcgagttgtccaggattgatgagtgaaaataactatcatcttgaggggagatgttaaagagtctcacattgtgtgtgaaaaaataatacaatatataagatgcatgagctactcttattgtcaaattttttttgaggtagaactccatgcaccttaccttacacacacctattgacggtaagaactcgtcaacgatgttaatggcggaaaattctatgtgtgaatattgaaaactaagaatatatgtgaattttttcaatcttaaagaaaacttgcagaacaacaatggagaaaagtgagtgtattgtattatcaacttgttagctagggttgcaccaagtttccaacccttttgaatgagagatgaatttctatatatagggagctcttatggctcccatttacatgttgatcctctagtggtcctcgagaagggcaaactagtacacagtacgctggtcagatggtaggactcagagtagtggctgcgtggtcaaagtagtggttgcaaggtgttattggtcgggtgtaccaggtgctgtagagtggtggcaacgccactactcacctaggccttacctccacgcgtggtttgacattgtgatccatgcttggtggtccagggctttggacatttgtactgccacccttatccaagttcgactccttgtctcacatattattttaccatggactaagtgtttaagctatactccatggtagttgaattgtttgagcattgccaagacaaaagagtcaatgacaggtctccaaatggttaagcttcttaaggaatcaacgatgaattaactccgcaaggacccctctttgcaggtcgtggggtcctcgcaaggaccctttcttacaggtcttagggttctcgtagggaccccttctcgtatgtctcggggtccttgtagggacccctcctcgcaggtcctagggtccttagagggaccctttctcccaagtcttagggtcctcacaaagaccccttctcgcatgtcccaaattccttgtaccatcatccttatgtaagttggaggtcttgcctcgcatatttctttgtcatggactaagtaaactatgtccatggtagtcggatcatttgagcatcaccaggaaaagggaggcaatgaaagaactccaaatcatcaaatgatcgaggcctcagtaaaaggtcgttgtcagggtgtccccaacatgaaggattcgtgtagtggggccccgctaggaggtcctcacaagggggttcccacatgtccctcctcgcaggtccttggacctcaccttccttcgaattcatgttgatcccttccttccaaatttggatagataatggaggatctctctcacgtagattctcccgttaacaatttcccccgagtatatataaggagactttttaagtgtcgttgtatactctttacttcctcaacctattgaagtctcatgatgacacgcacaaaccttagggatgatacttttgaagtattaagcgtggatcccaagaactacatttattgtgatctattagggaaaagtggtaaaattctcattacccaataatgggaaaaatatggtatttatagaaagtgggaaaaaatccaaataagaagtctaaaa

SEQ ID NO: 71616 - DNA, 1095 bp, Cannabis sativa
agtgcatctatacattctttttattcctttaaaggggcgcattatagaattttcttacattatttttttaaaagaaaattattggaagcttttatggtgcactgcacattgatgcatgccttatttatttcaatatttaggataacttttagtctaatttatttttatggtcgtttatattatacttatttaagatattttgtagagttttaagaaattcagaattatttacaatatataaaataataatcaaacaggtgatttcagacgtataaaataaaagtattacgtgtacaacaaattatttaaaacttattttgggctgttaattttctattattttttttaattttttataattttataggttatcttaaataattaaaatatacacacttataaaaaagaaattagactaaaataataaactgaataccaaaatagatagtagtgcatcatacaatcttttttacattttttaaatattatattaatttttaaaaaaaattaataataataataataattttcacactaaaatttgatctaattaaattggtatgacatgatgagttggcataattgatgatgtggactaaaatcactcaacatatcatgtggattgtctagtatctactacaattaattaacaaattatacaataaagctttgttataatccaattggacatgaatttaaacttgttcgatccaatctagtttgacccacttcaacctaaaatcactaatgcacattgtaccaaatcaatttttaaccctcatattctaaaaaatacatttttagaccttatttttattcaaaataattctctaaacacaattagttaaaatattcacactaaaatttgtattagggttttatatcacatactgaaattttttacttttttcttttttaatgtgcaatggatttttttttttcaaaaatactgtgtttttttctttaaaaaaaaatactgtgtactgtgttaagttttcactattgttcaacggttattttttaattattttattttgttgttttataaaaagatattatttttgtgaaaatttttgtgtgagtaaaattataaat

SEQ ID NO: 71617 - DNA, 1262 bp, Cannabis sativa
tggtgaaccgcaacaatctctccgttcaacaacttggaacctgcttcgtgatcttgctgcttattcgactcttccctggtgtataatcggagacttcaacaacattactactcacggtgatgtgaaaggcggccgcccctaccctgactctcttataaacgagttcaaccttgccctctgcaactgccaattggatgaattgatgctctgtggggtaccagtatacttgggagcgtggaagaggaggtcctacacatattgaaatcaggttagacagagcttttactaatcatgactggttctcaatatgtattgatgctaaactgtcaaattttaattacacctcctccgattggacacccttgcttcttgaaccagaccctgctatgaattataaacttgtaagattatttcgttatgagaatgcctgggctcgcaaacctttgtgtggccagcttgttaaagattgctgggaggttaacaataatattccccttgttgaaaaaatttaactgtgtagctctatcttaactgaatggggttatgaaattactggtaactttaagcagcggttaaacaaaagcagaaaaagactgagtcatctaaagtcgactactatgtcttcctctactgatgatttttctgcagaacattgtatttattttaacattttagctcaacaagagatttattggaagcaacggtcgaaacaattttggctccatgcgggtgacaaaaatagtaaatattttcatgctactgcaagtgctcaaaaacgtagcaatgaaattgttcaattacaaaacaattctggtgaatggaaagactggtcttcgggtcttgaacatgttattgttgattatttctcttctttgtataatgccgaaggtaccacttgtgactatgttgtgagaggtatcaattgctctgtttctaatgaccataatgaggctcttttgcaatcggtaacatctgaagagatcaagcaagctctctttcaaatgcatcctgacaaagctctaggtcctgacggtatgggcccaggttttttccagcagcattgggatgttgttggcactaatattgtgcagcttgttttgaaattctttgatactgaggagctcccacctggtataaatgacactcatctagtgttgattccgaaaaagaaaaatttcactactatgggtgatctgcgtcctattgccttgtgtaatgtctcttacaaaattgtgaccaaagttcttgcaaataggatgaga

SEQ ID NO: 71618 - DNA, 890 bp, Cannabis sativa
ttaatatttataattaaatgtatttagtaagtgttctatatattaattatactaataaaaatatcgtacaaaataataataatgtaattatacatttctagtaacttttagcatttttaagaataaaattagtttcaacgtatataatttacatattatatataccatattttattcttcataaactaatgttatattaagcttaatttaacaatgagtaggtagctaaatttactaaccatgttttccttaatattcaaatacatattatacatattgagaaatgtcattgctataagtatttagtcttacatattttaattttatacttattataaaatatcattaactatatgctacttcttctctcataatagtagtgatggatgatgatgagtgttccttttgttttcttccaccgactttagtggtgtactatactccaaagtactaatgctatatatggaccaaaaaaggagagtcccaccatacacttgatcaatatgaaagctattcatttgaggaaaaatactaaccatttccatagctttaaatctgcaccaagagacaagaggtagtgcagaagaagcctatatataatgtatggtcatacacattgcaaggagaattaatgctaaagagaatcttagtacccaacatcttatatatccttatttttgtaaataaatatcttatttcatacatttcaatataaattaaaatatataaaatttattactaaattacatcaataataatatgtccatatcctaaaacaaacactttatgttggaaatgttagtatgcttactaaatattgaatctaagtgattttgtgtattaggtccaaattcccttatacaaataatcttaattattaaagtcaattg

SEQ ID NO: 71619 - DNA, 1329 bp, Cannabis sativa
gtggtagctcaaaaggactggtaggctaaattgaatgcatccaatgccaaggtagtggaggttgaggagaagtgtggtctcttaaagctcaacctgaaagtgtagtcttagcggaggagagaagattctgtgatttgagtggcacctttgtcaatgctctttatgtcctttggagctagaacaaggacatcaacttgagggcattgggtgaagatgaggcacactacaactctcttttccttgctaaagaacaacttgcccctgatgtagagaaagtggaggcatcatactatcctctgctcttgtcagtatccttttggaggaggtaccatactcggagcctccagttcaaatgacaaaacatgaccaaattgtcgaaaagtaaagtgcatccttcaacaaggccaacaccaaagcctaaggatgaatttatgcaactttataattcattttactctcttagttctttttttctttgggggacaatggtccccctatttaacattgcagagacattctaacgccctaaccgggaggcttgatgcatgtaattacttttagcctattttggattgtcccttaggagtagactggttttcaattacattggtccatatgattttgattcaaattcattaagtatgctatctttagataaatttattgctaagttacttctagatgccctgagtttccagctctaacggagtgaaccctgggattttaattatgtacttagtcttttatactaggttatttattaaattatttacttctagattccctgaggtcctggttctgatggtctaggcctttggggttttgaaaattcaatcttaacctgtttatttttcaagaatggaatattcacatgtaacttactcctgggtccttgaggtaccaattctaaaggcctggacctttcggactccgattagcttttttttttttttactattttcactttttattgtttttgaaacttgagtttcatttgccttgctagcctgagctaactgatgaatcattaattaacatgtggtaagaagtaacttactcacagatccctgaggttttggttacaaaggcatgaactttgtgggcttcagttggtatttttattaccataccgaataataagtatccatactctagaaaattttttgtaaaattatttactttgagttccctgagttctcagatccaaagacttggacttcaattgtttgttttcctagaaatttttcatttcttcaattttttagaagcttaaatttcttttatcaacctgagctggctattggtttttttgatctatcgtggtgagaa

SEQ ID NO: 71620 - DNA, 1324 bp, Cannabis sativa
ttgtttgccaacaatagtttgtcctttgaaaatgtctatggtagatatgcagcacaaatatgtacttcgaaaaaagaaaaaataatttatcctattaagtatagaaaaatttcgaaaactttagcgttaattatctgcgaaagaagagtgatgaattcttcttacattgatgctactccatgcatgttaagaaatgataataacagtagttttgtttggtcatattatctattggatgcggatgaaatgagtccttttgagttggatttttgcttgatacaacaagtgactctcatagatgaaagctttcatgcttcctcttgtcatgacatcaatagacagttagcatatggttttcatctttcgtggattcaaggtttggacaaaacatggcatcaacaatgttctctcgatgaaaattccaacaaagtttattgtcgttatttaagatgtgtgagtgaagatatatttgaaccagggaatcaacgattttgtgatggtataaacttatttacaacaatttaaataacaatgttttaactatgtaaatatatattttctggtattaattgttcattgttttttttatgatgcagtgacatttgtaatacttattcgtcagactatgttttacataaaatgtaagaacatttaactcattcatgatccatccttatgtatttttttagtcgtttttcttattttttatgattttatgcagattttttatatgatgaaggacgttacaaatacactggtatatatatggttaccttctatttaattagttttaaaatttacaacttatgtacaatacttggaaagaaaatcctaacttaatatttttattttctttattttaataattttaccagtgggattcttggtgccaagagagttacctggacttttatttttgatttccctagtggtgtatagttggagaaggcgtcatttatcaatgtacaatgacatcgaagattttctccaaagtcataacaatctcatgccaatacgatattcttatcgggacattaagaagatcaccaaagggtttaaggagaaacttggtgaaggagggtttggatctgtatataaaggacaactttgtagtggtccttttgttgccgtcaaaatgctaggaaaatgcaagactaataatggtcaagatttcatcaatgaagtagctaccattggaaaagttcaccatgttaatattgtgagattgatcggtttttgtgttgaagggaaaaggtgggctcttatatacgatttcatggctaatggatctctagataagtatattttttcacaagaaaaaatg

SEQ ID NO: 71621 - DNA, 1672 bp, Cannabis sativa
atgggccggttctgactacgaaaccaaacatgctgcaggcacgtcaaatgatatggtagacaaagttgaggatgcctagtgggcattgtatttattcagtaggttgatgaattagtttgtcttttgtttatttataaatgttcctataaaagataatagcacagcttacaggcgatttttctagcgcagtggttgtgaaccaaaattttgatctgataatataagcaatttatttattatacgattttttggttcagattttcaaagaaagacagttgctagttgaaggtgattatcttgttctgcagtgtatcttatcgttgagaaagtgttggcgtttcgagtagtgtaattatgtttctttcatgttcgtatttcctaccttttaatttgtttcaagcatagaatttacgtttgtcattattgaattagctataggtttgtcatgcacgtttactacacaatacttatataaaattagagtaaattaattgagaaatgtaacaaaataaataaaaaataattagaattaatatttgtaatatgttattaataaaattatttagaaatagaataataataatttatctccttttactttagaaacattaaaaagtaaaataaaagtatatagaagctattattcttaatgacatttaaaaaaatagggagagaagtattttcttttattccataattaataaagttctccttttgattttttttttttttttttttcagttttaaccgaaaaagtaacaatattacaaaaatactttcagctagccaaataaacgaatatacaacttaaataaaaaaaattacacaaacacctcttacacactccttcaatcaaggattcatgcttgatgggagtgaaacctttgtctgatgcaaccttcgggcaaccacctagcaacccaacacaaccaaaacgaaatccaaccaaaaagagaaccaccattaattccggcgacttcactaaagaaaacgattggaatcaatcaaaacaggggctgttttgaattcatgaaaacaaagtgcagaaaaactactacgaaactaaaattcaaccagaaatccagtttaattcgcataaaactaatgccctgattttaatttttagattcatgaaatgcatatctcaaaaagttgaattggtgttcccaaacaattcaactcaagtataatccaaaaataattacatcaatactatagtaaaatatttatcctggtgtatttttgtttttcaaatttctaatggtgaattgttcatattaaatcataaagagatatgtagatagagttacgtacgtggaaacactattctgattttaatatttcataacagttacataaacattttactaacaattttttctccacatattactattaaggtacaagtaattattgatcagtgacaaaaaaatactaacaaatagtttcttacatatacacattcacattttacatttcagttgcaattaagttgcatgttagttggcccgcaataaatataactgttgcattacagtttcaacagcgacccgcgatccatgcttcctaggattgaaaccttcgtctgatgcaaccttcggtcaaccacccagcaaacttcgtctgttatgagtgtaagtgatactgtaagaggtaagtgttgggttttatg

SEQ ID NO: 71622 - DNA, 1726 bp, Cannabis sativa
aataaaatatatatataatataaataattttttttatatatatttatgattataatgatttagattatataacattattgtttgtagaattttaacaactcacaatattttaaaatttataatttattaagtacttagctcaattttttttttccacaatttacagtgattttttctcataattacagttgtttttctctatagcacaattatgccaaactatccctacgacgctattatatccttttaacaattttctctttctctctctattatatccttttaatgattttggtctggaaaaataatgcttgatcaaaagaccattttaatatatgcattcttgttcataaatctcatacatgtaaaaagaccaatataatttggaagctggattggccagaacacaatagtatggattaattatttgtctttccaatgtagaatattatataacaacatttaacataaagaaaacaaaaagctgtcaagttattatatagctgtggaaccctaaacactacttatagttggattggaataatatgatactgaagcaggaaagtaatatacatccatgtatatatatagctaagctatatagacacacctatatatacttttacaaatcaaatgactaaaagtcttcatgttgtcgagtgtataggttcagctcagtgttacaatattcgactagggacactgaatttcttttattggtatcttttctaattacttgttttcaaattacttattttcttgcatttcaaaaaaaaaatattacttttttttgttttctcttattacagctatatatacttgaacatttttttgataataataataaaaaaaatcaaatccagaatcgggaaaagatctccaaaattaatacaaatattagaaaaaaaacttcatcaaatatatatattatatatcgaagacagtgatattaataaaaattccctagcaatatttaaagttgtggttatattgttagttgaaatttgagttatgagatttattgttgtgattttttttttttggtttcaaaatagatgaagttaattatgaacacatatagctatatatagagatgtaagaataggcctgctaattcagtaaatggcatagtaagtcccatcttcatcccataatttgtatggataggagacctaatttaattcactcatcactactaccactctccaatctaaataatatacacaaaaatttgtataatttttatagtgatgcttttgtaatattttttaattaagaaaagtagaaatctaaaaatattttttaaaaaaattattaattaaaattttaaaaataaaataaaaattatttttacaattttttaattaatattttaaattttgacttcaacttggaccttgggacacaaattacaggcccggcctcacagattacgggcccggcctcagttcttaaactcgatttgaatattgagtaatttcttaatctgaaaccaataatggttgttaattttgaatgccaaatacttcaatttttttcatccatcattatttgaagtccttctattttatgtttttgcaagcaatgaccaaaatcattaaaaattaaataatgttgtacaggttaaaagactatacatttttttaaaaaaaatagacaatttttaaccaaacaaattatttattgagtatgaacaactaatctatatccctttatgattgttcta

SEQ ID NO: 71623 - DNA, 1012 bp, Cannabis sativa
atatttttttttttttttgagtgtgactaataacaatattaatatataggagagtgttaaacaacaataatatcaatctaatttgtcctatacatatttaatggtggcatatactttcaaatttaatgactcaacatctaagagtatttctaatggtaatattttaaaggatgattggtgaggtggatattttatgtagtaaaaaattgaggtgctatattattggagagaaaaaattgtcattctaaaaatttgtaaggatactatattgtggcattgatgatatttattcttttttagtaaaaattaaagttaaaaattattgtaactaaaaattaaagtatatattaaataataatacgtgaaatcttaattataatatttttgaaaaatattatatattaaaatgtttttaaaaataaaaatattaaaaaaaataaaataaaatattatattttcaaaacatgtttaaatttttaccattcaaagatggtaccctctaaatcttcgtacaacaaaaaagttatgactatcataaatgaatattaattatctcgtttttgatgaaagaataggtacatattgattgtccgaaggcaatgccagtacgatacagctgtaaagggcaaaaaatacagtttactttgacagtagctagcgttcagtttatctgaacaaagggtacatgtctaccaggatttttgcctctaatagctgataaacaagaaatgatgagttttttcttttaaaaaaaaataataataagagcgtatacgttcgctggaatacaagacacaaatacgtaggatatttataaaatagttgatccaaattaactgtaggatctaatttaatttaatttacacaagtataaatattgtaggggtatgattttgtcttattattgtactttcaccgattgatctgtgatgtacggaagccgtcagaggaatgagttatttgatctgacggctgagattgatctaggagtaattagagttaaaaagtagaa

SEQ ID NO: 71624 - DNA, 860 bp, Cannabis sativa
cactctttccctacacgacgctcttccgatctaataataataataattcaaatttactattttttaagagttcaaaagattcattggccaaaatatgatgcaaaatacaaaatgggaaagtagtagcattcaaaacatattttgttaaatgtgatttaaaaattactattaaaacatggatttctaataataataaacatttacaaattacaatccaatttacttatttgttgatgtcaataatttaataattttacactttttctcctaaagagaatatctaagttctaattttcttttctcaaatgtctataaaaaattaagttcttacaaatgagagatgaatctcttgtaaaggtttcattaccataacattgtggatttttcctttggcaaattgagtataatgaggtttagtatataaggtacattagaaaatgtaatagaaatttgaagtagtttttttttaaaaaaaaaataatgaacaaaattttcatttaaaaataataagtgtaaaatacatcaagaaaaaatgatagagaatcatctaaaatagtttactatccattctcagtacatgcataagtaattcatgactataaataaaaattaaagacgccttaagaaattaaaaaaataaactaacactaccctataaaaaaaatcctaattcagtacaaataaaattgtcatagcaaaagcaaagaaaatctgttaatctcaagaaaatgaaagttgaaattcaaagaaactaatccacaggatcatcatagctatcttgaatatttgtgagcttttttataaaataaataaaattaaattagcatattaaatattacatatattaaaaaatatatata

SEQ ID NO: 71625 - DNA, 1497 bp, Cannabis sativa
tttagttacaaattttgttgtgattaaaagtaagattttttgtagtgaatattgtgttattatttaatatatagtgaatgattattttttttttaacattaggatataataataataataaaaaaaggagaagatagcatattacttggtatttttttttaatgaaaaagttaatcttattaaccatcaaaatcagctaccaaactaggtagtaactccaccggagcatcctccaggtgaaacatacaatcagaataaaataaggaagcttttgcaaaagcatgagcaaccttattcgcttatcgcttaataaagaaaacagagacatttcaagggtctaaaccagggagtaatagcataaagatcaatgtggatgctgctatttggagatgggcaaggcttcagtattggagcagtggcaagagatgacaaaggtcttctaattgaaggtatttgcaaacactttcaagggacgtcagtggaacctctccctcttttagctgaggctatgggagtcaaggaagtccttaattggatcaaactaagaggttggcagcaagtttatgtggagacggattgtatgggtgtcgttcaagcacttagaagtttgctagacatggtgtctctttttggttgtgttatcaatgattgtaacaaacttttggcttatttaagaaatattacttggtatttattttcacttatatggtaaacatttattaaaagatgttaaaaatatgtcagattttcttccactctatattatgtgttggaaaaaatttcttcaaattcgattatataataatcattagggatgaataattaagtaatcaattaagaactttattaatttaaataattaacatgttttaattaatgtatataattgtaatagctaaccgcaaaatattacccacctccctcgttagttgttgtatctctttatcacccactcttattttcgcccctcttttatttttcccatttcaactcacttcctcattgttgtttccattctactcgctcatattgttctaactcatgttgcctccttacttgtcccactcttaaaatttcttcaaattcgattatataataatcattaggagctttttcgcagtcagccagggacggagccatgcaccctctgcataagagtggccatggtcccccaaatattgataaaacttttaatttgtttattttttgtttgatttctcttttttttttcaaaatttatattttggtcccttcgtaatttttttctttcttttggcctccccctaaatcctatcctcacacttgcccctcttttaaccctcctctccataccgcttttttttttcctttacgaaatcccttttgactgtacaagaatatgcagaacttaaggtgtttagaagcacaagaaaatgttttttttttttggtgatattgaaatgaaataaaaagtattaaattggttattttatatattgtaatacaaaacaattgtaa

SEQ ID NO: 71626 - DNA, 1127 bp, Cannabis sativa
tctttaagaaccacttcatcccaagacgcttctccaatcttcataagagtagagaccttttgatttaccaaactagggtaatctgaaaccacaaatgagttctctttattcagaagctaatggtccctaaggatatcaatactcattccagatccaacaaccatacacctctcttttcgaataagagattgagtttcatggattcttttccatataaaacttggatttcttcccaactccgcccccaagtaggacccacaaggataataatgagctttgaacacatggctaactaaagaatctcgacaagaatgaagacgccaaccctgtttctcaagcaacgcaatattaaaatcatgaagcttttgaaacccaagtcccccattaacctttgggaacacctccagtcccaactcatctagtgaatgccactgtcatttttacccaaattcttctaccaaaaatagtacattaatttttccgtctcgttacacacctttttaggtaaaagaaaaacgcttatagcatagttggggagagattgcaccaccgtttttaacaaaatctctttactaactctagataaaaacttaccgtcccactcgtcaatcggcttcctcacattttccttaagaagcccaacacaactgatttgttgcggttcatagtatttgggagtccaagatacgaacaattctcaccagcttccaccatacctaagatagagcacacacgggccttcacactaacatcaatattcttgctaaagaaaacaagacttggacagatgtacctctaacccaaagctagttcaaaattatgaagcaacgatatcaccctattagcatcatcctgctgcgcttgacaatacaaataattgtcatctacaaagaacatttgggagataacaggtgcacccaagtaactttacaacctttaagccaaccccttcttacatagtcattaataagagcagaaaatccatccacgcataagataaataagtaaggagacaaaagattcccttggcggataccccgagttggagtaatcggccccaaagagaaaccaccagattcgacccaatatttaacagatgagaccgatgccataatcaactccaccca

SEQ ID NO: 71627 - DNA, 1808 bp, Cannabis sativa
ctagaaactgtaagttttataatgatatcactcacacgccgcatatgtgaaattattaaccagtattttagagaagtgaaggctcttgtttctagatttgttgatgcctactcgcctaaaaccccttctccttcagaattgcctaatattttggatcatgttgtgacaaatgtgttctttgatgctcttttaaatagggcattggtgttgttggtgtagtagcggtcggggcaaatagagttaagggtcttcatactgatattttccctgcttcttcagctttggaagtagaagtcagagtggatcttttggttgttcagtgtgctcaacaagctgggtggtttcaagtagttttttatcggattgcaaggttctttgtgaggcgtctaagcttcgtcgaagcctagggtgggaagtaactagtatttgcccttttttttgttttctttattcgatcaaagttgattatcacttttgttggattcttaggaaggattacagtgctgccaatattttagctgattgggcaaaactttctaatttttcaagttctccttcctttaaggagttaacacccactgttgttaacaatttttatgcttgttttgtttcgagtttagtttgttaaatgaagtcttcttctaacaaatatttatatagaacacttttcaataagtattacccattaatagttattaaacaaatttaactatcagtaccaattttaaaaatattaaactagtaaattatgatttaatgacggataatagagaaattgtaatttctatatttaatttaattacttaattaaaaaaattaaaaaaatatttttttacactatatcaaaaatatatttatatataaaatacaattaaactcaaattttttattttatttttttgccaatctttattaatcaatatattattattaagattgcacccataataatatatacataaaaataaaggaaataaaattaaaaatgtctagtgctttcactttctttctaccgggttcccaaacattaggataataggtaggtggcggccgatcatatataaagctgaaagtaaatcaaacgtgggtgtttccaatactagatcttgtttaatattatttattcccttcacttttacaatctattttgtttaattaatttagaggtcatcccaagagaaaatctaaataaaatattatcatgaatattaagttaattacattataagaatattgatataaagtataaattgtttgcaatgctagttattgccgacgattctaaatagtcgagatataggtatacttgactgttttaaattgacagccatttcacttgttttacaatagttaaataggcgttaattatgtaactcgaggaaaataaatttatcccaagtcagaaaattccattttttttataatgagaatactgatattggttgcttcaattttacaaattgtgtgtgatttctgaaatggccaaacttgtgttcaagttttctgaattttcatttcaacctaacaagtaatagtgtatttaactatattatattaaatctatacatgataaaaacaaatttatatatatatatatattacaaattagtgattaactagtaataatatctataattaaataattgttataatttattaaaagaataaatagaatattctattttgttagagtatatactttttattttatatttttgtgttgtgattggattttaaaaatatatggtctcaaattataaatttatacttttttgtgttggttcaatacaaaatttgtgtattgggtt

SEQ ID NO: 71628 - DNA, 1285 bp, Cannabis sativa
atataatatagaataaaaattttatctatatatctcatgcattatatacatatataagtctagtgtagtacaataatacctcaaggaaataagaatatatgctatatatatcttggtccaacaataatttaaatatgtaataatcactcacattttttttttaacaaattgataataatttaaggacttttgtctaattaggtgtatgttaaaattgattagaggacgtgatttagtagatattaaagttcggagacatgatttagtacatggataaatgccacattagcaaaattgacaatttcaatagttcagaaaaaaaaatttaacggcttgaaaagttcaaaagatataatttagtacatattataattcaaagataaaaatcttaattagccttatatataatacatatatatttatatatactttgattctagtatggatactcaatatttatttgacattcgtgtcacaatttttacaggaaaaaaagcttctaattggttataataaaaattcataatcaatgaagaaaaaaatatatgtaaatatatctaaaaaaaaaagaaagaaaatgttggtgaagtgagaattaaagttcaaaaagactgaaaggaatataaggtattgtggcctagctaacgtcttattaattagctactccatctatatcgatatataatatagatatcaatcacataatttgtcaacttttttcttttttcatttatattttttctttcttttatattaaatagacttgtttttttagtgatcaagagaaatttgaatatatgtttgctttttattgaaaaacagatcggactaaagaatattatcatgatgatgtagtcacaactaaatgtagtggcgagtgtaatttttttttaaggtagaggaggcaaaaataaatttaaaaagaaaaaaaaaaaagtggtcttaatgagatttgaaccttgacatttatcataaatcaaatttagtttattcattaaatttaaaagttaatattatatataaatataattttttttactgaaatatatgtttaactaataaaaatgtacgtatatatatatttttttaaaaaaatttttttagaggacaactataccccaagcttctatgtgagtctgcacatatatttccaatgatatattaattaatagtaataataccaagtttttaaatcaatttttttgaaactgttagtaaatatagtgtatattattttagtgtaaatttcttttaataaaaagtaaaatttagaatttagaagata

SEQ ID NO: 71629 - DNA, 733 bp, Cannabis sativa
ggttcgaaacaccagggatcggcgaaccgatccgatgatgtcttgcatcggcacctccgggaaaacccgctaggtctcagtgtcagtggaagacgaagatttgtacggacgaaagtgttggtttcaagcttgtgatgagaggttcatttttctgtttttattttttcttttccttctgtgtagaaaaatatttgaaaggagggaaaagagggtggggggatctgttttcaaaattgggaattattttatattttattaaaaaaaaaaaccatatttcctgtttattgtaactgtgcccctgtgactttttgtattttactctttggcatgttatttgtcttattcttctattttggcatgtattttattctttataccccctaagttaagagtcctttggcaaaatgatcataataaaaacttttattaacatgactttttaaatattttttattagcaaaataattaccttttaaagttaaattaataattaatttaataaacccaattaacattaaagtattttttttaatctgatccaatccaattaaacttcataatttaatatctaattacacacttaatttttaatattaacttaaaaatatgaagaaaaatatctaaaaattatatatcaacttttagtaaatttaatagtacataaatatatcatccttacaagtttaatgcaactaaaagtttaaaataactaaaacaacaacactaccaacta

SEQ ID NO: 71630 - DNA, 1356 bp, Cannabis sativa
cacattaatgatatattacttaccttatacttattaaacatagtttttttttttattctatacaatattttctttgacgtggttctatacaattctttttcttctatacacaattgataactactcttgcactatatttttcattaataatattttattttattttatttttcaaataaatgatcatctcatctcattataaaaaaaaaaataaataaatcaacgatcttctattttgttgtttatatcaaaatttgcaaaatatcatttctagcctctacttttcatccacgtgtaaatcatggacgatccagaacatgacacttgttatcaaccatggatagcccataacacaattcgcacacttgtcacattttaattgagtcatgttttatgagtggaaacatcatgcattattggttcacccaccttccttccttacttcctttactcttaattttcataacaagtttcaccctttataaatggccacctctcccaaactgtctttcaagcaacaacaacaacactttctcttaatttttcagctaaacaaacctccaagaccaaagacaaaatatttcactaaaatcacaaacagttctcaattactcttgtttgacaagaaaaagaagtaatggcaaagacaataatgaagatgggatgtttggatgcttggatagaggtggccccagctcttctaattcctcattgcaagacttcaaattctcctcaattggaaaccattacagaagagttggagcttgaggagtacgaggatgaatagattttatgtttaatttgtatttcaaatgtagagaaacaaaaagaagaaaaagattaaattgtaagctccaaaattaatggaaatgctttttttttttttttgatcttatctggtatacacgatactgttgtttgcattataaaatacgcccaattcaaacacttattgggatacttgtcttgtatatctctcaaacttcttaatctcaaaacactacttattggtttcaatcaatatgctaggatataatttaaagaattggaataagaaatataatctttcatgtcaagcaaagcaataacgatcatgtatttgacagtctcttaatcctgtaattagttcttaaacattttagggaaaacaaaggatttaattgaagaccattttgtcaaaatatttgtatattatccatacacatatattgtcaaatatcatttccaactttttttcatcaatttcgtttatagtttttccacccaatttattttgttttttccttatgtttttcttaatatatatcctctatctcaatatgaatatatttatatctaatgtctttctctgttttt

SEQ ID NO: 71631 - DNA, 722 bp, Cannabis sativa
ttgttttattttgttactaattatgtgaagaaaaaaaaatattttttataaatattaaattaatattgaaaattaactaatttaaaataactaatctaatttgtatttttggagattgaattaaattaaatttaaactattatgcaaattaaattgaatctaatgtatcaaatttaaatatattaaattaaatagtacagattaaatgttcttattccaatctaatcaacgacagataaggcaggcaaatcaatttgcatatactcacatgagccaaattattttcgtgacaataatttataaaaataaaatgagtaactttatttgaaatagaactttttttttatttcacttttaaaaaaaaaagaaaagaaaaaaaaaaagaaagaaggaagaattgcacatgttgaggtttaagtcatgtggtgtctacgtttcccccgctcgcatgtgcgtttgtctcactttgcccctttaagatatctgaatagtactatcaaaaatttaaattgttattgaatattaatggtgtctaatatttttaaacatatcatttaaaaataattaacgataatttgtaaaaattattatattaaatttatgagatttgatatttaattaataattttaacaagagaatactaaacactacgagttagggttgtacataaatttttataaatcgcccaaatcaaactgaaataacccgataaaaaatacaa

SEQ ID NO: 71632 - DNA, 1582 bp, Cannabis sativa
  modified_base (723)..(726): a, c, t, g, unknown or other
caatgtaaggtttcttgaattttaaatgtgtttaaattctattgttttagaaattcatatttagggtgttaaataacatacatggtagtaaatctagatcctagtaaaacaatctccaagaacttgttcgcaacaacaagttgcttatttacttcgcccaactaatggctcttctaagcctcttccattgccttcttaaagtcattggtggtcgtggtagcctttagagctatagatttagcttgagagtaggtataggccaacttcaaattaacgtgcacaaaagaataaaattaaaacttatattttgccaaatccgtacaaagaaatctatagataaaacactcactcaataaaatcttgcatatatcttaaagattatgtaaatataatattcatcatataattggctgaaatataataaaagagatgaatacatattcatatatatatatatgttcttttgttctttgaggacaataaaaaataatctaatattgatatagattttgacaaatatttcctgaagtaaatattttttatttgtcaaaatgttgtatttatgtgaatacaactaaagtatcattaaaaatgattattattgatgcaattttatagtgtgttttgaatacccaaaaaagactgttaagaaaattacattgaaacatcaaagtataagaataacaatgaacttgactaatgttatttaaatacatgagacannnntttattgttcatcattccctgcagtgaatgatacgaattgaattcaattacttttaaagtgtgttcacatctatatattagccatgttattatacattattattacttacaatatttacattagaaattattgcatgtgatatatattaaagatcaaattttgcatacatcttgaagattatgcaaaaattatattcatatattctttgaaatattgtaaaagaaattgctgaatcatttcttatatttttatagatgaacaattaataagtttttaagaaacttataataatgttctacttgttcaacgtcattctctgaagatatgcaataattttaaataatcaatgacattgtttactactcaaatatttctaaaagaaattggaaacaaccagaagatgaaataccacacacaatcaaagtgcataaaatctatatatcatgtgtggaattgaataatagtaatcatgtacctacagtacagacacacttataatcaagataaaattatatttaattattgaatagaatgtgaactgtacatataatttagtatatcataaatttattatacatttagaatatttaaaaatcattccctcaagagaatgagttgatataaaattatattttaaagaatatagatcttacatatattggtaatgccagaagcaaattaatatatatattttattatttcttgaaattaatagttttaaactattgttggtacaagatatgtatatctacatttattctttaatttagtttgtatattcccagaagtgaatatataatttactaatatttgttagtgatccaatataatctaatataatcaaagtgataaaga

SEQ ID NO: 71633 - DNA, 1413 bp, Cannabis sativa
ttttctatgataatgtatcctcttcgtaactctgaattataaagttctaacttacttaaaagatgactttcacactgatgcatgtagctctattcttgtacatgagcttgaaacaatgctacacaaaaagaagctcaaacattaaacactgattgattaactagaatatacttaggaagaattgattatttttctctctagaatatacttctatgaactcaaaacagaagtctatttatctagctagacacaaaacagaatttttaaattaattgacaaatttcttaaattagacaacacacatatgatcaggtatcaaacctaagaacaaggaaatttaagatttttggaggaaatcaaagttaactgaattaggtgccttagtgaaaatgtcaacatttcatttatgtgttttaatatattccaagacaaggactttatcttttactaactttcttataaaatgaggaccaatgtgaatatgtttagtacacaagtgttgcacatatttctttaaaatattagtagcacttgtgttatcaaaaaagatagtcaaagtgtcaagatcaaacctatataatccatcatcatttgcttcatccacaaatattgaacacaaaaacttccaactgcaatgaatttagcgttagttgttgatagagaaatcgaattctactttttgctatgccatgaaacatgattgtttcccaagtagaaacaacctccactagtgcttttcatttcatcaatattttctgcccaatcagcatcactaaaataaaaaatattagcattagtttcttttgagtacaaaataccatattcaacagttccatgaatataacgaatgactcttttaacagctgttacatgagactttatgggattttcttggtacctggaacacacaccaacactataactcaactcagttctactagtagtgagataaagaagactacgaatcatgctcatatatagtgtaggatcaaatttgacaccattttcatcattggacaacttcacagttgttcccattggtgtttttgcaatctttgaacttttaaaaccaaactttttcaccaaattgctagtatatttgttttgagaaacaaaaataccctcatctaacagcttgacttgcaaattgttaggttgtttttaatgttacttttaggttaatttttagtgtgttcttaatttagttttaatcgtgtttggagaaattttatattttttatgttttatttttttcaaatttaaaatagaagaagattagaaaatatcaaaggaataagatagaaaaaatataaaagaaaacctcacaaaaagaagatatataaaatagagaaaattgtgtaagaaaataaagctgaaacttcaagcctgaattcgactatgttttgattagat

SEQ ID NO: 71634 - DNA, 1567 bp, Cannabis sativa
ctctctccaactcgcaacctccctatctctctctcacccactctccactcacacccacacacactctcactcaccaccactcgcacaataccctctccctcacccccactctcatatcatgctcaaaaggctccattactcgtccaaaggctcctccactcgcaaccccacttgcacacttcaatggtcatagcgttttggtcataactttttcgatatatgtcagaattggacgattcaaaatgcgttggaaagataagaaagagatttatggatttcatgtttatgacatgatctaattctaaacgcatcattataaaaatcctccaacaattgccacttagtaagttggtcttactaactctaatcgtacacgatgacttccatcgaaaatacctcaaacagtcacaaatgcatgatagaccttttaaaatcttcatagagtgatgtatcctcctttgttctttcccaacttacccaacactttgcttgcaggaaaacatgagatcgatctccaaaatgcttggagaagtctccgaaaatcgtaaatgtcgattcttgaagttgacaccgggttaaccattgactactctcaaaaattagctttgctaacttttgaggttaacaaaatgatgccatacattggccaatttttcgataatatattgtacaaataaatataatatatattagatcaataactttattagtgaaccagaaaccctaatctgaatctcaattctattccaattttaattaaaccaacaaaaaaaatacgcgcaattgcaatgttggttttctaattagaataatattaggatttatcattcatataacgtataaataaatacacatgtttttttaattcttgtctgttatcatgttttctctgtaagttctcttgatcgttttattggttttgttattagtcattgtagattatggcttctagtagtcctgtggttcgttgttatggattttctaatacacaagtatacatagtcgaatcaagtaatagactcacaagagtgagattgatcctaaaaggactatagttaaataccaagcaattaaattcttaaattctatttggcgataataatgattgagaaaagaaagttaaaatatattgaaatagaaaacaaatagattaaagcgaaattaacaatgattaaagcttagagtgattaatttcaattgaatctactttatatagtttaacataatttaatactcaaatttcaattttcatgtgatagtaaatttactaaaaaaaaacttatattgaggctaggacatataaatctcaatctatatacaaatttttcactctcgtgataaatttaaacatataggagaaatacaaatcctaaatgctacataaatcatataggtactctcgtcctatattaaaatctatgtcactatagcataatcaaaacttacttttcaaatttcctattgatatcttaaatagttaattgatggtcaaataaataaaagaaattaagtacgaatgaaataaatacacaaagaaaattgggaaagaattgaatcacattaaact

SEQ ID NO: 71635 - DNA, 647 bp, Cannabis sativa
atacacttaatctatttatttttttatgttaagttctgattgtaaatttaaagtgtcctctaaagaatttttattaaatgccaagtaggactcttacatgaacagacgacatgttttcatttgtcaaaattattttaattatttaaatgttgtaaaaattatattaattcatttataaattttttaaaatattataaaaataaaaaataaaataaattcttctctttttttttcctttacttttctctttcttctttgacattatcattgaccttcggacctcccaatcctcatctccaggccaccaccttcctttcccccactgccattattattagtcccgacacccttgagaaccctagccccacacgttactaaccccagtctcgaaaacccctctaacttcctccctcaaggttttgtcgcaatgctcacagagtttgggttgcgagatggtcagcgatgaaggtaaggtcagggatggatgggtcgaggtcagcggacaagtcaagtttgtgttcgaaattttaatagtgtgttgagtattgttcaaaataggccaattaggattttttttcccctcgaactttgacatgtattaaatcatgccccctaaacttttttagtcgttaaaaattccccctgaa

SEQ ID NO: 71636 - DNA, 1103 bp, Cannabis sativa
atgaagtagccagagtgacgtactgatgtataagatgtataagagccattataagagccattataagagccattattccaattattccatgggtgtaagggcccaatggaggcttgaagtggggacgttacacatatagttgtctcattgtcaatcttttggacaaggcaagtgttaaaacactctaatagttaacggtttgaccactcgactaaatgtttcagcgaaatcaaatccaggctgctggtgaaagcctttggcaactagtcttgccttatgcttgttgatagtgccattaggattttctttaataatgtaaacccatttacatccaatagccttcctgcctggtggaagtttaactagtgtatatctttcatttcctgttagggttaagatctcatcagccatggcattgttccactgtatttttttgcaatgcttcttgaaatgttatgggaacccttgaaactaactaagtttttggcttgtgcatacctgacttcgacttgattttcatagtgtgtttgttgtgttgtttaggagcattttggcaccgtacaatgttaagaagtagtgctagtattaaatgagcagtgtcaggtgatactgaagatggtgccaggtcagttgccgattttgcttgtagtggagtgctgttgagaattgaaggcaaatatggttgaacaactggtgtgagatcatcatgtaagataggctgctcattaggcacacatttctcattttactcagactgctcattaggcatatcaacacattgtcatgaagatttagctacatcaagcacagatggttaacttacatgccaactattagacataagatcaagagtattgttgtttgactgcacatatggctcattactatcagttaaaacatgttggtcaatctctgtattggtatttaatagatctgtcgtagtgtatggtggtttaaagtgaggacacataaggataatagctgacacaaaggaagtttttggttgctgagaggaattatgactagttttgagcactaaactattcataagggaaagaaaattccttaaagagaatatatcttgaaatatagagtttgccatt

SEQ ID NO: 71637 - DNA, 1120 bp, Cannabis sativa
gccaatttttccagtgaattttatgttctccattcttagatccccaccagaagttagccatctccttatcaacaaagttacagaaagagtttgggagtttaaagaccgacatggaataggtagggatggcttgaataaccgatttgagaagaatttctttaccttccttggaaaggaaatttaccttgccatttggaaaggtaagactaaattctgtcttacagggggttgaaagaatggtttttggatctaccaaaacactgaggtaatccaaggtatttgtcaaggtgattagtagaaggaatttgcaagtaatcctgaataagagttttgtaggtgaggcttgtattgggagaaaaaaagatggaggaattctgaaaatttaccaataattcctcttccttgtgtagtaactgacctgtgccactttactatggcagtggtctctaattttggagagctctgtgatttccttatggcagaggtcacctaaggcgactcctaggccagaaatgacttttctcacttgtttcttactccttgatgtcgtgggaacccactcgaacaaatttccttccatagtttgcgaggagtgacatgtgccattctattatggcagaggtcacctaaggcgagttataagccagaaatgacttttctcagttgtccattacaccttgatgtcaagggaacccgttcgaacaaattttcttccatagtttacgaggagtgacatgtgccattctcttgtggcaaaggtcacctaaggcgatttctaggtagaaaatgatttttctcacttttcctttgatccttgatgtcgagggaacccgtttgaaaaaatttccttccatggtttgtgaggagtggcctgtgccattctactatggcaatggtctccaaaactggagagcacgaccattttcttgtggtagtggtcacttattccttttgtcttgtggttttagtgctattttaactttataaataaacccaagtcattctcatgcccaaacaagtcaattccttattattttccttggtgaattgaggtctctatggtgaaaactctcgcgcgagcccatgaaccctagtttgggcatacttgggtgtgtgagtc

SEQ ID NO: 71638 - DNA, 1133 bp, Cannabis sativa
  modified_base (242)..(242): a, c, t, g, unknown or other
actgatcggcacccaccaccagcacggtcgcgtcagctactgccgctacatttgcagcttcgttgttctgagcagtgccacatcccacattggcgcaaccttggtggtaactagttgttactaaggccgccaagccttgtaaaggagtggtatatttgcatggtgtgcctgccaaaatatatgaaataagttactttatagttattcaaaggctaattagtaattttttttcccgaactttnacatataccaaatcatgccccttgagatggctgttaaaaattctccatgatttagtacatgttaaagttcacgggatttaacgttcaagtggcatgatttagtacatgttaaagttcggagagaaaaattgctaattaaccttattcaaatgtaactttacattttgttaccctattttgaaaatcctattatgttaagtatcttattgttgtgtaccttcgtaatttccaatcatggttttggttacatttgcattgggcccaataacagccaagtttttgatagcagtgttagaaagaggaagcgacccagcactgttcttaagcaacacaatgccttgccttgcggcctcacgggccagctcttggttggcctgactgcacacgtcttttgggcctaaattcccgaattgttgctttcttggatcgccatcgaagaagcccaatctcatcaatgtggcgaaattgttcgatatggccttgtccaccgcagcctcattcaccattcctcctttcactgctgcttctgtatgttttcccaagaaagatccacagtccaaatccaaacctgtacaattcaaacaaaatggtaaaatttcaaatctaccaatttctctttctggtttttaaaaataccactttaaaaagaagaaattacccgctaatatagacttggctgcagcttcttcgggtgttttagtgtagtgttggctcgtatacaacacatccaccgagtcacaatcagaaacaatgtacctacaccaccaacccaatgttttatttaataattttattaaagtaaaagttagatagaaacgtaacacaaaaatcaaattggtatccagctatctaataacattaacatatataaataaatatacatgaaattta

SEQ ID NO: 71639 - DNA, 1577 bp, Cannabis sativa
  modified_base (40)..(59): a, c, t, g, unknown or other
ttttagaagttcatatgtaggttgttaaatcaacatactnnnnnnnnnnnnnnnnnnnntggtaaaataattccaacagggtcgtggcgcgggaagtcgttctttgttctagaaacagcaattattgcctttgtattttcctaccaatatcagtgatgcacacaactttagaagaactagctatttaaattgtagacctgaatgtacctacaagggtcaacatagggcaagtccccaagtctctctctgtctctctagtaaaggccatgtacagagtgccaacattcccagaacaagtaaccgtatgcaacgtgcaccctcccaactcctcaaaaactacatcaaataaacaacggtaaagaaaacttaccattcgacgggcgtaggtgacatgggttatggctgtgttgcgacgtgtttggtgaaatgtgtttgggaatgatgtagtaagagaagtcttgcaagacaacagaagggatcaagccaaatgccaaaacctttttgtgatagacacgaaaaatgtgaaatttgagttggttgcagtaagtatttattgagcaccaagcaggggtgccttccacgaggagcgaacaatttgaattattcaccgaagggatgtttgacggttggatgaatgggaagttaagaagatttatcggctccctacatttagcttccataattgcatgcttcatcaaaagtgctccgtaagtgaagagtttgctctttctaattgccgctgttttgactactcacgaaacacgcacccaacacgcgcgcgaattacaagagtcagcatttaaagttctaacagtaaacaaaagaaataataccttctaacgttgacacttcagttggcggctactgggataatgtaataaaaagcttggatttgtcccacttgcctagaatcaattaggaggtaacattgcaagctctcgaatcttgttacgtcctgaaagcatgggggtaaatgttgtgtggatttctctaagcttgacaagtggatttgaatcaagaaaggttaaggaataataagttgatcaactccctttaccaatgttgggaagacaagggtcctagctcgcggaaagggcttcagttattgagactcccctgccagtcagtgatcattgggatatcacaatctggattgttccccattctcgagaatagaggccatctactcccgtaggatttaagtcaagtgctcctgcaaagggtatggattttaccccagatgaccgaagctattttgaaacgcgtttagccaatctacaatctcgttccacagaggctttgctcctacatgtcagactatgaacttagtagccaggcttttttaagtacggtgtcagggtttttcccccataatatgctacagtacagaccgcgtccaattgtacctgctgaaggatcggacgaccattgataagtgaaattcaaaaaggaaaaccctgggacgacacgtgtatgatgcccgacctgtataatctgacattcttaaatgacatatggtgaaatggccactgttgggttttatgccataaaaaaactctatttcaatgtaatccaga

SEQ ID NO: 71640 - DNA, 1781 bp, Cannabis sativa
agtaccagatatgaccttgataaaactcactaagaaggatgctcatggtgagctgggcatcccaagaattgaaaatatcatggacaacatcaatgtcccattctctaatgttgatcttcatgagctgatatactttgctatgaaataaactagggtgagtagaagtgacacaaggatgttttcagatgggagccaaggcgtattgaggatatttgtattgaagcttgaaccaatacgaatcttggcttttgccttaaccagatcctgggactcgaagatgcttttccatatgaaactaggtttgctcctaagagaagccgatagaaaatcaccatgaggatagtatcgagtcttataaacacaaccaataagagattgctcattgagaaggagacgccaaccttgtttaccaagaagctacaaattatagtcatgaagactacgaaaccccattccacctacatctttatgtttagtaaagcgcttccaactcatccaatcaattccacaggtgttattggaagaagtgctctaccaatactttgacctaataccctccaacttagaacatgtctccaaaggaaccagaaaaatagacattgcataactaggtagagcttgagcaacgattttcaataacacttcgcgacctgctttagacaagagtctgccttcccaactctgaattcttttctgcattttttccttgagaaagcccaagattgcatttttatttcttcccatcgtataaggaaggcccaggttagtacaattttcatcagcaatctccatatgaagcaaagaacatattctattcttcaccgtatcagtggtgttggtactaaaaaatatagaggacttactaaaattgacttgtttccccgaagccatcaaacaactgaagaagtctcattatattagacgcttccctttcattagcacgacagcatatataattatcatcagcaaatagcatatgtgagataacgggagctccattggccactttacaaccttttggatgaccgagactctcaaattgcttcaacaaagatgagaacccttctgcacaaattaaacatagatagggagacaaaggatccccttggcagatacctcagtgtgggataatcgggccaaaaatcttaccaccatgaaccacattatacaccacggttgtgactgtttgtagaatcaattcaacaaagtaacttgcaaatcccatacgaagcatcatggcacgaataaagtcttgttcaattcgatcatatgctttacttaagtcgagtttcagcgccataaagccctctttgcctttgctcttttaaggtagtacataacctcaaaagcaatcatgatattatcggagataagacaacccgagataaaagccaattgattttcagagataatgtgaggaagcaccacctttagcctatttgcgagcactttattaataactttatagagcacattacaaagtgagattaggcggagatcactcatcgtaataggttgcttcttcttaggaatgagcacaatgttggtacgattcaaaccagcaggaacagagtagttagcaaagaaactcttgacctgattaataacatattgcccagtaattgaccaatacttctgatagaatcccaatgtcataccatccggacctggtgacttgtcgggatgcatttgaaataaagctttcttaacttcttcatcagtatttgggcagtggaaagattcattttcagcaacattgatagaaggttcaatgcccataa

SEQ ID NO: 71641 - DNA, 1122 bp, Cannabis sativa
  modified_base (1069)..(1084): a, c, t, g, unknown or other
cagatacaatatcgttttcctagaaaacacaagcaatttggtggaatcaaaggtaaatattctgtagctgagttaaattggtcaaataagagtatattttttgaactagagtattggaaggacctgtctctcagacataatcttgacataatgcatatcgagaaaaatgtgtgcgacagtgtacttagaactcttttaagtattaagggcaagtctacagatacagacaaagcaagattggatttggaggaccttagaatacgtcgtgagttgtggttgtttgaagaacacaatggaaattagaggaaatcgcttgctagttacacgcttagtcttcctgaacgacgtaaattttacgaatttgttaagtctgtgcagttcccaaatgaatttgctttaaatttagagaagaatgtgaatgagactaaagacatgatttctagcctgaagtctcacgattaccatgtgttgttacaatgcttgatgttggggcattataaagttttccaagaaaggagttcagtataattgaactgtgtgtaattttccaaaaattgtgctctaaaacattgaatgtttaagacttgcagatcatgcgaaaaagtattttggatattcttcgcaaattgaaaaccatttccccatcagtattttttgatataattgttcacttggtgatgcatttacctaaagaagtgatgcttgggggaccaatgcacttcagttggatttatccaattgaacgagccatgtctgtgtacaaataatgtaaaaaattgatctcgaccaaaaggatctatttgtgaagctatgcatttaacgaagtcttaagcttttgttcaatgtactttcgggaggttgaaactcgattcaaccgacaagatcaaaatagtaatgtcctcccaaataagcctgaaagggaattttctgtatttaagcatgttgggcgaccaattggtaagaggaccatcgtttctttaccaatgcaagagaaacttaaggcagaatggtacattctaaataattgtaatgaagtggagaagtatatctgttgggctttgtgccctannnnnnnnnnnnnnnnaatgtaatctctatcatttaattatcaataaagagaca

SEQ ID NO: 71642 - DNA, 1090 bp, Cannabis sativa
ataaatcaaataaattctcatataatgaactatataataatataattcctcaattattcataattatcttattagggttttgctaatctattttttaaatccagggtacaactatgctttagatttatccttactacatgaaataactaagtaatagcgatagtaaacaataattctcgtaagtcaatcttgccaaacaaaaagttactaaggaaacaaaagcaatcacaaaatcaataacatttccaaactagggttcgagacatctccccaaccctaacaagaacttggcaatgccaatacatgcttaacatatcttgcccacgtacaaatcgtgtgagttaaggaagttttacttgtcctataacatccaaaaataagtgcaacaaaataataatgagaggtactattggccccaaaaatatctattagtggcatatgtagtaaaaacaacaaataagaaggcaatttggccagtctcaaggggcaagcttcctagtgtccaagtgtcaagtcctggtcttatgtctgcccaaattcagcagcttgatcgaactaagcctctgcaatttctgaatctccttgtcggatagcttgttctcctcggttggaataggcagataaattccttcccttagaaccgaacttgagagtttccgacctcatacggctcagcagtcaagttattttgtttttatgtcagcaacagaagcccaagctcgtagacttgttgatcttgtagcggttgaataaaagaagaacaaggatttacaatttgttatttttattttctctttttactaagtttaatataataacaataaaataaatattgtatttgatgaatctattaataaaataatgattcataatcatccagttaggatctatctaaaccaacccattatgtatatgattcaacatgccaactattcaacaacatattagaaatctatgaagatcgaatttgacctcaataggagaatcggtgttttactaccagccacaagtttcgtgttaaacgcagtactcatactggaagttataatcaaggattagtgtatcgaccactatctacttcagaaatccc

SEQ ID NO: 71643 - DNA, 2286 bp, Cannabis sativa
aaggtactaattattgaaaaaaaattatgagcacgtttagtatgttgtataaaatcgtattaattatagtttaattatatattatattatcttaaattttaacttttactaaaatgttatatatttaagagtatctgtaaaagtcaatctaccacgtaggtataaaatataattcaatataatattatacaatataatataatataatataatataatatagtgttaacgaatcctatatatctcgtgttttatgcacatgaataattatataattctaatttttcatatgcatgtcaatgaatattgtagtcaggattcgctctaggcatagacgggctaggtccatgcctagggcctacactttttaaaggccgaaatcaaaaaaaaaaagaaaattattaaacttttatttaagtaaaattaagtatattataaataccaaatatttatattttagtcggtttgagttattgacatattataaaatattataggttcaaatcatatgtttataaaagtgaggacactaaaatctaatttgtatgtgaatatatatatatatatatattattacagtcatatttaccatcacaaacaccaagtgggctaaaggaattgagaaatgaagaactgaaaagattgagaggaaatgggaaaggagagagaaaggagtatgagagagtgtatgattatgatgtgtataatgatcttggtgttcctgataaaagttcagacctcactagaccagttcttggtggtcctcaacatccttatccaagacgttgtaggactggtcgtcctcaaactaaaactggtaattaatttatatataatttcaaacatatatatatgtatatcacatattatttttgaaaaagtcttatcttaatcctttagactaagctcattatctttcaaaagagttgttctagtaaagaatttttagtcatttaagtgtgtttataagttttatgaaaattctaaatagtttatagttttttaaaaaattatatttataaaaaaaataataaagaattactaaaaagtagtaatgatgtctagtatctttctcggtgttttattgttattagtaaattgagtattgagtctcctataacttaaaaaaaataacatttagggaatatcattaactaattgtgagacgccacctatacacgatgttgagtactactggtgcccaataacaacgcttaaaataatatcacacatataacaaaatatttcaattttatttttgatactatgctgtaaaatattcacatttttttaaaaatgtagatgtggtgtcttaaataacataattaatgtacacaataaattatgaaaaaaaaaactaaatgactagatcaaaaccaataaaagtataccagaacaacttttttttttatagagcattgctataaggcaccaatggtgcttagcaccttgccgacaagacgttgcgattggctagcaataccacctaaaaattattatattaaactatatgggacgcgatatttagttggaccaatagcgatactgacatataggaaggtgctacgcgccactggtgccctttagtatttctcttttctataagacatttacattatttcactcattttgtgatcgtggaattaatagttagattgattggacgattgttaattattagcttcataaaattaatgcatgtatatatatgtacagatttatcatcggagtcaaggagtaagactgcgttctatgttcctcgagatgaaacatttgctgaagtaaaacaaaatgatttcgcgtcgaggagaatagcattagggattaaaagcctaattccattcttagaaagcaacatgtttgatgaaaaattcccaaatttcacagatattgacaaaatgttcaaagaaggttatgaaatcactgataaatcgatctcgggagacaagtcaatcaaagaaatgttggcattacatgttggaactaaactctactcatctgttttggttgctgaaagccttgttgataatgttattaagtttaaacaaccacccactgctgatagtaagtacaaattaatattattttatttcattgaattatttatcaaaatagcctaatttttataaaatattatttggtcaattaatttaaagagttgattttgtaaaaaataatgttatttaatttaccaaacatttaattaaatatatgctaatctagatttttttaatgttaattaaatatagtggacaagttcttttggtttagagatgaagaatttgct

SEQ ID NO: 71644 - DNA, 1714 bp, Cannabis sativa
agtttggagactgttccaactgagttgctgccttgtttggtagcggatgtaagggtttaatttcaataataagatgaaatttccattcaaaaaaaaaaataagtcagacagaaaaggaaacaatgctgattttagaaaacaaaaggaggcgtacagaaaataaagagcagagggggtcacgtgtggtagatgacactatggtggacaatgttgatgaagtcagccataaccaaaaaaacgaagtacaggtgggccttggtgtgcaggcccaccaatcatcatgagtgtcttatcctggaattgccatgggcttgggaacccatgggccatacaattcattaaggatttaattatccaaaagaaacccaatctagtttttctatgtgagactttgtcaaagaaggaaacaatagaaaagcttcgtattgcaattaatttagatggtgctttctctgttgatgctcaagggaagagtggtggagtagcgttgttatggagagttgacggggatgttaatttgcttgggtttggtcagaattatattgatgcttcgattgtgggaggggataaaggttattagcggcttactggactatatggggagccgaataggagtttgagaagaaacacttggactctcatgaagactcttaaaaattgttcaacacttccctggtgcattgttggggatttaaataatgttacttctcagactgataaaaggggagggcatccgtatcccaactggttagtggaaggtttttgtgagactttggatgcttgtggattggttgatttggaattaaatcgctatcctttcacatgggagaagggcaggggtactaatgcgtggattgaagtcagaattgaccgtgttgtggtgtcccaaaactggttagatatgttccccattgctaaattgctaaatctagaggtatctacatcagactattgtcctctgttattgctgttagataatgtaataaaagttgctgccaaccgcttttttaagtttgaaaattcttggctccgtgagccaatgtgcttgcaaattgtcaaagaaacttgggaaagcagtgttgattgtccaattacacaaaagattcattactgtggggaaaaactgcaggtttggggaagagattttggtggaaattttagagatcgaatttaagtccctataaaaaaaaataggctatgctatttaaataaacacaaaaaaaaaatagactgactcgaatatagtacaatacaaatccaagcacggcgcgaaactacgagacttgcgggctgtgtcgagcttaccctataattgtaggcacagttcatattattttatgacacaacacgaccgcataacccataattttttatgacattgcacgacataacctatattttaaaaagcttcagcacaacacgcacttatttacaacacttaaattatatttttgcaaatgaaatataaatcatgaagcgaaatatgcattaaaacaacaaaactatgataattaagtagttttagttagtcacccctgtactgtgatcatacaaaaaaacatttagttcagaagtctaataactaacaatggcaccagttacattacacactaacattcttaaataattagttaacttgagtttcagtagtttagctcaaaagtataaaacatgttgtctaaatatgttaactttcatctcaggttgattactc

SEQ ID NO: 71645 - DNA, 860 bp, Cannabis sativa
tgtaataatttttaaaaagtatcgtaagccaattataagatgatatatttaaaatattaaacatcattagtgcctaataacaatgctcgtcatataactattagtattattaagtataaatattctgatcttatataatttaatatttataaaatataattaattaattataagtcgccacctttaagcatgaccgacccaaatgttcagtaattttggctattatacaatgcctactgctcctattttatttatcatctctttataataagtttttttataatgcatatataataagaatattgttattgggtaccagtggtgcttagtacctctaaatatattgtctagagattaattaacgatactccttaaagtcattatattaaactatatgagactcaatacttttttgaactaataacaatactaatatatagaaaaatgttagacacactaatgccttttagcatttttcatataataattgttcataacaacaaaatacacacatgattctaaaactcattgtctattctattttttgttttctgtaaaagttaagtcaaatacttatttgttaataatgacttaattttaatttttcgcccaacactctaaactacttgacctgaccctacctctaggtagtgttgggcatattgatatagtattagcactcaacactacatcaatatagtgtattgtgattttgtatattatttattaaatcaaattgtgttaaatactatttcaaaatacactaatgatatatcacatctatagtgatacttatttttcatatcatatatacacaaatattgaatttattggtattgttatatatatatttccaaagc

SEQ ID NO: 71646 - DNA, 632 bp, Cannabis sativa
ggatatactttggccggagaatccataaactagttgtgggcatagaactaagtctttgagatgaagatttattttctcataggtggttttgaataaaatgttggacgaggctctgttgtcgatgattgttcaggccaccattttgtttgcgatttgcacctctaccaccaggggatcgttgtgtagatagctcactactttggaatcctcatcgttgaaattagttattatcgggccttttttctgtgcatgcttgggtctcctttcttcaatgtccaagatttcttctccttgctcgtactaaagagtttgactgtaagtttctctcgcattcttagaatctcctacaatgtgcgggcctcctatgatgacttgcagatgtccatcaacaagtcgtggcatcagtgggttttgattatcatcctacggggcgaccctttgctcttggtcggtctttacatacctcctgatgtgcgaattatttttctgaataagaaatttaatcgcttccttcaaatttttgtactcattggtgtcatggccgaaatccttatgaaagcgtctatacttggaatggtccctcttgctcgcatcattttttatgggtggagatctcttgtatgacattaacg

SEQ ID NO: 71647 - DNA, 974 bp, Cannabis sativa
  modified_base (549)..(572): a, c, t, g, unknown or other
cccggacccaggacctggaccagggcccagacctggactcggacccaggacccagatccaagactcggactcagacccagacccgaaacctggaccgagacccaaacccaaacttgggacccaaactcggacccaaaagctggacccggaccaggacccaaacttggacccgagactcggacctggactcggaccagagagtcagacctagacccataccgggacccgagcctgggagtcggacttagatccagacccgggactcggacgtgaacccgagatctggatcaggacccgagcatggacccaagacatgggacctaaacacgaacctagacctggaccgagaccatgactcgaacccgaacccatacatagacctggaactagacccgaacctggacctggattcagacctagacccagactcgaacttgaacccgaacctgggatcggacccggacctgacccgacccatagttagtattgtggtcaagtgtattgaaaatatattataactttactcaatctattaatacaagtcaatannnnnnnnnnnnnnnnnnnnnnnnatactaatacaatacaatacaatccaacacaatacaatacaatacagtacaatctaacacaatataatacaatacgacgtaccaaacgagcccttaatatataacttccatatgcaattactctcttagttacatatcaccaagcataattcataatttttaatttttaagtcctcacacgttacaaatgtacgtgatccaaaaaaagttttttagtctaatatttttacataatcgcgtattttgtatttatttaggatcacctataaatttttagaaaattttaaatagtgtacaatataaaaaataagattcaaataattacttaccatgcctataaaaaaaacagtcacacgtgcaggggcggagtcaccttatacaattgggtggccctgcgccccc

SEQ ID NO: 71648 - DNA, 1100 bp, Cannabis sativa
atgtgtgttttctctcacatagaacacataaaattataacatttctgtaactgtggttctatactcccagtggaaatgtggaagtaatggttagtccaattttgttttaaaactatctctttttatggcaatttgagaaacttaatagttatctttttaggagtatagcttttcttttatgtgtagcataaactagctaattaaaggtcaaaatttaagtcagacacgataatacgatttaaaataacatactttaaaatttaaaacttaagtaagtactttttgagttgacaaaattaatctaaaaatatcacgataataacctaacaaaaggatataaaaatcttaaattatatttgttatatttattgcatgtaattttttttttagttcaagaggacataaaatcttaaattgctcataaaaatgtcataataaaattgtaagcatgtcaagcttgttataaacatattagtgagttgataagtaaatcaaaattaagcatgattttatagaataattaatatttttgtcctttgaatttttgacactacccgatctcttgcctcctaaaatatatggtttgttaaaaatttcttttaaaatataacagttacatcattatgctcttcttgttaggttttatttcttttactgttaaaaattaatttttttatcccctgaatcttgatcaatatattttttctccttttattaaaaaaatacttttaaaaactataatgttctattaattttgaaaaaattaataaaattattaaaaaacttgataaaaatattaaattaatttaaaatatattaagtttacttaaaaaacttattattaacatgtattttacaaaacaacactaaaattattgagaatccaataaataatttaaacaaactattatttttgatgaaaaacccaaacttatttatattataaactcatatcttaaaaaataaataaatataattaaaaatgcaacaaaaatataaaattacttcgtaaaaaaagttaagaaattaaactaaaaagatattatgtttacttaaacaaatcttaatttttggggaaaaaatagattcaaacttgttcc

SEQ ID NO: 71649 - DNA, 1146 bp, Cannabis sativa
atacacctttcataaaattttatttaaaagaaacactactcaacgtggtattataagattatctatcgagatagataatatcaaaaaactatgaaaaaaattccctaatttgatcaattttttaatttttaacaaaattgatgtgaaataaatgattaaatttggaaacatataaaatagttattggaaatttgggttaaattaagtatgaactactaattgatcaatttttccaaatctaatgttatgtctcttctcttagcaatttgtattttcattgaatttgtttttgggcacctttttaaagaaatattgtccatctttatatacccatgatattttctatttttagacaatgtgggactttagctgcacacccaaaaaatttatcctcaaacaaaggaccatcttgcctcccctcaaacgattctctatacgtccactctacctcgagagttcttgctcttttctcaagccatctcttccaaagcacaccgtcttgtctaccagagcacatccacaaatcctatcgtgagattaccgaggctcatctcttttgtttggcatcctgatgattcattcacatgactaattttgagatacgactctgataccacttgttgggaaaatctattgcaattaatcacaatatttgtatgttaaaaatgtgatacttatcaaacatcacaataaacaatataaagtatcaatcaaagtaccacaagcaatagaaaatacacaaaacagacataaaagtgagacaccaaaattttttcgtggaaactcaatgtggaaaaaaaaattaggaggaccatagtccgattaaatcattcattatcaccaatgttcaataatgggattataatattcttctatagtatggctcacagtaacattaagattaagcaatattagatcactgatacaatcatcatcatctcaaaaaaattgatacacaaatagaaaaactttgagtctcaccaagtaggtattgtcagggtcgtcacaaatattttagaggtcataatctaattttaaaaagtaagcccctaacaaaaaaaattataatttacaaataatattgttacataattaagcacccgaaaattcaaataattttattaaaattgttattattttcaatac

SEQ ID NO: 71650 - DNA, 989 bp, Cannabis sativa
  modified_base (53)..(56): a, c, t, g, unknown or other
aggaaataaatgattaggttactttcaggttataagttatttattatttattnnnntttaatttctaaattaatcacaacaattgaatagtaatcaaatggtttaaaaaaatgtaaccatgatggttacaataaaaatgtaactattgaaacatcttccataataaacaccttatatatgattatatatagtcaaacacatttatagtagctatagtactgtattgatcttattgtttaaaaatgatattatactatagaaattaacgagaaagtcgtgataataatattgataatatatataaatctttcctgtagttatgggaggaaaccgatagaaaaaatcaaaaatatgaataaataaataaataaataaataattataccataagattagctttaaagcaattcgaatagcctgatatactatatcaagactcttaaatataatgtggcaatattatattatattcacaatcgaatagcctgcaagtatatcagagtatatcatcatatgcagaaatatgcagaaatgtacaatattatattctttttggccatgttaaccaaatctctaccacttctataaaatctctaccacttctatgtgaaaactcaattgcataaaccaatccttcctaaaaaaacaaagatttaaagttaacacagcaacattactacaaatttattctcttctcttccaacatgaactgaacaagaaaaattttcacacctctactcatgaattagtttggtcctaggcttgggaaatctctctctatataaaacaatctctataaaaaataaaatatgtatacatatagtctcaaatctaaactttaaccaatttcaatccatcataataaaaaaaatggcaataaaaaaaaattctgcctaataggttgaatagtcattctacgaataaattaccccttaatttatatcactatcgacttaaaatccaaccagaaaatttgatcttctatcttc

SEQ ID NO: 71651 - DNA, 1028 bp, Cannabis sativa
aatttatagaggttctacccctttaatgaggtaatgacctactgtccttttgttgtattcactcttgaaataataacatgcagattataggctaaaactttgtaatttctatctatgactctcttcagtattataatgagaagaatgtgtattagagacttgcaaagtgatgagaaggaaatagagaatttaatactttagtacttctgaggtcttaagtgcatgtgtagaataaatgaattcagatccatttcacgtagggttaaggccgtttatatacagtgatggtgttacaagttgttatttgaaatacataaaagatggaaaatatccatagaaaatagggcagttacactctgatgaaattttcctacttttgaggatagttcaagacgtttcgaagttataagagtgttgtggacgatttggagtcttcttataagcccatggaaaaaatcacagcccattcaggttgtcaggataaaagttacgagttggctggccaaccttgtctagaagatgtccggtgtgtttgaaggttgtaagttgtccaaccttctgcaggttgtagggttcgaccttctacaggcaagctgcccaaccatctgcaggttgtaggctgtccggccttttggtcattctgtcagggtgttgtcaatatttgtgtatctctctctttgctcttaacttggaaactgcacggaatgtaccaatctagttgtaatggattttaccacgtgtctggtgccacgtcacgtaggcaaaaaataggataacatgctattttatggaaatcaggtatgtgcttacatatttattcgtggttgtgatgatggttcttaagtttaaatttttctagatccaattattattgtatatatatatatttgttgggggattaatgtgttcatgaagtttgaatattttaaaatatggtttggggtttgtggattaatgtgttcatgaagtttgattgcggttgtggtttttctatattttttttgaggaaatagtggtagtggtaatgg

SEQ ID NO: 71652 - DNA, 1626 bp, Cannabis sativa
ccattctcacttcaagttagattttatctcactatatatagtgtgtgtggtacagaatataaaacatcactatttttaaaattaaattttgtaactgaatttttatttatttattattattattattattaaatattgcaactgaattatattgaaagtcttgctaataatttatgtgtgtaatatgtttagatatactatcctaatgtttaacgtttttttttcactatctatgtatttaatagtagaagattagaattattttaaaaccttttcataaataaaaataaaagtcttgtcgtatgacatgttttgaaagtattttctcaacgttctaagtcaattctagttgttatttttcgtttctatggcgtcaagtagtcaaccggcccttgatctgaatgagcaatacgctcagatcagtttggaggatgaggaagagggaattctgattggaggagaggaggaaggagaggagttagcttttgatgatcggtggtgcttggtggggaagtttatcacgggtaggacattggattttgatgcaatgaggcacatgatggcgtcgctgtggcaaccgggaaagggtgtgtatatcagggaactggatacaaatagatatctttttcaattctatcatgaattggatatccaatcggttgtggatgggagtccctggacgtttaacaaatgtcctctcgttttccattgtttaaggaagggcgaggatccgaaggtagtgcagttacatagaatggaattttgggttcagcttcatgatctaaagtctggttttatgatggagaaagtggttaagagtgctggtgattatgttggtggatatgtcaagtctgacccgaaaaacttcaatggattatggagagattatctccgggtgagagcaaccattgatgttaataaaccattaaaacggagaatgaagatttgcaaggaaaatggtgaatggatttgggaaaatttcaaatacgaacatctcccaactttttgtttcgtgtgtgggatcataggccatttagaacgtttttgtccaaaacgctttgatcaacctatagatcaattgtcgaagccatatgggattggtatgaaggcgcagatgagaaaaaagaattacttgattggagcacaatggttacggacggggaatgaagctaacggagctgttgggggaggtggtggtgcacgagtttctggtgccggaggtgcagcgtctgtctcgcctaaaattatggaagttgatcgtcatgatgatgatgatcatcacgatcccatgattgtaggaaggaatcacgttgatctcgttcaagatggaggaatggatcatggacagtatactggggagggtcaaagccaaatcaaaggaggtaatgtagctgatttaaatgaggaagatttgcttcttattatagataataaaagaagacgtatggggaaagaaaaggtggcagtcagtggggataagactcattcaaaggtggacaatgaggtggattgttatgatgatattgctggatcaaaaaacggactaaaggtgggccatggttctcaggcccacccatcattatgagcatcatatcttggaatttccatgggcttgggaacccatgg

SEQ ID NO: 71653 - DNA, 1901 bp, Cannabis sativa
  modified_base (1270)..(1279): a, c, t, g, unknown or other
cacttttcgagaagaatagtgcaagtgagacactcttcgagaggaagaatgcaaggtctacgatttgaaggtagttcaagatcttgacacttaagaaatttgattaggagtttagattacaacagttgcgacaaattcaaagatgcagtctttatttgtataagtcaattcgattttataatcactttgagattcttctaataaattttattatttgggcatgaccccgtggattagtagcaatttaaaataattactgataccacatataaattagtgtgttctttactaaatctttgttttcacttttggttagttatctgtttaaacatatctctgttctgttcaaacaatctctgtgtctatttaaacatctctaaaactgtacatgaaggaattatttaatttgataatcctaaaaatagaatttcaagtaacatttttttttttttaaattttttggtcatataaatcaaagtaaaattttatttattttgaaaaataaaaatatgttctataaccatttttatttttaaaaaacaaaagtctattttgtaaattttattttcctttttatttttttattttatttaaatctggttcggaatttgagtttgggtccagattccaaagtttaagttgaggtcgaagttcataacattgattaagaaaacaaattattcaaaaaaaaaaaaattgaaaagactttttttttttttttttaagttttgattttttattaaaaaattaaaaagtatgaataattttattaaatatgttttagaaaatatttttatttttttgattaaaaaataaataaaatgttataaataaatagataaatgagaaaaacaaacaagcaaaatctcaatcaatttgttatttgtacatggtatataaaatgttacaaatagtagacaatgaagctataaatattgtagggttggataatagatattggatagtgccctaaggagatggtctttgaccaaaatccaacttgaatttgtaaccacccacccattaccaagtgaaaactcaaaaatgaagagaaaatttaaaaggtaattccatatatttattttcttgaaatggatgtactgatacactatttgttttgtattattttttagttttttttttcatattcatatatattgttgttatttaagatattttacaaaattttgataaattcagaataaattataatgtagaaagcattcactacaaaaaaagctactttaagtgacaattttttagtcacaannnnnnnnnnttgtgactaaatgtgacttttggtcacaataaacaactacttgtgactaatagtatttagacacaagttgtcactaatttacttttagtcacaacaagtattgtgactaagactacatttagtcacaacaaataatttttgtgactaatacatttagtcacggaccttttgatcacaacataggaatgataaataataattagtcacaacatttttacttttagtcataagttttattgtgactaaaaataagattttttgtagtgattgttcaaacaatctatttcacacacgtataaaataaaatagtgacgcgtacaacacactgtttgaattctgttttcaacatgttaaatttatttgaatttttaaaaattttattgaatgtcttaaataactataacgtacgtgatcaaaaatttagctaaaaaaataatttgaaataccaaaataaataggagtgtattgatgcatcttcatcttctttaataagtgcattatataattttcttactttatatattgataagttattatttatttaaaagctttttattcctttacaatatgcacaattgcacttttttatgtactacttggtaaattataattttcttgtttt

SEQ ID NO: 71654 - DNA, 1419 bp, Cannabis sativa
agctccaatgcctaattttttctgctctatatttgtagctgcatcaacattaagtttgaagccatttagtgtaggaggagaccatggaacttgatgttgctaaccagaattcattgttgactgttggagatttgtcgagtctgcaacaggtactggtttgggagctgtgttggctcgactgaagtcattatagaaccttgtggtataggaaatgatagaggtgttatgtcatgatgtcccaccatgaaaaactttgttcctgtttgtccaaataccccataaaaggcatataaaaagctcaaatcctcttgattatacacccctgcaagatatagcagatagtcacccttatacattgattgagctttgtgaaaatcaatcacaaacttagactctttccagactgccttagcatgttgacacccaaaaagcgcatgtcctatggactcccaattcaatgtgcgaagagaacaagcagctgcatctatgattttctttttaaaaagtgcagtagcagtgagaagaatgttttggaggactttccaagcgaagagacgtattttaggtggcaatttaagactccaaaaatacttgcaccagtcacggttagcatctgaactggaagaaacaagttgatcttccaaggaagtggccaagtggaatcctgatttcacattataaataccatttgaggagtgatgccatattagtctatcattgccagcaaaaaaactcaatggaattgttagaattttatcaacatcaatcggcataaaaaactgatgtagtagatctatgttccattcctgattgtctgtgatgagagctgaaaccagcatgtttggaggccagtaaaactcactggtttgaagttggtctggctgggaatccaaggatctaaaccagaagcaatatgaaagccattacccactttaaaacgcaatcccttaatgagcaattcacgtccccaacatatactttgccaagtgtaggaaggggaatgaccaatgttagcatccaaaaaggaggttgtggaaaaatatctatgtttgagaatcgactcaataatgaatcggcatatcaaaaatccgccacgcttgcttggccaagagcgcttgattaaaatttacaaacgaatggaaacccatacctccttcatgcttagacttacataatgaggtccaccgtttccaatgaatttttgtaccattttgattagtgccccaccaaaaattggccatcatactctccaattgggtacaaaacttcttggtgagtttgaaacaactcatagcataggttggaattgattgtaccactgctttaagaagcacttctttccctccaatcgaaaaaaaaatgttcattccaagagtggaggagtttccaaactttttctttgatactactgaacaattc

SEQ ID NO: 71655 - DNA, 2092 bp, Cannabis sativa
tcaagccgagcatctctccttggtggagcatacgtaaagcaacccaaccaaggtcccaagtttgcatcaccaccaaaccgaaccagaattttattgagatcactctcaataacctgaatatcccaaccacgtctccagaagagggccaaaccaccagccgccccaacagaagacaccgcaacgccattaagaaaacccaaacgaaaccaaattccttccatgtccgacgcacttttcttagtttccataagaaaaaccacatcgggattggcattccggatcaacttccggaggtcattagctacctcaggtttgccaagcccgctacagttccaagataagactaacatggaggaatggggggcatgatacggcccgcctcctcagccccaacaaaatcctccaccactttgaaaccatctccgaaaacaatcgcaccaccaccttcttctttttggataggggccgtatccccattgagagacttcttggaggcatctgcctcttctccattactctgatcactatccttttttacatcttcctcattcccaaccccagcatgagaaatagctttccaaggacggtcacttgaacccccttccaacacctctagccttctttttttcccaacaccactagtattatcataagacaattttggcccatcattaatagcaagcatcttccctttaccccttacaggcctagatctcttgtgggccgaaccattccttgaggccaaagtggctttgaaaaccatagccaaatgatccacatgactactatccacctcaccaacttttttaacctcttcctttttattcaaaaaagtttggtggaccccctccgaaaaaccacacgtgttatccttattctccatgtgtaccacattccctaatgtgccatgcacgtcctgcaacgacaaattaccctcttgcccctctccactaccttgaacagaaaccggcaacccgcattcccccgccgcctctccttcttcaggaggaattgtcaccaccgctccctcagacatactatttccagtatctcccttagctgccgccgcttcgacaagggcttccaaatgaatctctgtaccaacgagagccggttcaaagttatcctcccccggaatgagcagagctctagcctccgcttgattttgagcctccaacacctcccgattcattctatcttgttcatatagctcatagtccgaaaaacaatccttcttgcgggatcccagccgaatccacgggccatacatagggactgttctattgaaatcatctgcaatcaaccttctctttcttctgcagaaaagttcctcatgccccacaataccgcacttataacaaacggagggcatattttcatgcttaaaataacaccatagactaacaccttcctccataggtaagaaaagacccacaaacaaaggtttgttgagaggaatgctaacttgaagccgaatatatttgttagtcggaaatccatctcgccagagccgatcaattgacaccaccgtcccaatcttctttgcaatagcattcgcattcttctgagtccagaatcttggaggcacttcatacactcttacccaaatgggagtagagttcaaatccgcagacttccatctaccgtcctccgacatcgccttcaccaccaaaaaaccattaccaatcgtccaggggccattccgaacgatattaacagcttcctgcttcctagtgagttggataataaaagtattagggccaacttcaatcagtttccagccattggcaagtctccacttccttcccagaatagttcgcagcaaaccattgaagatagttctcttagaatacagtttcgcaaccacactcttttccaccacgttagccccaagctccgagttctcatcaagagaaagcttgaaatcttccactccacagaccttaacttgtttttcattcgaactactcgccatactctaacaaatcaaaaagaccccaccagcgctacaaaagaacacagaaggagaaacaaaaaaaccagagcacacaagagaataacagagcagaatatcacacagatacaggggaat

SEQ ID NO: 71656 - DNA, 1322 bp, Cannabis sativa
ataaataaataacattaattataacaatagtaataaatgacaagagaatttttaacgtgattttaaaattaattgtatacagaatacaataaattattttcagaatgaatgataggtataattctctctctttcacaaattggtcattctttgttctctaggttctgtccttattaatttaaagaaatttagaatgacaattattcttttgggatcctatcatttgttaccgttcgtgaaacgtggataatccatgtgttttacatttacacacatgggataatgataaataacttctcataactgctgttttaactttatttatagacagttatgctaactatgctttatctttctcgcaatgtaacaattctcctttcaattaatgctttatcataaatcaacatctaactatgttgttctatttctcgtattcttccattgagcaaggcataagtgagacgcttatcaccatctgataattgcgaggtgaaccatgctgaagatgttatcgttattctttcaacatactcacgagtatgtgggtcaatgagctgagagttcttaggataatttattatctaccatttccaaatatttttattttagggtgtattctgtgtatcccaagatgaactttctttattaagtgttttcattaagcaggtggtttgggctttcatagcttccgagattacaacctggcacttcttggtaaacaaggttggcgcttattgactcacccgttgtctttggctactcgtattttaaaggctcgctattttttatttgggtctttttctacagctgagattggttctaaaccgagtttcgtgtggtgaagtattcttgaagctaaagacttggtggctgttggggttcgtaaaagtgttgttgttggtttaacagtgagtatcttgacagatccttagcttacatgttgatcacccctttaatatgtctatgtatacacatcttggtttagttgataaaccagtttccaggtttatgaagacaaatgttcgtgaatgggatattgagatcctagaagacttgaagctcgtgatagaattgctactctctatgttcctattaactcatccattgaagaggatttctggtattgaagcttcgaaaagtcaggttactacactgtcaaaagtgcctacaagtatcttgaagagtttaaaaatggctcttccaatgataattatattggtttttggagaaagatttaggctctaataacccccaaaggtgagaaactttctttggcgtgcaacttcaaacatgttgccttcttgtgtttaattggtgaccaa

SEQ ID NO: 71657 - DNA, 783 bp, Cannabis sativa
ccaattcggcaacttgaaacgtgaaagaagcatagcgaacaatctattcacacaaaaccgccacagccacctcgtaatccttagccatgtccttcaattcgaacctagaacatctaccctacgacccagcatacgcactccgaaagaactcatttccccctcgagaatgcaccggaattttcctacctccggtcacggcgaagctgggtttggtaaagaattcaaaatagaagagagtacagattctgcgagaagcgatagaggccaacatcggaaggctcaggctcgatgagacttgccttaagtaacgattattggttaagacctccttataaataatcagaaaatctagttttggtaccatgctgctaaatcccaaaacttgctataaacataaatcggacctccatagctagttactgttttacaggcccgccaagagttatgattgttttaagttggaattgccgtgggcttggaaatctatggacatttcaattcctaaaggagattatttctcaaaagaaacccaatgtcatttttctaagtgaaacaaaatgtaaaaaaagtagagttgaatgggtggggaggagtttgggctttgaaggtatattttgtgtggaggcccaaggtagaaaaggtgggctggctttgttatggaaaaatgaggataatgaaagtatcaagggctattctcataatcacattgattttacagtcacaactgatacccagcagacttggagacttacgggcatttatggagaaccacgaagacacctg

SEQ ID NO: 71658 - DNA, 1197 bp, Cannabis sativa
gtatatcggtaaatctcttttaaggagtatattataaaatctttcataatataatccatatatttatacatacaagttatttattttcatgtgcatgaatgcctgcatgccggcagaaagaaccaatttctttatttttttttttgtatgcgtttagcataactctaacaaaaacaatccaaatcttagcataactcttaatatatttaatttttattatatatatatatagagagagaaataaggatatgttgcttcaccattttttatataattttattttagcgttaaaaaagaatttgttatattttaaataattaattatttaatacatattagtattatttttatctatttatccattagtttggttaaactaatataggacagattaaaagaaaaattagggtttctcgtttcctaaatctatagctatcggatgttgtcttttttctctggctaggccctgctagtgtggcttagtcggggtgctactacaattcaatttttgctactacaattagtcttgtctctgtgtgatatgattttgagtgttttagtgatcttgtctccgtaatatgttttgagtattttattcttatctgtgtgacatgattttgtgttgtttggttttgttgttggttcttctttgttcttcgatgactcgtcatcaaatcgttgttagtggttgggaataccaagttctctacgactgaaggagttgttagtagtgtagttacgtatcttacacaatatagatagaaagcgaccttagagactaccactatttattttcgacgagttcttttcttctccctctatttttatgttttcaattaatcttaatcaattgttgacaatgatcaggagctaaactccaaattaagattttaatagatattgtttgatacttgcctatagttttaatacaattttagttttcccttcaatttttttatttgaatttatttcatttgtatttaatgcttataattacttgatcactaattatttattttatgaattcaatgtaaaatctaaaaagtgagtattgattataatataataaaatagacataaatttcgatattggacgtaagtacctatagtctgtgtagcaaatatgatttatttattgtttaacgcgaattatatatgttatttactacaaatgtgtaggactttttcatttgattt

SEQ ID NO: 71659 - DNA, 954 bp, Cannabis sativa
agtccatcaggaatactgccattcacaaagaattgacaaacttggttcacaacatcgcgcttcactatttcccagtatttttggaaaaatttaaataattattagtaaatacatatacattattattattattattattattattagaattattagaattaacatgtttttttgtgttaggtcgtggtcatgtctcccatggcagacttatatagaggcttgaggtattagtcgagaaaaaatatatatgtattttaattagttacaatatatctttataattaaaaatgataaatataaacgtaatataaatcccccttcaactttaattttggtccggcttattttagcatttttctttttacacttactaactattaaaatcaaaatactacgtacgattgaattttcataattgtgtaaatgatattttatttatttatttatttcttttttccctcgtattttgcccactatttatgaaaatatagtaaatttgtcaaacgtgcttttcacattgcattgcagagtacagttttgtgcatgcaaattttgatatatgcgtggaatgaattagaaaacgttacatcataactactgtatcttagatttaccaattcaattttttttttttttttcatttttgtaacaataaaatatattattgaaaaataataatattatacgtgtactaaggactaaacaatctagccaaattgaccatgcgaggaacataaattacagaaactcttaatttaaaactttaattacttaattaataaaatagcatcaataataaatatatcctatataattcactagatttactttacaatttcctttttattagacaagaatttaccttctctttctattttttttaggttctaaagtttaaagcttctttcatcgtgaaaaaggagtagtatctaaattgcttacattaatttttag

SEQ ID NO: 71660 - DNA, 1347 bp, Cannabis sativa
  modified_base (256)..(257): a, c, t, g, unknown or other
aataggcattaaagaagccttgagtttgattgcaactcattcgtgggatagagtcatgttggaaacagatagcttggtgtgtgtccaagcgattctcagcggtatttttatgccttcacagtttggtattattgttcaagatgttcgaaatttacttttggctttatcttttgttgagttgtgttttgtaaaacaatctacaaataagttggctcattgcttggcaagagactcttgtttctctacaggtcgtgtnnttcagttggaggattgttcctctgaagtgcattctattgttttgaacgaatttattaattaatagatcttataatttttattcaaaaaaataactttttacattttaattatgtatttaataaaatctttatacattttcaatcaaaacttaatgcttttgttaacttttttttttttatacatttttatcaaaaaataaaattaattttatccttaaagcattagaccacaattataaatttgagctaaatataacattgatttatttttctgaaccaaatttagcataaaatttacaccgtccattagagatggccttacattggaatgatttttcctctattttaaaagaataaccattctaccaaaatagcgtaaaaattatattaaaataatatttcaatactttaaaaatacaactaaacaaaaattaatttatttcttttttatttcattctatttcatttgtaggaaaatcattctattttttagtattattcttgtgtaattgttgtaattcattgctgcatatttttagggtatagttaagagttttattctgttattattatttgattttatgtcccttttaagggattcttgtacatgttaaatattttaacatgcatatttctgagaaataatatagaaaaattaccctctttgttgacttggtatcaaagccaacacacaaccctaaaccctaatcccagcctgcctttctctaatccctttccaccatgtctgaaagcagtgagtcagccaccacaaaaattaatccctctaagaccactattgttctagcccataagaaaacaattgagaaaacccagatttgtaaattcttggctggtctcactgttgagtatgatgaggcaagggggagaattattggaaggcagcccttaccttctattggcgaagttttttctgaggttagaagagaggagagtaggaggagtgttatgctcggaaaaagggttgttggcaattctattgaaggatcagcctttgctgttggaggaggctacagtaagaacactccacatctgatgagaaaccccctgtttggtgtgaattttgtaataa

SEQ ID NO: 71661 - DNA, 2261 bp, Cannabis sativa
tatatattttaaattggagaaaaggataaaaatattgtgatgatgaacatattttttttacttttaatagtaaaatggcttaatttaaatgtttatagtttcaatttatttttatgatcaatgttattttatttttacttttaatttaaaatgtgtataatatactaattatgtatatatatttatatctcttctaaaacaatgaaaaaaaggtttggtcaaatcatataagtgcatgattaattttggtataatttataaattcgaaagggtaatttgtatccttataaattaattaaaaatatttagctaaaacatagaacataaaatcatatatatatttttttttattgaaatacatattttatttattttattaatttgtattcaaattaatatttttattattgatctatctcatatatcactataataataataatataaaaaaaatccctcgataattactaattagatacgaaaaaccactacttgaatttttttttccaataactttgaagaagaagtcatgaaaaatcaattgcgtaataaatactgaaatagggctttgcacgtctctccttataggacatggaaagttagtcagtactttctttgtgagcaatatctcctcaagaattacacaaaaatattggtattgaaattaatattttattatttatttacttacacagttgtatgatcaaataagatctctcgacaataatacaaatcgagaaatacctttgggaattatcaatccatacagtatcgggtttgcaaacaataccggatattacagatataatggctctcttacaactcctccatgttatgagaatgtactttggactttgctcacacaggttttcatttttctttatcattttagaaacttattgaactattaatgatatatatgtatatattataattaatttctctatttttatgttgtttgatttaacttgttaacattaataaaaaaaaatataaaaaaattaaattgtttacacaattaatgtgtcttcatatttttacacagattcaaactgtttctctcaagcaagttcaagcattaaaagaagctgtaaatgatgtaagtcttccatctttgtgatgaaattcacatatattttctaagtaaattttgtttggcaaaaaaaaaaggaaagaaatataattatgtaggaacaattaaaaatactctatacaagaataacttctaatttattataaaaaattatatcttaatttgtactgattataaatgagaataactctttaaattgtataatttgttatatattttctaagtccatcattaaagaagtatatctctatatataagaataataattacatcttaatagaaattatataaagtttataaatttatttatatatgtagaattcattatatgttttattacatgtataaatattatatttatttagaaataattttattataatatagtattaaagattttttattgttattatttgcattttatacttttttttagtgtacttttatttagttataattttccaatttaaatataatttgttcggttccaaatatattcttaaatagaaatttaacagtattattaaaaataataaaataatttgttatgaatttttagggttatgaagaaaacgcaaggccaattcaaccaataaatggaagaacagtgtacttgtatcctcgaagccttttttaatgaaggttaatcatggtgtatataacatatatacacatatactatacatataaatattatatatatttatacgtataatactagtagtttttggccaaggtcaattactccttttgtgttttaataaataaatagaagttcttacaaaatatataaataaataaataaatggaagaacagtgtattctcaaagccctatggcttataataaaaaataactatcgtttctcaataattgtgtgagacatatatttgtggtaataattatattcaaatttgtttaattattgtgctttaatattcaacttttcttttctaacaaaaaaaaaaaagtattcaacttttttttaacttaataatgcacaatgttaatattttgttcaaattaagtacaaacagtcaattctttgttgttaaaataatagcatggctacatatatttattactttcttaattaaatttatatttcaaatattttgtttgtattgcataaatgttgccacattattatttaacaacaacaaattaac

SEQ ID NO: 71662 - DNA, 925 bp, Cannabis sativa
cttatggagagtgtaaagtgtaaccgaagacacatcttcaatattaggccctttttgattcagtgtgtaggggcctatatcttctatgtataattgacgccgaacataaaggtgtaattcgacccttttatcttcgatttttttaaaaaccaaaaaagaattcattgggcgcgaggctaaaagtaatgatgcgggccttaaaattattttatttttgagtttttcattttttaaggaaaattccaaagataaatattatattagtagtaatgaaaattgagaagattctgggaatctctcatatggggtgaatttgaccatttattttgatctgatgattaagatgttcaaatttgacttcggatggcgatcgtcaatttcaggaggttggaatttgcgacaaaaatcacactttgacttgggagcaactttttgactaaaaaacttcaaaattgagatataagtgtgagaaatgcgtagaaagatcttgaagagagctttccaatgaagtttgaactgtgctaatcaaagttgaaatgagtggcttatggatgcattactgcggatagttcgacagcgtatggccaagttgacattcctgtgactgagaagttgtctgatgtcaacctagacgctggtaacttggaaaatcatgctcaaataagattttacaaaatcgtgtcacttaaataatttattaattatggtgaagtcattcattgattcttgaagtgttatcttgatttttacccacctaacgtggcatgtctacatagccaatattagtgccacgtggcagcacaacccgccaacaagaaggccaactcatctactcagcactttaaccaacggggagtcccgacacttaaacgggaagatgaatgacgaaccagccacctcaaggaggctggctggccagcttcta

SEQ ID NO: 71663 - DNA, 1586 bp, Cannabis sativa
  modified_base (1554)..(1561): a, c, t, g, unknown or other
tgtgtagctaatgatatactttagcttaatgaatgaatttttgcttatattgtccaatggttgtagttatagagtaattatcaggagaaaaattagaaataatttaataatttagttattttttttttttaattgaatatgcaaacttaccttgctcttattatgaagaataaaatattataaaaggtgaatcataactttgactgattttaaacatttattgaagctttagatctttgttattgtaaggataattggttttgtgtgtaaaatttcaatagattattagattagtaaattatttgagtgatatttgttcatacaattcttgacttaataatttaagtctcaatttggaagaataacatttatactgtgattcgttatatatttactaagtttcagaaagtataataataataataataataataattatattttaataaaaatatatatggtttataaatatatttttataaaattaataattttattttaaattataatatatatatataaatattatatttattcaaaaaaaaaatgttattatgatatattattaagatttgtttattattttgttgttattgttgatatatttaatatattttgattttttttttcttctagtgtatttttatttagttataacatcttaattagaatataatttatttggttactattctacaattcattatcattttattttgttacagtgaaccaaacgccacctaatatgtaagggatccatatgtagttggtgcataccatgtttccaactcaatttgttttgattagaaaaggaagaagaaaaagaaaaattaaaagagagcttaagagagacatctagctataggatctcaataatggatagaaaaatgatgttctataaatttggtgtcaaaaattcttttgattcaatcacaacactaagaattatttacaaaataaaaaacaacataaaaagttgtacttgcaatagattgtttgaaactaatttttggatcttttaaaattttgtaaaatatcttaaataattacaacatatacagtcataaaaaaataaattaaaagattttcttacttactgaaacaaataaagatgaatcggtatatcttttttagaaattgaattttccataaatatatatgtataatattattaaaaaaataaaaataaaatattgtggcaacagtagtacaacatatatgtcgtgcactgtaacttgcatcatataatagtgtaagttttagtgttaccttggatcgatttcttgcaccaaatccaatatttgaagatacaatggaggtgctcttagggttctctcatttgagattcttccatttatattatattatgagatatttacaagtcaaattatttaatataatattaaggaaattatattgaaaaatgttaaagtatgctattattttcatatgtaaataataagaaaacaaatattaatttgatctttaattatttgagtttgttctgatgaaattatatgtagattttctaaagggtaaataccattttggacnnnnnnnnttgcaaaagttacagattggaccct

SEQ ID NO: 71664 - DNA, 1870 bp, Cannabis sativa
cctttgagaaaagcactttgattaaggctaatgatggagtgaaaaacactcttaagcttattagcaagaactttggagaggcatttatacagagtattgcaaagacttatttggcggaaatcgcggacagttttggagttctgttttttagggataagaacaagaattgtttcatttatcaaaaagatgtctccattgtgattaagaatgtgcagaagagctcgagtaggctcagtccccagggtgtgccagttcttctagtagaatagagagttaagcccatcagaacctaaggctttgtcaccagagaggctaaacatagcatgcttaacctcgtgatatatataaagaaatttaaaagcacgtgattgaacacaaatgaagattgcatagaataatattatagtgctacataaaacaaaatttaattaattaattaatatcaataaagtataataagatatttataaagtaatagttttatcttctaaattttttgtgtagccaaaattcattcaaatattttgtccttcaactcgacaagatatcattctagagtctatttatagattatggtttaattagtaacaaatccttcaactcgaccagatatcattctaaagtctatttatagattatggtttaattagtaacaaattgaactgagagcaataatgggttgctatatataatatattcaaggtgaattttgccaaaattaaagaaataaaaaattcaaaagtattttttattttttgccaggctaaaaatttttagggttagtgttactatttaccttttaaaataaattttcagaataggaagaaaaaaaaatataagtatatcagtaaaaaaaataaaataaaaaaataaatgtatatcattaaagtcttaatgttgcgtaaaaatagagtttttcaacaaaaatataataaagtaaaaattaaccaacgatgttacaggcatggtagagatatctactatacctgttaatatcttttgtaatgaccatgaggtctaacttcattttatttataaacgtatttttcaaaaaaaaaaattctatatatgtgtacatgatatggagaattatatatgtataatttatactatagaaatataatatataatatatatatattatatggtcccaatttattatggccaaataatttgtaaaatcattaagaatataagtgtgatattttaaaaatcaatttgattgttgaaaatcttcttgataaagtaaaaaaaaaattacacaaaaaaaaaggtaaggtatagaaattatctttcaaatcaaaataaaaaaatgtataagcacaaaaaaaattaagcttaaataaaaaaaatacccaaactattttataagcactcaaagtatggtggaaattttataaaagacacaaaactctcttaaatgatatgcatttatgcttcacctcaagattcacttattgattcacaactattgattataagagtactgagtatgtaacccaatgagattccaagaaagacaccctacactaactttccatcatatagcacccttataagaaacactaaattatccctatctttttctaattattttttgaatgacaatactcatcgcaagatatcaaccaaataatttttgtagcacacttcaaataatttgttatatattgaggatatacaatacttttataaacaaggcattaaataaatacaattctaataaatagaggagatatatacctgatatatatcacactcaatggagaattgttcactaccaatcgaatgagatgtgaaacagtgactgataaaccataagttatgtatgttatgatttagtcgatagtaaagaagagatagatatttt

SEQ ID NO: 71665 - DNA, 1336 bp, Cannabis sativa
tttgttatgctgaactatgtttaataaatgaaataataatactagttatataagagatttatgtagtaggttactattaagaaaagttgaattaatcttagaaaaaaacatttctctctttttcttgtttcttggttgaaccctaaggaagaaaagcaaggatttcctttttcaaattcaacatattttggttggattatttaggtgtagggatcaattattcattaaggtaagtgtttagcgtaatctcctacttgttcttgaagctttagattaataacgttagaatttatttgagtattaggactgtgatgttagtttagggttacgatgtgtttttgagttgatttataagtttgttgagcttgtggtggttatatgtaaggattggttggattgaatatgttgagtgaagtattttgagtttaaactattcatttgagaaagtaattttgagtaattgatgagtggtgatgaactaatgatttgggtatgtgatttttgtgattttgaactgttctggaggtgttttacatgtattgttggttctcgttcgagctgggaagaaagcccacaatttttctggtctgccaaaaccagtcgaccagttagttcttatgcaccaaaaccggtcgaccagttggttctggtgcactagaactgatcgaccggttgccttgtaggggaaaaatctcgagttttcttcgagttctgttttggctcagggtggaatctggtacctgtttcatgtcatttgggtattatgtaacctattttgaagtttttgggggttaggttcttattcggttttgaattagggttttattatggaatttcgatttaaagcatttattgagttttggttgtcgtgacataggactgagatcgcctagcttgttttccactcaggtctgcctgcacgcttgagttctgaattggggtaagaaaagtggtaagcatcgtatgtggctaaatgttaatggttgaatggttatggccctgattattatcaagactctaattaaatgttgttgagcctcggttatgacctaggattggaaacggttattaccgttaagggtaattactcttgaaatcgtggataggttttttacttatcgtttgcttcatcgggcaacgatagtgattcagctcgtggttaacgagtgggtaaaaatggtgctttataaagtaccagaattgtgtttatgatattgtgtcaatgtgtatgcatgataatttgagatttaattgctaaatgttattggttattgttttattcacttttcttgctgagtctctgtaactcacgagtgctttatggtgcaggtaaagg

SEQ ID NO: 71666 - DNA, 2038 bp, Cannabis sativa
gtccttaaaagttcccttaaaagttcaggggcatgaggggcatgattcggtacatgtcaaagttcatggggcaaaaatcataattagccttaataaaatatatgttcaaattatatatccctctctaaaacatcaaataaaatatactaatttatatttttaccaccaattttacttttctaataacaaaactaaaatccaatctctttccttctcattcccttcattctctttctatctctacaaactcaccacacacaccttgttggattcttcatttggcagagcactattgacaaccaagtgtatagagtaacttaaactcccttccaacataatttttgaaaaaaacaataggtatgtaatttatttagtaactattgttggattaagttatttttagttatttaggttgaaatgaatagatctacacatatcaatcttttattttggttgtgttgttcctgaaactcgaactgcaagaattctgcgttttttggtttatttaaggtttagcgatattttgtgatacttttcacgatatatggcgacattagagcataccgattgttagagatgactttaccgacattttgcgacacttttcacgatatatcgcgacattggagaacattgattatgatggatagtttttaacgatatatatcgacttgattcgtgatattttgtcgatattgttagagttatttattggcgagttaggaaatgatatttatcgacattttgcaatatgaggcaacgaacttgtcgacctttcacgatttcacttgcgatatttctcgacatacctttgttaactaaggtttttccttcttttttaacagattcaattgtatttgtggttgtactttatgatggggcttgggcagttaaaggttttaactgaaaattcaataacgcaaaaagcaagatgttaatgtttgaggttgacactactttacagaagatgcaggaaattttgtatgaagagtttgatatagaccctcttatgtatgaattgaaagtagaggtgtgttacatgtacatgaaaggcaatacgatatcgccagaggttttagtgaaagatagtcaagtaagattgttcttaagaatgaaggcaaaaatgagtgtagagaaattgctgccactatttgtgactaaggttaaaaggcgtgcaattttggggcctactccgccaactgtccccccaagaagagttgttgggagttttgtctcaaaaacagatccaacactaagtttgaatgagcagacccctactaatatagatgaggatagggttgacaatgcatgtgaccagtttaacgagtttgatactccctttaacaataatgtgtggtagatttgaacaaggatggtgatgtggagttgtaagtcaatgaagttgtagaggtaccttctttgaggttagaactacctcgactaccgccaaggaaccagaggagaaagcaagaaagaagaaccccttgtagtaaaaatcaccaaacaccaagtactagtagcagccggctaggttctactcatagtactgtaccatctgattttaaagtttgtacaaaatttaaacctattgtgtggacaaggaaagacatagagaaaaataatatttatacaacttatcttagtggtacaccattaggggaaatacacttcggaaagttgtacacaaaatagactgaattaaaaaatatagtaggaaggttcgaattgaaaatgaattttaagttcatggtgaagaagtctaacaccaatgttttttacgcaacttgcaaggattcaaattacaagtggagagtgagggggaggaagaaggcatgttatgacatgtttgaggtcactgtgctccacaacgaccacatgtaacctggattctagacatgctgataaccgtcaagcagcaccgtgggttgttggctacctgattaagaacaagttcagatcagatggaactaagtgcaaggcaaaagacatacagagggatatgtttcaggactatggatcaagatgagttatgagaagg

SEQ ID NO: 71667 - DNA, 2167 bp, Cannabis sativa
ccatctgtctgtggatggtagctcgaggagatgttcatttgtgacccaagaagcttaaatagttcagaccagaaggtccctgtgaatcttcgatctcagtcacatactatattctagggtactccccagtactttactatatgcttgaagaaaagttgagttgtctcttctgcaagacactgcttcgatagcgggatgaaggttacatactttgaaaatctgtccatgatcaccaagatcgcattcaagtctccagtctttgccagacttgtaatgaaatcaagcgagacactctcccatggtctgcttgggaccaacaaaggttctaacaaccctagcgtcttgtgcctctccactttgtcttgttggcagacgagacaggtccttgtgtagtccaccacatcctcctgcatatgtggacaatagtacccatgcttcaaaagggcatgtgtcctatgccacccttgaatgacccgcccacaacgtgtcatgacactcactcagcagcgtcctcctcagatcgcctaccttcggaacaaacaaacgcccacctttggtccacaagagatcatcctctacccaaaactgagttgtctttccttttcttgcgagagccatgatgttctttgcaactgggtccttctccaggttctccttgatgcgctccttgattggtgtacccacttggctagctgacatacccgctaacacctttagagccgccaactctgctttacgactaagggcatcagctgcctgatagagacgtcatgccttgtgctcaatgtaaaagtcgaattctgccaagaattcctgccatcgggcctactttggagtcagctttggctgcgtgaggaaatgactaacagtagtattgtctgtcttcaccacaaacttcgaccccaacaactaatgcctccacatccgtaaacaatgaataactgccaggagctctttctcctgcgcagtatatcgcttttttgcttcagaaagcttgcggttctcaaatgccacggggtggccctcctgtataagtacccctcccaaagcataatctgacgcatccgtttgtactttaaagggcttgcatacatctagcaaggataatacaggatcttcaatcttggcttctttcagacttcaaaaagcttcttcgcacttctcagaccacgtccatataacacccttcttcaacaactctgtcaagggttctgctcttctcaaatagccctccacgaatcgtctatagtaattggctagaccgagaaacaagcgtagttgtttcacattggctggggtcatccactcttggatcgctcgcaccttttccaaatccataaggatcttcccgtgttccacaacatgacccagaaacttgatactttcttgagaaaacgagcacttctctcgcttcacatatagctgctctttcctcaacttccaaaacaccgtagccaagtgttcacgatgctcttctaaaggggcattgtagaccacgatatcatctaggtacaccaccacgaacttgtctaaatcttcatggaagacttcattcatgagtgtacagaatgtggctggcgcatttatcaacccaaacggcatgacgcaaaactcgaaagccccataccgagtaacacaagtagtctttggttcatccccttctgcgatagtagcctgacctcaagtccaacttcatgaagtatttttctccacttagctggtcaaatagatcagcgatcaagggaatggggtatttgttgcgcacaatcaccttgttaaggggcgcggtagtctatgcacagtctcaaggtcccgtccttcttcttttagaataacacgggggcaccaaatggtgcctttgatgatttgatgaatcctgcctccaacatcttcgttagctgcctcttcaactccttaagttcttgcggagataattggtatgctgctttagctggggcctttgcacctgacaccagctctatttgatgatcaactcccctcctaggaggcagtcttttcgggagttcttccggcatcacatctttgaatttatctaacacctgctcaattaaaggtggagtggactcctccacttttgcatcgtacacggcaggagcaatgacaaatgttggcctcttcttcttcagacccctcttcagttgcaagg

SEQ ID NO: 71668 - DNA, 1969 bp, Cannabis sativa
tattccaatcacgtaaaaaattttattttattattctttctaatcttactttttgacttaattcttactataattcttactttttaacatactacatatattggttcccactaaggtgtctacatctttaacacttctcaaaacgttattgcccattagtttaataccttagtctaacaagtatttctaatcgaaattgtgtgccatgttccacaatattttataacaaaatctttggcagagaatcctacaagctatcttccatccacaatatataatgtattttgtttttctgttgttcgtaagatcaaataattaaattagagtatttctgctatgcataaatatttataatattctgttaaatccaaagtctaaacttgtggatcttagccacagattgcacaagctgtttttaatatatgcgatctacattgcgcatatttttttttatcattattaatatttaaaaaaaaatcatgtcatgcatatctctttctactttttcagctataggaattttatatctcacaaccacaacaaatttgtttattaaaagagaatgaaaattaattgtatatgattgattctcattcatttattactgaattttagaatggaagaaactagcggagcccacacaaattaagtagaaaacaaaaagaaaagttctcccactatttttataaagaatagcttagcttacttactttatattaattatattaatacctttcataaagaatatctttcccttttcttaacttactttatattaattatatttttattaattaaaaataaaaaagataaatatgcccttcaaaaatatataaataaaaaataattacatattctaacaatgataatttagtcaaattaagtcattccaattacctatcttgattatgtaaacaaaataaaatacattttgatttcttttccgatcagttttgtaaacaataaaataaaatattattttcggttattttatattttagcccgattgatcttttctattgattattctaatttcaattacaatttaataaacgtgccagacacaaacataatccctcctaatgagatgactcaaacaaggaaaaataacaataaatgatttcctaccaccatactacacaacatgtaatcatattgcgcatacttataatgggaagtctatttttttttttttttttttgttataaaaaataaatattcatagttttttcctaagagcaataattatattaaaagaaataatgtgtgtgacattatattaagtcattgcattatccttataagagaataattaaatgatgcgaccaaagactaagaacatgaagtagtaggtaaacaccaaaggattaatgaaagaggttaggttgagtcatgccattcggtctcttatttatttggtaatttgagtctattatttattctatatatataaccttactcaataaggataatttatttcaaacataaagtaaactttgcgtaaatacaatatgaaccaattaaagtactatattagtgtgatgttttgaatgtaatttttttcgaataattttcctaaaagaattagcaaagcaatcttattttttcatatttatggtgactatttaatggttacattaaaaatataactatgatgattatatttttttatgactagctataacaagttactaataagtaaaaaaattatttttaacctcaaattaattatatacttaaaataaattaatttataattaaaatattttatgacacatttttcacaactaatatttataaatatttttgttttttatttataaggaaataaataaaactaggttagcataaggttaatagtaatttattaattatttttatttaatttataaattaatcacaatcgtttaataatgattcaacaactaaaacaaatgtaaacatcgtggttacatatttgatataacca

SEQ ID NO: 71669 - DNA, 854 bp, Cannabis sativa
tccagaatttgtcaacaaagattactcatcatatatcattgtgatcaagatataaaatctttattcatatactactagtagtagtagtagtactctataaagctaagtactactagtaatagtggttctaacatagttggatcttccttccatgaaattagatctcactaaatttaactctgatttaaatatggacaataataacaatgacacaattaatatgtagtattaaagaggtgaggttacattaagagaaaagcaacgtagctgttttgacagtcgtcaaaagtaaaaaatcaaaggcatctgtgagtatgaccaaacagtactagactagcactgatcgtaggggggtccaatgcaccaattatccaacctacgacaataatgtttccccaaaaaacagttaatttagattttttgatcattgaattttgaagaaaagcattcatataaatagaaacagctagaccacgtgattgttacaaaataatttagggatagaggaatacgaaatacaaccaaacctctagtgaaaaaacgtccaccgagcttgctccttgaattttgatatttattaaattatgcccctaaatttttatgattgttaaaatttctttcttaattttgatatttactaaattatgcctctaaatttttatggttgttaaaaattccttctaaattattaagattgttagatttgaagacttttgttcaatttcattcaactttactaatttagtaattgttcatgtactaaatcattactacaaaaaataactacttttagtgacaaccttttagtcacaacaaaaaattatttctgactaaaacatagtatttagacataa

SEQ ID NO: 71670 - DNA, 1678 bp, Cannabis sativa
agacatatgaacaaaataatgagccaacaatggtgattcagtaatgactatagttctaacaaagttctttctccaaatgatcaagagccaaccttctattgtaggactagaaaaatagtcccaattggcaaatttattgtccatcatatctttgattttattccctttgagtttggtctcgagaaaagcacaaactcccaccttatttatcttacaaaatttagccacaacatcgtatttatctttattattaacacccttaacattcacacaagcaatcttacaattatccatgagacaattgagatgttaccttgctgccttgttcatcttgaaccaactccaattcttcacgattttcttgttcctgcaaagcactaaatgtgttgaccacagtatgaatatcagagttagtgcttatatgagttttaccctaaaaattcttcttagggacatggcaatccttgtcctatataacacccttataacctggtatgcttggcaaagaacttgactctccctagttaaaaactgtgtagacagtagcatccagtatagcattatcagaagcagcagtgttttgctttgttttctctggttttggcttatcaccaactactggttttttctacaaatcatccttacgacaatccaccattatatgaccaaaacccgagcattttttacattttacaagcagccatttgtaatctatactcttctttaacaatttcccatgttcattaaggaattgaaatgttctctgaggtgaattcattttgtccatctcaactaaaatgcgagccaattgaaccctagtacgatctttagtatgttggtctaccataataggctatccaacagtactaactaagggactaaagcttttgtttccccaatattagagacacagatcgtgaagatgaatccataaaggagcagatttgactaatataacaacattcaagtcagttgtctaaggtctaacaatgaccggcttcatatcaaactatacaacacctacttccagcaactcatccttggttatctcgtcatgaaacttcaccatgatcagccccttggacatcctagcaatctgaactatcccaagctgtccccatattcgtttgataaacccttcaaacacaaccattggtgggttcgcaccaagaatcacacaaataacagccgaattccaagcctctattttttccctaatttcctcaaaatcaacttgagaaattttcaaaccatttttaattaaaggttctgtatacgaaagctttgagtgacgaattaataccttctctttagcaaaggtatcccatagactcctagctgattcttgaaactgaccttgtccaattcccacttcttgttccaattccacctccttagcccaattcatgctaatctgaggtgtgagaaactccaagatacttggagattttcaagccatattttgacctatttcctcaccaaagtcatcaataacaactttactcaagtgtggattcgtacctgaagcttcatcttcgtcattagtatgaattccatgctggaaatagcctcaccaaccttgatagtaggctttcgaactatcctcttcttcttcaccatgggagaacgagagaatagctacaccgcctaactagagttctgttgggttttatgccct

SEQ ID NO: 71671 - DNA, 856 bp, Cannabis sativa
actcaaaaccaatacgaactttgcatgtcaaaagacaagacaccatgacttacaatttatactttaggtcatttaatcacaataggaataggatttcggaattggaattagattttggaattagaataggattttagattttggaaatggaataggattttggattttggattttggaattatttcattttttttccaaataccttcgcttgaattgtcaattaacgctgcaaatcaaatttcagagccttcccgattgattcgataaacctgacgaatagggttgcatgttggagttcatgagtttcgtgattggggaggcctcggagaagtgccagcgtgagaagcagaaaacggtgaacagagacgatgtgcgctgggctctggccgcattgggattcgatgaggggtggacctctgttcgtcttcacttagggcagacacttttaaacgaaaagaaattttacagagttcgatacttaatgtgccaaattttagaataataataataataataaaatactaatcaaatttaaaatttaaatcagaaatggagaatttttcgagaatcttagactgcagtgctgaagctaactagaatcggactcgaccatggagaattcaacctttctgagaaggtgagttgaactgaatttctcttttttaagtcatcaactgttgttgtcggagatggacgtcataattgctagattttgatggagacgagatcaattatttgtggaggtgagatcgattggtgttgtgagatcgatcggtggagaatcgattggtgttacctatgtcattaatttcaggggaggtagccacatatatttttgggtttgtttaattagat

SEQ ID NO: 71672 - DNA, 1188 bp, Cannabis sativa
atgtaatgtggccatgcagttgcagtgatgaaagacttgaacatagacacatacaactattgtgcacattactatacatcaaaagcataaatgcgagcatattaagaaacaatatacccagtcgaaaacctacgagaatgggatttactagaattttttcaagacatcatagttttgcctcccacagaaagaatcaaatttggaaggttgaggaaaagaagactaactacaacttgggaaacaaaaaataaaacaagtacggcaaacaaaaaaacgtgcaggagcattatatatttttcattggttatttagtattttttacatggaaatttgttattttctataattttttttaaacagattcttaggataaaatagatgttatgatcattaatatagaaataacataaatatcataattaaattgttaacagttgcttgtttaattaaaagcaagttgtaattaagttatttttatatattttttttttaatataaagtatatatcgactaaacaagaaaatttaattataacatacataataatcatataaattgtctacataatttgattaaaaaaagaaaaataacaaaacgattcgtctgttagctaaaaccaacaaatatataactaaatcaaatttttctttagaccctttggaggagcctcatcatcactatcaataaaatatattttttttttcatgaacatacttgaagaacaacacaaccaacctattgttgcgtttctcaacatcaaatatgaaaggaatcaatttcatgttaatgaagtattcaacaaacgataccacaaaacaactgagtagtctatttataggttggttgttatattggttggacagaattaaaatcccccaactaacttaaccgcctctcgaacacaacacagatgacttcaatgttgtaacatagttgaaagtattggtttagtgatctaattcactaacaattatactttagaaaagattaaatattccccctagaattttggcattatataggaatttaatctagaagtgccaatagaaatgctaaaaggaccagtagtgcacaccaccgtccaaatagatagattgtgcgaagcaccactcgtacctaatagtaatgcttatgttcttgtaggctaaccatgaagttgttgtcgttgattgaaccttatactcaact

SEQ ID NO: 71673 - DNA, 1552 bp, Cannabis sativa
ccatctcaaaaccaattggcaatgggaggagtagctcattcctcttatctattctattatctttccacacattggcaatgtgggactctaacaattatctatcatatatatgcatatgttaattataatagagtaaaattgaggagtcagggccacccaaaattcactactacgtccaccctaatacaatacagtataatctaataagggatattttcataaatattcaaaatgtagcaaatactttacaaaaatattacaatatttttttaataattttataaatttaaatatttttcgtacaaaagtacagataattatttttattttgtttttacaccaataatatattttattatttttgtgttactttcatattactttatattaaaaatatatataatttttattttacacactatataaaaatctataaattattcacctactttgaaaagtacaccagaaaattgttttgatccatcaacaagagaaagaaagaaagcctttttcacaactaataagatcacacattttatgatggagaatcttaaaaaaaaaattaaaaatatagttcatgagatgttttaaatttttttaaaatttattattcatattttatatttataaaatactatatttattagtctaaatatattttattaattatttaagattttaattttatttttttataaaaggatatatgtaaatattaatattatatatttaaaataaataaaatattttaatttttttttaaaaaaaattagtaatatatttttttaaaaaaaattaatgtatggtataatataaaagtttgatataaaatatataaagtaaaattttagtgatatatttagatgaataaaataaagaatgataagattgctcttattaacttatatagggaaactggtcattagtaatggttaatgaaaaagaaaaagaaaagcattgtgttgctacgtgggtggattcattatgctctttttttttttttttttataattaaaagagaaaattacacttaatattatttttttaactttctttgaaatatatggcagctttatctttgctaactttttatgggtttaagtaattttttgttattttatagtatttattatttcatgtttttgttattattaattttaaataccatatttattatttttttgcatcaatcctaatttttttcaattttatttttctttctttctcaattgatctaagtctcattttcaggagctcctgccccagcgacgactgccaccctgttcttggatcgctctccctcccaatcttcctctctcattttcttctatcgatccagtgctcgtatgtcgctgccgctagctccaaaggagctatttctaccattgatggacaaggtaagcgacctaccaaaaccttgaacccgaggttctccatctcatcctctctcttgatcatgaaattgttagagatattattacaatggaagaaaattaagatgtatacaactgtattgtaaaataatataaggactaaaataagagattgatta

SEQ ID NO: 71674 - DNA, 2155 bp, Cannabis sativa
  modified_base (1153)..(1157): a, c, t, g, unknown or other
aaaaaattataataggagattgacagtaacactcctcttaaaattttacaatttaattgaatactatagctaaactagaagtagtacaaagttctaatttaccaagtaataaaacaagatgtttattttaaatatatatttttcgtgctataaagtagaaaataattatataagaaaaatattgtaatttaaatttaaatttattatatatatttatattgttatttttttaaaatttatttaagtgtattatataaaaaatatatccttatattactttttcatatatattttttttaaaaaatatttctattattattttttaaaacttcttgtatatatttaaaaatatttttattattaatgttttttaaaataataaaataaaaaaagtatttataatatataacttatacaattaaaaatatatataatcaaaatttaaactaaaagtataagcaagtatacatgtaatattagaatattagctagtatatatatatatatttatatatatttatatatatttaatctcttttaattggttatagctacagtaacagtgcagccaaacaaacataattttgaaataaaaagataaatgaaaaaaaatacatgatgggtatagtctcttatatggctgtgcaaataaggtatatattggttttacaaggtttaaatttgatcactgtttgtttgtatttcaagcacctagaagagtcaacagttgtgtatcttttactctatatagatgatatattaataatgggcaaagacaatacagtaatcaaaggaattaaagataaactcaaggtagaaattgacataaaagaattgggacaagtaaagaagatacttggtttaaaaattcatagatctaagaatgatagagtcatgcatctaaagcaaaaggcctatattgagaagattctaacaaattcaagatgcaagattctaagagcaattcggtacctcttggaggatagtttgtattaaccaaggaagaaagtcttaggacagctgaagagaaagaagagatgcatggaagaaatttcatatgcaattgcttggggtatctcatgtatgttatggttagcacaagacctcacattgctcatgctttaagcatattgagtaggttcatgtcaaatcnnnnnataaaccattggagggcactcaaatggctgctgagatatttgagagggacatcggatattagattgacttacaagaaagtttcagagaaagtaacattgaaaggatatatagatattgattatgcatcaagcaatgatactaggaggtctactacctcttctgtgtttcaaactagtggagattttattagttgaaaatcacagctccaatccgtagtagcactttcaactacagaggtagaattcatggcaagcacagaggcattcaaagaagcaatatggctacacgaaattctgaaggagttgaaacttctagttggaaaggtaagggtatatcctgacagtcgatcctcgatttatttgtgcaagaatctagtttattacgagaagacaaaatacattgatattcaattattttggataagggagaagatagaagaagacgtaatcaagttggagaaagtgaagtcagaaaagaaccctgctgatattggcactaaggtgttacctgttaataagttcaagcatttcttggacttactcaaccttagttgctaagtagctacacatgaaaatactaccacctctattggacatatatacttagcttgttgggacttgaagaaataaggtgaaatttgtaatattattccttaaaatccaaccaacattcggttagttagttattcatcaactaatttaactttcaaatatgacaacaagtatcttaggtcctttgatctatataaagaggattacttatctcattttacaagagaatatgaggaagaacaagaaagatacaacacagtagagagagaagttagagtgagaaattgagagagatgtctgagagagagaaagagctgggattgagaattgtattgaacaatgttgtcgattatgttggctcgggttagtgagttaataagtgttgagagattacaccatgaatgacttactatgattatttccttgtagctcctgaaattgatatc

SEQ ID NO: 71675 - DNA, 1026 bp, Cannabis sativa
ctctttcacttccatgctctagttcacagaatcgctggggtgatttttccatccctgaacattaggcttttgcacctgagtacaaagtccatcgtcccatatcactcttccttgaggtttgattggatgaccctgcagtagggcataggcaatcctatctgttgctccatgaaacattttgagtgggtctgctcagaggcttacccatgatacatttccccttgtcttttgttggagcgaaaggtccatctctcggatggttaaactttttaacgagaatattttcttttgggatattttcttcaagaacattttcttcaggatcatattgtgcttgtatccgtgccagagcttcctgaattttaacgagaaacctcttcttggtccactgatctctttttggtatttgcgagttctcgactcaatgacttcgagatttggctcataatactctacttaatccttgtcatcgtagccgccttcaggatcctcctcatgatcttctcaatcatcttcgtcaatggggtcttcatcggtgtgcttttcgcgttgctattctttttaagcaagacgactgcccacctttgacgtttccctgcctcccacagtacccacccgagtgtgtattagggggagctgattaacgtcctccatggcaacatcatctccacctttgtgagcagtaggctttgcgacgatagttctagtggtcaccattgttgtagatgacaactttggtagaaaaatctttccttaagctcttatttatcgagatttttagaaaccgattataaaataaatagagcttaagaaataaatgaaatatagaagaaaagataatgattattacacggttcaagtgttaattaattttagtccacgagtcaatattattaactagaaaaacctttgattattacacaagagtgctcttgtccaagttaagaaccctaaatttagccttagtatatgaacattggtgtttgaaccctttgctaatgtataatgttctatttataggctaga

SEQ ID NO: 71676 - DNA, 957 bp, Cannabis sativa
agattggcgcgaacctttttgccgacgtaatattacgccggcaaacgcttatcaaagcaggttcatagcggataagggtatcctttagcaccgacatttcacctttgccggcactatttctcaccggtaaaactgttttaccggcgtatttcgtgtacgcgccggtaaaaatttctttactgaccaagattctcagacatgttttgccggcgcagtattacgccggaaaggcttctgcaccgccttcagtgtacttttgccggcgcagtttagtgggtttctcttgtagtgaaaaattataaaaattgcgtaattcatatatagcgtaaataatacttctagagtttaataaaatttctagaatcgagaaattataactctagcgctcattccaaataatgggactcacaacataataaaatcattaataactataaaaatatcaataatgaatgctaattgcctttactaatttgtattctaaaatgcggtcattacaaatttagtatagcattccatcctcagacaaatggacagtctgaaaagaccatttagattttaaaagacatgttacgggcatgtgtgttagactttgaaggatcgtgggtaaagtacctttccctcgtataacaacaagtatcagacaacaatcgggatggctccttatgaactactttatgaaagaaagtgcagatcatctattcactgggataaattaggtgagagaaagttcttgggtcttgaagctatttagaggacaagtgaggcaattgataaaatcagagcgcgaatgctcgttgctcagagtagacagaaaaatgatgcatatccaaagcaatgggatattgatttctaggttggagatatggcatttcttctaatatctcctatgaaatgtattaaatgctttggtaagagaggaaagcttagcccgaggttcattggaccctttgaaat

SEQ ID NO: 71677 - DNA, 1033 bp, Cannabis sativa
tttctttttgtacagatcactgtttagcttaacatctcaaaattgaagtcatgaaacaccaagtttttaacaacaatcgatgaaatatttcataacgagaaatgctaaaaggtaccattagtgtctagcacccttcaacgtgtcatatcactattggtataattagtgacggagccaaagtttttattttgtggagacttatttattattataaaatatttatacctatattataatcactcttactagatttatttaattttgtggggacttttctattattttagtctataattatcaaattaaaaaaattatgtttaattttttaaaagacaatatttttgttaattttctattatattttttaaaaaattaaaaaaaaatatatttttgttagtggggctatagccccaacattgatacaagtgggtccgtcgagtattggtaaccatgtaatttgatgtattactttttatgaaatatcgctaactaatcataaaataccacttttaaggtgctagacatcagtggtgtcatattaatgcataacaaatgaggaattaagtctttatagacataattcaaccaatagaaacgaatttcacctaagcctctgcataagtgaataaaaaaacttggtaaaaaaatagtgactggatcttgagccacaaatctaacatactaatttttgtgttagtcatatatgaagacttataatggctaattaatttgttttatatcagactgagcaggaagcaatcctcaaaaacagagaaaatccaaactcttcattcacatgggacgaatacaaatcaatgccttttactcttcatgtgagtcttacaatcacaagaagttaatataaacttatttcaataaattaatttttcaactgccttaatgttaacatttcaatcaatttgaggaaacattatacaggttatcaatgaaagtcttaggctgggaaatgttgcaccaggattattacgtagagcaatcaaagatatcccagtaaaaggtttggttgatcatg

SEQ ID NO: 71678 - DNA, 3435 bp, Cannabis sativa
  modified_base (2691)..(2698): a, c, t, g, unknown or other
aaaaaaaaaaaaaaaagctatacatatataataaattatatctgactaatatattttttagaatctaatttctagacttttatttaaaaagtctcctatctaattctcaatctctcttttcatttttcaatcacaatattcaacatattaatattaaaaaaaaataataaatttataacaaaactattattgtaatacaaacacaaacactaataagaaaaatcatttcaatctaaaaaaatttatatcaaaactattaaagattatagttttacattatcgaaatcccatggcaaatactgacaaaaaatttggtcaccgctgcaactaaagaactcacaatcttaacaagaaaaatcttaaaaaaaattacaaaataaaaaataatgcaatgtacctcaatagaattattaaatataatttttttaccttaataaacgttgagattcaacgtttttatgcctcaaatctggtcttcaaagttacaaccactaagctgggtagaaagcttcaatcatgaacttattttcgcactgtctctctacctcttctttcagtgcttgtgcccgttctttgtccagtagtcttctcttttgctggacgggatgaaagtttgggtcaatgttcagggcgtgagacatcacagtgggatcaataccgaccatatcctcatgtgaccaggcaaaaacgtctaggtttgctctcagagattttatgagagctaattttatttcaagcaacaaacccttaatgattttgagtttcctggtcgggatatttgggttgatttccacttcttccagctcttcaattggcccaacttttttatttgtttccccaagtcggggatctatgttttcgtccccgccttgggcgacttcttattgggcaatgctcttccttttttctgaactctggccagaagtattttccttcttgaccttagttagagcaagttgtagcattcccatgcaattttctggtttcctctgagacatcccaccccattctttgttcagaacttgacgcacaggaggaaaaatgatgtaacagcttttaagtcatatagggtcagtcggcctaacatgaaattaaaatctgatggaacatcaattattaggaattatgccatcatagtaatgctcctcggagcttgtccaataatgaggggtaggtagatttctcctagagttgcaacactctggctggagaaactatatacgagctgggtgcaagggatcaagtctttaaactagagtcccatcttctcataaattgtcttaaataaaatttttgaggaagctccattgtttatcatagtctgtgccactgtcttatttataatttgcacttctatgaccaagggatcgttgtgcatgaaatggacgtggctgtcatctacttcaatgaatgttattgttggctcccctactcgtggtatttttgattttctctcttccacggccaagactatttcattatgttcgtactgtaaggctcgggcatacttttcttgagctttgcctgagtctccaacaagatgtagacccctaataatgacctataaatgcccgtccactggtggaggcatcatctggttttgattattgtctgcttgggcagccctttggttctggtcggccttgacatatttctgtaagtgcagattattctttctaatcaaaaactcaatttcctgcttcaaattattacatttgtttgtgtcgtggccgtagtctgcatgaaaacgacaaaacttaggtgtatctctcttacttacatcctttttcatgggagatggtttcttgtacggcaccatacactgagttatcgcgtagattgtctataggtcgtctgttaggactgagaaggtagtaaattttgaggcatttttcctggggtgatattcggtattgccagtgaatttgcccttctttccattaccctgcctgttgtcgttgttagacctcttcccatttgaattcgagctgttatagtattatggaatctgaacggatgttcccgtcgaggtagcacgttgctagcttttcttttgtctgacagtatccacatgccgaacaacttcttcaagcttaatgaacccatctgctcgatctggaaattcagccatcgaccccatggtcagcctttcaatgtccttccatagctctccaagtagctcgatgcccctagtattgcggtcatccttccttctacagtcaaccccttgactttcgtagcttcgatcgtaaacctgctgatttgaggggttcccctagcatttgctttactttaactaggtcttcaaggtgagagggaagttgacgggaggaggaaaattgtgcatggaacttcgaggagaaggcattccatgagttaaaccttcctggagacaatttgaaatactattgttgggcgacctctgcgagtgtggcaggaaatattttgcatcagacatcacctcttaccccttgcaagtccatctgaatctcaaaatactttagatgtgacaaaggatctttttttttcctgtatacattttccaagttggcattttgaactttgggaataatttgaggaactcaatctcaggggagaagggtgatctgcgtgctaggtcgagttcaacatcagtgagttttgggtcggtcaggccttgtaccatgtttttaagttgatccaattgtgctnnnnnnnntggatgaacttgttcggcctgttgaccggcctgtgtcacattggggtctctttgaactggattttggatgcggatacctggttggacagttggtgggacatattgttcgtccagaccccttctttaatttaggtcagtcctcaggtcatgtgcagcacccaacctatcaaacactgagtacctggtggccttggtgtttgacttgtttggccagcaagttcgccagagatttcagttggggtgaagctggtgtgtataactccacccaaagaacggtccagcaggatctggtcgtctaccgtgcggcccacaagttggacctgtggccgtggagtggacggttgaccactgtgagtttgtgtggtatgcccagcagcatacccttctgaaccgctcaagggaaacctggacgcaatagccagttggtcattggtgacttggtaggtctttcttattagcatgatggcctgcctcgtgcgatcatcaatggctgcccgctgagccctcaaagtttccatctcctagtccctccattctataaattgaggcctttgttcgtcaaatgcaaggtttatggctgcacggagatcctcccggtcatggtgaaaagcgttattatgaccttgcatgagcccaagggctactcggagattttggatttcaagatcgtctacaactggcctctgagcattagtggtagacggaacctcagcgttgggagtggattgatcggctgc

SEQ ID NO: 71679 - DNA, 1011 bp, Cannabis sativa
  modified_base (763)..(766): a, c, t, g, unknown or other
atgaaactcttctaaaattgctctctatagttttagtgcctaaccaatttgaataaatcaccttaaaattcatcaagacattggtcaaatgataaaataaatcacctagattttcatttaaatactaaagacctgagaattaacaaagtcacaaacttgaaaaaataaactagaataaaaacatagctcaacaaagcacaaaaaataaagaaaattaaaataacacaaatagacaagatcaccactactaatctcaataaaataagaggatattctaaaatccaaaggtaagacaaggccaagagaccaccatgtcaatgagatgggtacatctatattagctatcctcacaatatttctttattttgctattttttatttttcttatattttctttgtatttcttcactataaatacaatgttcaataacttaatcccattcatggattccctaaaaccctcttgtatttctacaacacactagtaagctataaatatattatattgctatatgattatatatgatactattactacctctgttttaagattcaaaagaatggaataagaaatcatatacacatttgtatatatgaaatgatccctttcaatataaactattgactatatgaacaacttgaattattcttatgatattcaaatgaccatataaaatttctttccaagactcaccatgtcttaatgttgatatcgatcaactttgttttgataaactttctctctctcatatatatatatatnnnnatatatatatatatattggaaatgtctatagtggagaccttggttttgtctctatgattgagatacttttatagctcttgattattgatctaatagtaataaagttaaggaaacatgatagtaataattaaacctagcttatagtattttttcacattttttatctttacactattgtctttttctttttcttctttcttttttttaattttttttttaaaactaaatttaatagttattttatt

SEQ ID NO: 71680 - DNA, 1383 bp, Cannabis sativa
actggcctcagagctatggtaatgatttactatttgaaaatttagaaaaattcctaggtgtatgaccttaatttcatggaattttgagatttatgttttataccattttacagtatcggggactgcacgtaatcttagcaactatatccttttatagaaatcaagtcaaacgtagttccaatataaattttatgacactttgataattaagagttgaatgacctctttttgggatgtcattttttacttttgaattttgaggtaatattaccattttttttagatttttatgaggttagggacctctttgaaattttgtgaggtgaatgacctctttaatattccaattaatttagatgaactcatttggaattttgtgtcattttgtatgactttagaattttaccactttttgtgacaatttgagttttaaaatccttttattatctttttttaaaaaaaggattatttagttggtattttaattatttattccaaaatttagaaaataataattatttatttcttccttgataatatctcaaatttaaatttaatttaggaaattaaaatttaagatattgtgtgtgatattatcattttagttttctatttcaattatataaggaaaacattaaatgatatatatttattgcattgttgctcaaaaattgtaggaaaaaaggaaatctttctttattttaaattaatctaggtaggtgtgaatataatctgcctttctttttttcctaatttgatttttgattcttttttaagatgaatctaaaatattaaaagtaaaacgatgtttattatttaaatattcttttttttttaatttttgattttattatggctaactctattattatataaggttaagacttgatagctactcacaaataagctatgtgggataaacacaagcatttttaaacatctgctgaaaaaaactaaatgaaatttaaataaattactctttatggttatcaatttcggtagggtaaagcaaaactttcatatttaaagtattaaaaataaatacaaaatacaattttacttatgctaaatttatagcataagagtttactaatataagttcgactcatcaaagattataagaataatctcttaattacaatcattttatttaaaggaaacaccttttgattccaattacgatgatattaaataattagaataatttggaaaaattttggagcgaatttagaattgcaattcaactcagtagtttaattaactgagctgactacataccttatttatgaaggatcaagccatgtagttcagaatatgttatttttaagaatttgaatataagaatttcggtatataaccactttcaagaattctttgctattt

SEQ ID NO: 71681 - DNA, 1924 bp, Cannabis sativa
cagaaccaatgtgtgaacgatgaaaaatcacatttcagtggtgttgtaaatggaacaattcatgtggttactggaggaggaggaaaaagtttggctaagtttagtagcttgtctcctgtgtggagtgtctacagagattatgattggggatttgtcaagcttactgcctttaatcactcatcactactctttgaatacaagaaaagtcgtgatggtgaggtatatgactcttttactgtttacagagagtacaaggatgttttagcttgtgtccacgacagttgtgaaccaaccactttggcaaattagaattctatctaatttgtgatcatatataacctatatttatcatgataataaggacaaagagaggagtataatggttgaaacttcaactttgtattaagacttttgtcaaggatattggattgactaataatattatcaattgtttatctattttgagatttctctactttttaagctttgtcttgaatcatatgtttgttactgtcattggctagcaatttttttctttttaatcaacattaaataatgcacaacacactataaattattcaaatcaaagaactatgatcatctcctcagtctcttcgagacacaagacaaatctcgtacaagaaaaactagtcaattcattcactgttatgtttagttactagtcaccagttaccttttgtaattaagtgagcggtccaaaaactatataaggggtgactcatttcccattccccaactgagcaaatagaaaggttttgagagtttttttagggtcgtaaatgattagtgtgtgtttgatcaccaagtcctcatgtgagatttttatgtaaataaattattttagttttattttttttttttgtttcagtaatgtacataagcttagttcttgattaataaagtcaaagatagattctcatctttccttatgattgtgtctctagtttgttatattaaattcttgcctattctcattatgtgtggatcgatatactttgttgattaagtcttgttcatttttgatcttgtttctcgggttcttaatgtgttgttcttgaattgaggtgattgaaaatcacaaaaaaatggtatcaaagcaaggttgagagggctccaagatttcaagaacagtttgaaggttttaagaactccaatcaaagagtacatcggcaacgttcgaggtgcataaattcatagggactaatgactttagcctatggagaatcaagatgaaagctcttctggttcatcaagtaattgccatagccattgatgaagagctcatggaagaattaacgaatgaaaaaatgaagaaagaaacaaaattgaaagctcacaatgccatattgttgagccttggtgatgatgttctctgttaatgatagcatttagcatcagttaatagttagttactttctgttaattagttggttagttttctgttttgctagtagtcagtttaaccaattctgtaactaattgctttgttcttcttactgtatataagtttttttctgttctgatgtaaagtaattcattcaataataaagaatatctttcttctctctcgttctctctttctctctaaactcaacattctcagagaggtttcagatcaagatttaactctaggcttatggaaaaggtcagcatttattttaagaaatcattggctaataaattgtatctcaagaaaaagttgtatactttgaggatggatgatacaaaataattgaggaaacacttagatgactttaattgagtaattttggatcttaacaacattggtatgaaattaatttttcttttaattcttttaaatatttataattattttttaaaattaatattatgtggaccattaaaaatttaccacgtgtacaagtgtgtacacgtgaacagt

SEQ ID NO: 71682 - DNA, 3850 bp, Cannabis sativa
  modified_base (1178)..(1184): a, c, t, g, unknown or other
cgatgtgatactttataattgaataattttttaaattttttattaaattaaaatttatagaaaacaatattaaaatttagtgtgagaatagtacttacggtgttctttaccatttttcattattatttttgtcattatgaaaaagaagaatatgtacccggccaacagttttattaaatactgttcttatttagaaaattgcatctctaatgtaccacatttgtatgtaatttccaagatggagccaaatttttctttcaaccaactatatttcaaagacttaagatatgtaggtatactattataatcatgaaaggttattttatttgactagtaatctaaattgatgttggcatgacgtttttttcctaatagaatcacacaaacatatttttcttttgagaaatactaaaaaggtcaccttataatatgctaaacattaagagataacacactgatattgatgcatgcatcttaatatatgaattaaagggctaatcaattataaagtagaaattaaaatttttcataaaatatccgatcgaatttaattagtataattttatccaatttaatctgcaaagtatggatttgattaaattgaaaaattcaaaatttatatttgtacggattgaatgatgattgatatataaaggtaaccgaggtggacccacatcgtagcgagagagtgcagtctccccctcaaaaaaaatcgggaaaaaaatatatacgtattttagttagttacaatatatatttgtattaaaagatgatatttatagaaataatagtacacttggtgtaatggtttaggtagattacatatatgttagagggtaaaggtccacagaaccaatccaatataatcttcacatatttatatgtatatttaaaaaattatatatacaattaatattttaatataagaaaataattatttaagaatctaatacatatgatataaatatatttaaaaacttaatagatttaatttacattctattattataatttatatggaaaaaatataatttaaactaaaattaatttttgctttttacatataatttttttaaaaaatttattattttattcattttaatttgttgttgtagatataaaataacaataatttttttattttattattaattatgtaaaaaaaatattttttaatnnnnnnnaaataatttaatattaaaaaaataatcaatttaaagtaattgatttaatctatatttttgtaaattgaatttgaatttaaattattgtgtggattggattaaatttaaaaaaaaaataaaaattaaatacactataaaaacaagataatatgaattgaatttggttgaacaaattatgctaaaaatagcactgctagtttttataaattactaagattgatagtggcatgtgagccgccttctataaatatggaagacccttctcatttgttttatttggaaagctgtacaaaaggattaatataaaacgtatggcttacgttcacgaaaatccttcaccatatttcaaaaaaaaaaagaaaaaatcgatctccttttctttcttttttttttttttaaaaaaaataccttttcgatttacataattgaatattaatttcaagataatttattatatgtattatatataaatatatattaaattttccaaaagtaatctatcgcaaatataataaactattatatgtggatatgcataatcaatcgctccaataacatgacacaactctctgtcaaatatatatatatatatagtagtacattatgcgattactcatattataaagtttttggtggatatatgatttgagaattgtttttatgatagaagggtacattttatagaataattttttttttttatttttagttataataaaatttgtgactaattataaattattttttatatattgtgattaaaaaatcagtagctaaatgtattactattagttacaaaaattaaaatttattgtaactaaaattaaattagtgataatttgtatctaaatacaatattttaattacaaataattttttgttgtacttaaaagtaacatttagttataaaaaatttatattatgattaaaaaattatcataaattttttctattagtaattatatattaagaatcccataattgtttatatttatatatatactacttgcacacgtaaatgatattaattgtaaaagtaatattaagtataaaacatatgtatatttaaatttttttaattagagaatacaatttttttaatttttaaaatgaagtttcaaattttcatctttgaaaattttgatctaggcacacctttcattaaaaatgtaaaataagtagtcattcattaattctaactgtttctatgatcttctagtaattttttttttattattttctatttttataaaaattagaatttttgttttctaaacttttatatgtattaatttgtgcctcttgaattgttcaaattattaaaaattcttcaaaactattaaaattattatacttaaggggcacaatttgatatatattaaaatttagaaaatataatttgatagatggacaattatcaccatgttagaaaaattaaacgaaattaaacaaaacttcttaaatctaacaattttaacagtttaaggaaatttttaattgtcaaaaaaaatttaaaaacataatttaatatatgtgaaactttatttgaaaagaaaaaatctgaattactcttttattaatacacctccgaatcgaatctattaagagttttagatggatttctgtcttgttatggaatacatagcacttacaattagagagtgattatgataaagttataacttcattatcacaagtcactataattatacaattatacaatatcttttattacttcacaattatgtcaagtcactataatcgtcctatgttttgacaatatataagacgcaagtgtacaatatgggaccggacgttatttttcccacgtttatttaataatagacttttttttattattgttttcatcaacggataccattcatttacctaacttttactgttgaaaaatgctaaagcaccgattgtacctaatattacccaaaaattatcttattattggtaaaattaaatattcaatttaatacgatttaatttaattactatcttgaaagaaaaatactaaaatattttaatggtatttagtactttttctttttatgtattatattgttattggtacaatttagtattagatttcatataatttttattaatttttccgaaattaataaaatattataatttttaaaattaattattttaataaaaggggacaaaattttgtattggtcatcgagtaaaaatgctattaacggtaatagaaacagaacctaacaaaatgacataattatgtaactgttatattttaaaagaattttttaacaagccgtaggttttaagaggtaaaattagatagtgtggaaagtttaggaaaaaaaatattaattattttttaatttaataacttttggagaatatcgatcgataaccaatcgcaaaacatcatctatattgatagggctaggtattattggtacccaataatagtagtactaactattttcaatgccatatttcatgttggcgctactcttagaaagagaaaaaataatatacttataattcagaaaatgaaattaatttattaattaccataattaaaaataccttatataggttacggaaaaaaaaaaaaagaacaaaagggagaactaacccctattgtctaattaaacaaaagagattttatcctcataccatgc

SEQ ID NO: 71683 - DNA, 1198 bp, Cannabis sativa
tggctagagagcctcgatgcatggatgcactcatggatgcttgcgagcatgactcggcgggagttgtttgagagacggaagtgtgcacggggtacacggtcgcgaaaaaaaatgagccattgttactcggatgattggaaagctgactttggcttagaaaagtcaaggtgtcgtgcgggtgttctgatgcctgaaaaggtgagcccgtgacaccaagtattcattattcaaacaaaaactcaaccatatctacaagctaaacaaacataaaactaaaaactgaaacactaaacactaaacacactctaaacaagaaaataaatctagagttaaataaatctcgacaaacaaaagcaagatcatctccgttgaaattaatattgtgttatatttattacaaaaagttaatttatcatatattttgtacagttgggaattaacacacttcaagaacgagttagtttcaataatgcaaaatgataattaaaataaatccataaaataacaaattataacaaactgatgctaggaaacaatgttgtaccattaaatacaggtaacaccataagttacaatgttgaatctcaaataactttattacttagatctaatctccggaatgaaccaccttgtgaccaatctttattcagaagagagttgctcataattacagtaattgattttcaaagatcaaactcgaaatggtgtcttgcacgtacaattttctcacttaaaggtgttgagatcaaacacggcccttgtacacccctcttcactcctctttttcttctcgatttctctctctaaattgtcacatagaactaagaactaagaactaagaactaagagccctatatagacacacacatataggctccaagagattgagaaagtctagctaacaacctaactaactaaatgtcaaaacagttaagttagttgctaactaaatcatctcagtggctaaattctaacagttctacctaatttagtcaatggataacactataaaattaagctaaaaaaacaataaataaataattggtagttccatcaaacattgagagtgcctctgaacagaggcatcaatcttcagtaggcttaggcatagcctaaacttttctcttgtgactggtttggtaaacatgtcagctggatggacatgtgtactgatcttcttgacacacctttcgtggca

SEQ ID NO: 71684 - DNA, 863 bp, Cannabis sativa
aacttcttaagctttaatataattccacagtttataaaaaaaaaatatatgaattactccataataaaaaaatagagaaaagaaccaacaaaaaaaaagtgactacatccaaagcttataaattgtcttaacaataggattatatatgtagatgggtatatataaatatatatatatatatattaattgtcttcattagtcagaaaatcacttattcatcatatgtttgaagattaattatttaatccctataggctgtgtttgggcgtgcaaattaatgaagtgttttattaattaattatctaactaattagctagcctacaaaaacttaaacactcattaatccaaacacatgcaatagtaccaataacaacactaatcatatacactttttttttttcctatatatatatttatatttatataaagtagagaataaaacagaatacatgaacgtgaaagacactataaatcatacactaatttccacatattaatttaaaccctaaaattatcttttgctatctcaatttttagaggtgcacttaaagaaaagtgtaataacactaaaaattaaataagggattattacattatcaaaaagaagctatatatatgtggttgttatgaacaattaatatatattttaaataataataatataaattaaatataatacaatttaaatatattttttaaatatataaaatttaatctaatttaaaatttatttataagaaaatatatataacttatttcattaaacaataaattaatatttaaataagtttagatattttaagtaatataactaataaatttattataaagtatgattaattaattagaataatatctaatt

SEQ ID NO: 71685 - DNA, 998 bp, Cannabis sativa
cttggtcatccttcagtggttggagtggaccatgttctaggaaaggataccgagccttaggttcttgatcagaggagcagcgacaccgatggatctctcctccatccattatcagcactaagacacttgacaggatcagggagagtgcactggtaggagatgtctagtgtgagcagccatcgagggaccaacaaccgcatcagttggccctcaactggatggcatggtcagagtccaacattaagcagggagcagtattgcccttacatccctactttagagacatcactacatacttcagagtgtgcccgactccaatcaccctaaaaggtataaagtatctttcggcgatgttcattctctatgctgagttaggctggccttagccatccccttatgagatatgccaaaaatgtatccaaaaatgtttctggacaggatacttttactttagccaaattggctatcagtggttgggtgataccaacagcacgccattatcaaaggtgggaggatatgccgacaactaatttattgcttgggacatccagcatgtccatcattatcacttttagagagtgccaacctataaatgctccatcctcaccctccgaatgtaggatagagtcaatcatattctgtcactcctagttgataggaggaatatactgaggctggtttgtacaaccaacttcttgtgatatggtctatatcccccaaaagtttggcgttacaggggctaagggcccttcgggaggtccagacggaggaggcttgcccaggaggtggacatactcctaagatggataacgatatccccctttcaaaaattgtaaagaacttggagagaagagagaaagtcctcccccaaccctgtgctcgcgaaggcactgttgacaacaccactttgttgattaggcctggaggctaaggttctgccaggcatgcttgccccttgcttacatctagtggcaagggcaaggcggctactagcagtt

SEQ ID NO: 71686 - DNA, 1137 bp, Cannabis sativa
tttttctttttcttttttattaatttttctctggcttagtcattggttatatcagaaaaactaaaaagctttgactgtgattaatgttagaaaaataaaaacaaaaagttcttagcttgagaattgagctatttcactttatattcattttaataacacaaattaaattctactagtttttgtgatctcaaattctcagtgctatgagtgagagtccagcttttgaggtcttgtaatctaattaataaattgtcatcattggatctctcaaagtaacaataatagacaattgtctagctcaccctttgatcactacttgttaatggcctttcaaaagtgaatgaaccaatataagaaaagaaaaaaaaagcattattggaataaaattataattttatataaataaatttataaattatatatatatatatatatatattatgaagatataattattctatatttttttaatatcagatttataaaatgtataactaattatcgaggttattattaaatagagtcttacattaagattattaagattgtttagaaataatctttgctctcgatcatttggatccttaatcttcattttaatatgaaactcagttttgatcattcactcaattgctatgattttttattggcatgatgaatattctcaatgcatgcatccattttttcctctattattctagtttgacacaacaatcaatttagtattattattggcatacgtaccattattatttatatggaacaatatggtttcaaaaaccttcaccaaagaggatatggatgattagtaaactttgattgtatttttgtatgaaagtttatgtacttggattggtgaacaaattgttacatatgtcgttttacctttttactacttttaaaaattattaaaaaaatatgtatatttattacaagttttttttttttatatttggacccctaataagagtaggctctaggtacggacttaatccaccttagactaggactggccctaaatagaggtgttctttattgaggaaattacactctataccctttttatattgtcctctttcatttttactctatttttaaaatctattatttttacctctttttttaaacattgtacca

SEQ ID NO: 71687 - DNA, 1127 bp, Cannabis sativa
aaatatatgtaaagattatcttttaggattctttaattttaatttaacatgacattagttttataagttgtttaaacttatgtttctataatatttattaaaatttgaaagcatattttcctactaattaatagttaaggaaatatggaagcaactctcatatttatatacaataataatggcacatctagcaataaatagtagatacaagtcaacaaggttacaactatcacataaaatttactacattggatgtttataatttttttttttttcctcaaaaaaaaaaaaaaattaatgacttgaagatagggctacacaaagcttgtctaaaatgaaaaagacataagaccatcttttattataagagagataaatatcgtactatacttgtcacaaaaagttaatatataatgtatgtgatttaatattttttttttcaagaaaaatcacttttattaaccagtaaattcagctaccaagtaaggtagcaactcagttgggacattttctaaactgaaactacgatgagggtgtaaaatgaaaactctagcaaaactatgaattactatattaactgatcatttaatgaaacaatttgagacatctttcaactcattaaggatacacttgcaatcatttataaccgtaccaaataaagagatcattttgacatgactataaagtgcttgtaccaccgtaagacaatcagtctcaacaaacatgttggcaccttctcctcttcaaccaacttaatgcttcctgaactctcattgcttccgcaagagcaggatcagaggcttcattaaaaaatcttgtgaaacccttaatgaagagtcccttattgtctctgacaactactccgactcctgaccaagtctttttctcgaacaacgctacatctacattaatcttaacactattaacaggtggacatatccaatgttcagctccatcacctgcctggaaactaggccatgatatctcaatctgagaattttgaacgtttctctattggtcaatatagttttttactcaaagtttagtgttatgctccaatgtaaaattgtgaaagttcctcgtcaattttttttttttttttcgtaaaagttgatgcaaaaatcaat

SEQ ID NO: 71688 - DNA, 1451 bp, Cannabis sativa
cggttcactatccccgacccatcccaaaaatctgaccaccctctctctcctctcgcaggcttatactgtcgcccaggagacgcaccaccgttctgaacgccacgcaactcgcacgaagctcagttcgcgacgacaagctatgacagctaacccccacaaaccactgcgacataccacgacaacccacaagacctctctctctctatcttctctctttctttctctctcttcaaaacacaaaagacaaaccccataaccaccacctgtggagcaccgacgacccacatctggtcaccttacgatcacacgtgccgtagctacacgaccaccgatcaatggtgatcttacacctcaagtttagtggcaatcagagcaaggatgcaaccatacgaaaccttcgaagtttcatcgtcaaaacttttaggcgacattacgatcaactccggccaccatttgaaaaatggttggtaccgttgaaatcaccgtcgcgagaggaacatccctcactaagtcattttgcttaactctttacttttcctgatgagatttgggtatctccgaccctttgaaagcatttttcggcaattccgatgtttgtttaggctaacgggtagtacatctgtgatctactcgtcaaggggtcgttttgatatatactacccttattttcggcgatatttacggtacaccgatttctaccaccatcgatagttaatgtgcactgcttaggtgaggttttagaactccaaaatttaaatatagtcatattatatgtcgttggactcagttttgaatgtaaaatacaatgatgataattatttagtcatttgatggtacatgtgagagtgatatctaagattggactaaacaattggagctttagacttgagagcttaggataattttttggacaaagctcaacgacttgtgagaggtagggactcaacttgattattggacttgattttatatgtgttgaataatattagatatattccaatttttatgatttgcaaattgtttaaagaattgaaaacttaatctacatattaatctggactgttctggggcattgagtgccaaatatatttttgtacaaatatttatgcaggttataatttttaggtttattcaaaatacaaccgttatgctgctggattttctagaaataaaagggaatatgttcttttgttattcttattattttcttgcttttggttatacgtatgatagccatgttgagcatgatttgtgcatattgttatttcacgacctaatctatgtgtcatcataggtagatcaggtgtgcactcacctgtaggtgaaatacctaaaatctgtacaggaagtgcattaaatttgagccccggtattatggtggttatcaggtgcgactacccagtttttggatgtcgttttctatgattggtattgagagctaggagtctagt

SEQ ID NO: 71689 - DNA, 992 bp, Cannabis sativa
  modified_base (894)..(898): a, c, t, g, unknown or other
ggtaatgctgtcatgtcatatattttaaatattaaaaactgaaaaataaatttgaacaaataacataattaaattgtataaaatatttaaaattagacattaaaactgcgagtaaattatggtaaaattcttaaaatttcttacctcgctaattattaatctttaaaactcaaattttagcggtaaaattccttaatctttaaaactcaaatttttgtataattctattagcaatttgctatttccatctaattttagttgttagttgtcaaggtagattgtccacgtgtacacgacgtacacgtggcacaattttattagaatacctaatttaattatgtaaaaaaaaattgaaataactaatttaacaataaaaataaattattttataaataaaagtaaataaacatttttttctttctcctttttcttctcccttcttatccatgttttttttttttttcatctgcttcttcttcatagcaacactaccatcaccaccccctcacgaaatacatttctcactcaaatccattcacaaacaaaacaaaactaaaaaaaaaatcaaagcaactccccaaaatccacaaccaccacaactattacaaattatcaatcctaaactcataataacattcaatctcaatctcataacaatctgcaagatatcaaatatcaaaagggttaaaaaaacacgtgatggattaaaaagtctttttagagacaagaccagtctccttaagtaaaaccttacaaattcattccaataattcccaaaattattacaataagagtatttatattgctgagaaaaagaaaaaaaatacctcttaacagaattagttgctccactcgctctctttgagtgcctctcctgttgggttttatgccctnnnnnaaactctatttcaatgtaatccattttattcaacatcaataaagaaacagaagtatttttcattcatttgcgtatgttttggttcatcttatca

SEQ ID NO: 71690 - DNA, 1652 bp, Cannabis sativa
tttttttttttatttctttcaattagttagaaattatttgcataaataattaatcatctagatcaagtacttgattaattatctttggagtctcacttctcatgtctttgaagcttgttatcctagaagttcgagttagagcaatgtttatctttgattaagttcacccatagcatgtccagattacttacaattgaccatcccaggttggccaacatgcaaaagttaatatctttaaaacttctaatgccaagaccccacaactcttaggcttgctgattgaatcccaacttagaagaaacaagaacctttcatttttgtttcttcctgtccaccataaaatgtaatcccaccgcttcacgcttccattggacccttacaccacagaatgatgactcttatatattcgtgtacgtcactttggctgcttcatggactgacgactgatcctacagatatgagtatttcagtgtgctttgtcctcactcacacacttttggggagaacttctcaagaggtcacccaccctgaaattatcttaggtcaagcacgcctaattgtggaattcttttgtaatgtgcttccacaaaaaacaagatgcattttgttgatataagtactactaatcaatctatttaagctctcttcaattgtgtagtctcagaatcattacacttgacctttcctagacgatgtgagattgtgcagcttacccgatgtttcccttacgaattatgggactactaactgtcacaaaaaacatctaactatagcatcaatgatattggtagttttgacagggagatccaagacaaccattgaatatatacgaatagccgaaataacatttctaataagaacaaatctagcagcttgcgacagtaatcagccccccatccttccatacgatttatgactttttccacaatgaacttaaactattagccatattatccatgagaattagaggccaatcataacttacattaatctaaagggtataataagaatattatttataaaagtgagtatatctcaaaaattataaaaataaaaaataataaaataaaataaattaaatatacaatataattttctcgtaatactcactactaattgttttgtataacgtatgattataacccttgacaatattgggggtagttactactattaatggtacttatgtcatgtattgtgatttttatttatttatgtttgcactacacattattaatttaacatttgtaaaataccaaccatttaagtaactccatgtgagtccgggacttaaggagagagagttgctatcaagtcttggtcctctcccacccatctttactataattattattattattcaaaacatggatattttatataaattgaattatacgatcattagtaatattttataaaaattatcttattaaattatatagaatttattatttaattatactaatagcggtatgatactaaaaaaatatgttgagcactaataatatttttttaacaattctctatttttttattacttgttttggatgtgaaagtatattaatattattttaaattttgtattttgtaaaaataattgattaaacattttattttattaaatgataaattaaattttatattttttataa

SEQ ID NO: 71691 - DNA, 1071 bp, Cannabis sativa
agcggcgataaacgcgccgcgcgtggttgtggaagagtactcggccataatagtagcagagagtgggtaatcgccgccaataccgaagccgagccagaaacggaagaagcagagagtgatcattacagctgttggtgagctaccgaaggagagagccgagccgattgagctaaccaccattaggatgagagtgacgccgtagacgcgcttacggcctagcttgtcgccgagccagccgaagaagagctgtccggcaagagtaccacataaagcgacgccgtttacggctgcagcgacgtttggagggagagatccgggtttggcggaggaggggatgtggtaatagattcggcccaagagttttgtgacgagtgagatacagaaaagatcgtaagcgtctgtaaagaatcccattcctgttataataacggcttttagatggtaacattggaatctggctctatccattacgctgaaattgaacccattctcatgatcggttctctgtactactacttcttcagtagtagtagcagtgggagtaaccgccatggctaatgatattaatgcttttcttctttcttttcttttttctgattgtgaatgagaaatactaatatgaggtcgtcgagggtatttataatgtttgataatttttttcttaattatcttttttcgtgatttttcttaatagttctagttagagatgtttcttttttcgtgtgtaaaatctggagatatttcaatgtgtgttatacttagatattaatttaaatttaaattttactttgatttctgttagtttaaatagataaatataaaatagtttgttaataatggataatcgattagttgttgaattgaattactttaaaaaatctttttcaaaaaaaaatatattcggatatttgtcatgcgtaacctacatatattattattattattttaaaaaaatataacgattaatttaatttcttttttctatataaaaaaaaaaaaaatcaagactacttctatcaaaccttaaaaaaaatatagatacattaaatatttaaaaacttgttttagaaa

SEQ ID NO: 71692 - DNA, 1428 bp, Cannabis sativa
tcaatcactccatcacctatatatgtacaatttgattattaatttagtagggaaatttttgtattttacaataataatatgtaaccattttttttataaatgaaaatatatatttctttttaaacaaatatatcctaataataaaaagaacacatactcaatttaattattagatttaatcaattaattaaatttaagtatatttgtcccacattacacttgagtactacgtaataagggtgttcatggtacgggtggtgcgagttgtaatatttttttaaaccaaatcacatatatgcagtttttataatttctcaaactgcaaccgcactgtgagatcttaaaatcgcaaaaatcacactgcgaaaatgcggtgtggtatcattattaaacaatataatgaaaatttaaaatttaatctttttaaagttttaacaaaacaaaaaaatattattaaaatttaaacaacataacatatatactaatcatcaagtcattatattaaattgtctcttaaaaaataatgtagtatatatcacatattacatatattgtaaaaattagtaattcttataatatatagtgcagtacggtttaaactgcaattattaaatttcaaactataaaccacacgaattagaaaaaatgaaaaccacaatcgtactgtaaatgatttctaaccgtattttttatgtagggtagtgcaatgcaggcagtttgtgctgtataacggtttgatgaaatcttaaaaaaaaagtaattaatgacgtacctttgatcttaggattcttgcccttgttgcgaataacagctgcatgcataacattcaaaccattccttccagaccaactacccttctcttccaataatattcctcccacattttcaattttacttaaaatgtgagaagctatttcataaagctctctatcgatagccaagaacaacggtgattctccgtcttcattattcgaattaactaaactcgaatctttttcaagtaaaaacttaacaatatccaagtttagattcttaacagcttcatgcaacaccgtatttctcgtcttatttggctttcgtaatagattaatattcatgttatctacgatgagttttacaacctcaaaattccctaacattacagcaacatgcaaaggtgtgtcaccattatctttgttgtcagtctcagttagatttagatttggtgatgaacttaagagattttgaatctggtctatgtcgtcggacttcaccgcgttaaaaaaatgcaagatcttctcatcattagaacattcaccatcttctatagaaatcgacttcatctgtgtatatatatatactagatagatgttacgtgtcaaatcacgtatgttaattttattttagtttttactttttttaatatcataattttaaaattaataatat

SEQ ID NO: 71693 - DNA, 1715 bp, Cannabis sativa
agagagagagagagagagaaggatgagttctctaattttttctctaaatgaataaagattaataacgtaatctttttctgaaaatagtaatggctaggtgtccacaccctaggctgccacctaattcctcactttaaaaattactaaaatacccctttttgcttaacttaggcaattaatggtctaggggtaaaatggtcaaaaaccataaccctgccctaacccagaattctatttttctctaataaatattccactaagaaaaggttctagacttacctttgtgattaacatagtcatccatcgtattttctgttgtcgccgagcaaaaattataaaaatagcataattcaaatataactaaaataatacacatggagtttaataaaatctccagaattgagaaattataactctaatgcccatttctaataatggaatctacaattaaataagttcataaataattataaaaatatcaatagttagtgctaattgcctttactaatccatattgtaaaatgcagtcattataggatatgttttggcaaattaaagacgactacaatatacatgacatgaatatggctggaataatcaatacgatgataagtatgaagttatgtgatacctcagatggctaatatattagaagaagcaattattgaacataactattagattttatcggcattacagattgaaacttcacaagtatagtaaagtagtaccaaagtagataaaagttagtatagaaaactagctaatccacaatcaattctacttgattgaaaagattaatagagcatcaggcactagcatacaaattaggaaaggagttatagtagagtggtataagaatcaagagactacaaaatgagccagagactattatccaaacaaatggaaggtatgatgagtgcaacaaatacaaggataaaggaaattaagaagtaaacgttacacaaaaaggtggtcaaaatggatcattaaatatttatatatagaagaccttttaaaaagcttccatatttatttctaagtaccgtggaatgagtatctatcaatgagtgagtcacaactattaaactgaaagaatgacactatagctttacggtataaaattaagtagaaaagtaagatttttatatgtaataacattcaacgaaggaatgggaataattaaagagaagtttgtataaggtcttctactctactctttgttgtttgatattcttgtattgtataatgtgttctcaagtgacatgtaaggatgttcatttagagaataaatagttttacacttaatgatatgtaaagatgttcattagagaataaatactttcacttttaatggcatgtaaggatgttcatagagaaggaaaaaaactttttttaatattacaagcatatgattgcaaaacttatgtaattaaagtatgtatatgtaagttattatgatggagtacattttggtgtttaagtaatgtatagagaaataataatacttaattaacttgtgtatattttatttgttgtggattgaccaacaagacaaaggttaaatatatatttgttgggtatatatggtagataaggaggtaatgcggtaagtggtgagatgacatgaagactcatcaccccgagtgttgtaaagttaaatttcgaggacgaaatttcttttaaggagggtagaatgtaatatccagattata

SEQ ID NO: 71694 - DNA, 1079 bp, Cannabis sativa
  modified_base (394)..(394): a, c, t, g, unknown or other
gttgcaacgctagttgcaatagaagtttctatgtagaattccgtaaaaatgtaaaaaaaattattttgaagtgtaaaaatgaaattaccccttaactttatcactcaataaattatttttttgtttatgactgctaattgaaaattattatattccaacaatctaataacacttcaagcaaaataataaattattcaatatgattaattaatagaaaaaaaaattatatttatgtatatatcactacaaaaatagctacttttaatgataactttttggtcacaacataatttttttgtgactaaatgtgacttttaatctcaacaaaaacttacttgtaattaaaacatagtaattaaatacaagttgacactaatttagttttagtcacaanacttgttgtgactaaaaatacatttagtcccaacaaattgtactttttgtgactaatactatacaggcatagaccttttagtcacaatatagaatagtaatttataattagtcacaacttttgttgtgattacaagtaaaatattttaaatgtatatctaaataaccaaaataattatttataaagaatttaaacaatgcataataatattgttgatataaaaggtaaaaaaaaaaattgttacatagaagaattaaatgaaataataattttaaatattaattatatataatattaatttttggaatttataaaataaatacattaacataaaatagtgagtgggagaaggggtacatattaatgtaatatacgatcttccttattggtcaacactgaaggagtataaactaatatcgcgacggcttttgtaatatcctaagattaaggagctggattagcaaaccataattagttaaatgtgtattaatgtggaattttattattatataaattaatatatatgtgtgagaattatatatgacacaatgttaagaccccgttgatgagccatgggcattttcataattttaacccaagaagagtaaaactgtaattttaatgttatagcgtgcttatggactatattattatatagtatatttgttctatccttctgcatgac

SEQ ID NO: 71695 - DNA, 895 bp, Cannabis sativa
atataattagattgaatctagatagactatataaaattagttatggttaataaatacccctgtttagcatatgggattcgaacttataagctcttgcattcaaaggaagtgtcccacaactaactaaactaacatttctcatgcatttctagtatattatatataaatatatatatatttatacagtaattaatacagtcggttatggttaatattattttttaaaattgtaaaaattgaaatcgactgtcataatttaaaaaatttaaataaaagttgatatcgaatattcattttttgttatggttagttttgtggtcagttacaattgaaaattttacttttcacgcttatacaatataatataatacaatcaaataaaatatagtatataatacaaaacaacacatactattatagtcatggtatggtagtattactcatactctttaacatttgccatctgaaatttgctatagtaatcatgaattggttaatttttcttctttagtatttagattcaatagggtgtgagttggccgataacaagtggaagttaaagccatatttgaagggttgacttagaacaattttgtaaaggaaacaaccaaacatcattaataatcttttaacattaattattaatcaaccataatagaaagtttaatcataatgagagaattgcttttttgacttcaagaaatcacattagggtgttagctcttagttaagcccccactccaaagtatgacacttgtaattaactcatatatacatagagaattgttaaaaattactgtttagcactattttcggtattatactactatcaggtttttatataatttaagaaaataacttttaaaaaatatcatgaactaatcataaaacacta

SEQ ID NO: 71696 - DNA, 1360 bp, Cannabis sativa
ttcaggtcgtctatcacacttgaattcaaaaacaaggtaagactagcgtagaacatataatatatgtgattatgtgtatgtgtgatatatgcatgctatacgtgattcgtatactgccagcactagtacggtagcagtattaagtgcattgttaccgtgtacgatgtttaaatagtataatccgatgttaccaacactagtatagataggtatggagtgtatgtggtacaatactttaggtactcgaggtaaggagcgaaccctaccaacactcgtacagtagcggtacgtgtgcatgtgctacagtggtcgtatctttgtataaaacgctcttacttatctaataagctttatggataggtgtatgggcgcctagatacaagttggtaatatattgtatgttatgtgcttttcttattgagtctgttgactcacaaatattattttcgtgtgtaggtaaaggaaaggcgaaagctgaacaagaatgagttctgagctcagggatgattgtacatgctagggcggtgcaacctggagtgttcggtctcaagacgacttggacagtattttgtagtcattgtgcgacgtatctgtaaaagctaatttgattatgtttgtaaagctttaaatacgggatcccagtttatgtaaaatatatatatgtttataaagtttaatagtttaaataaaaaatttattttgacatggttttcaaggaaaatcttttgattggcaaaggtgacacaataattgaaaaattactgtagcacgcctaagtattagggcgttacaaacaccatcacctaggcccaactttatcatctcgaccctaggtgagtgaccaacaccatcacttaggccctaggtgatcatctcggcccaaggaggtgtcaacacactcgtttgtctcgggcctaagtgatcaacaccacaccatctcctatgccctacttggccatctcagccctgagggcctcagtgtgtcatcttggcccaaagtggggagtgcctcacgtgcttctcgtgacttaccatgatcttagcatgtgttcctcgtgacaaaaagaaactatggattgaagatatatttgacttttatcatttttctagatatttgtttgaaatgttattttattattattctgaactctaaatttaactaaataatagttggatggagaatatatcgaagatgaaaatctatgtgagtcttagatgaacacctatataagggaggtgatatcaattgtaaatgacacactttaaacactctgaatacactaaaactcatcctcacgaactcagactctcttactctaaaaactcacttagggattaaactcttggagaacataactct

SEQ ID NO: 71697 - DNA, 2851 bp, Cannabis sativa
  modified_base (2474)..(2474): a, c, t, g, unknown or other
tattagatagaatacaaacaaacacgtacgtggcaggggcaaaaagaataaaagaacgagaacacgtgtcaacaaaacaatatgtagatgatagataacacatgcaatcaaaaaagaggtacgagatatatagagaaagatcacgtaaaagaaaaaggattaggaactggaaaaagaaaggcccccaaaaagaaatcttgactgttttcgaccaaaacaatgacaatcattaagtttaactattatcaatgagttatcgatatgttatcaacaagttatcgataattgaagcattgccaaaaaatatatacttttgtttttttattgattatcgtttaaatatcgattaattatatattgacaaattatcgataggttatcgattaagatttagcttttggttcttgacacaagttaaagtctgtgctatcgacatgttctcgatagttgaagcattgtaaaaaaattataattttgtgtttttttatttattatcggttgaatattgattgattatcgatgggttgttgacaaaatcttgataggttataacacaataaaaatagtctaattactagtgcaaaatagaatattataagatgcaaaaatggaaatagttgagtaagaacaataaatttaatacataatatcatatgttggtatattgtaatattatttttttatttgtatacaacaaattatcacttgttaaacaatagtgttagttaagttttattattacaattaattgtataatgttctcggttcatgacaactataacaaacattttttattacttaacagatttgttagtataaacaacacatatatgtatatgtcaaaagataaagaaaatgaaactttaagaattactcaattgctagaattaatataattatgaacttcaagaaaattatagaaaaataaagcaaacattaatgaaagtacataatcagctatccatttgatgaccttcaaagcaactttgacttaatgataaataaaaattaagtaatattatctaccaacttaaaagattttaatttagttcaatatgaagcaaaaatatactaattaatcaaaaaaaaaaaagtttaattgttaaatcattaaacataaaatgtactaattaatatgaagcaaaatatactaattaatcaaaaaaaaagtttaattgattaatcattaaacataaaatgtaataggagaataagatagaaagggaaacagaagtgttgacctcatttttagctaataacaatgagtcaattaatgagattagaaataataaataatgataataataataattaaacaaatagaacatataaattgtgagaaaagaactaagaatgtcttaatctctctcaaaagcacttataatagtttttgcaatttaagtgctctctagaaatactgtaatgaaatgactttactatttataggcaatgattacatcaattaggttccctaaaactaataataattaaaataggaaacttaagtacttttcttaaacaaataaagcaaaaatggaaactaagtagggttcatctgattttcttgtcaatgtgaatttgtctcataaaatagggttataattgtgacttgaatacttgaagatttatagaaagtatctcaagaaccttttgagaatgtatcgatagcccgtcgagaaaggtcttccctgaccttgggacattcgtgttgagaaccagtcgagaaagatcatccctaaccttgagacaatggtgtcaagaacccatcgagaacatgttgagaacccatcgagaaaaatacgaacacacagaatactctaaacaatgatctcacgatttcaataaaatttaaatcaaaaccaaaaaaaaaaaaaaacaaccacatagctctagctaacaaaaatatactatacatgggccaaggtagtttataaaataatttcaaacaaaatattttacaaaacacttacccattaatccacaatgagagggaggttgggcagaggtccttcaaagcgaggggcaacagttgggctgatgagggaaggctgggcggacatccttcacagcggttggtcgtatcccaacagcggtaggtggtggctgtaggtctttttttgtgcaaagtggttctcgtcagatggggttagagagagagagattgaattatttaattttaagtttcttaggttttgatgaaaaaaaaaattaaaaaatggtaatagggtatttcaggtaaaatgaggatttattaagataatattgtataaaaaaaattaatagggtatattttgtaataggaattgttattaagtataagaaataaaatttttcttataattaaaacaaataatatatcaaattataatgtatgagatcataattataactttcttaaaaggtgttatactattggagtgtttttattttagaattaaaaatgtcaaaaatgatgtggaagagagataaaatanaatattatatttttaaataatatggaaatttttagcacctttaaaaaatactaccattggatatgctctaaggtaccactatcattactgcctagcggggtgaacaaaatatgagtcaaaccattcaatccggccaacgcaactcattttttgtagtaaagggttatggtaagagtaggcaacgactcgttgggctgaaaagtgataggccatataattataggttgattatgggttgagcacactataactctataacccaacccagcccgtttcttaaaagaggttctaaatttgagacaattttcatatataaaatatattttacattcacaaaatatataaaaatatagattttatattttaataaataaatt

SEQ ID NO: 71698 - DNA, 1706 bp, Cannabis sativa
  modified_base (199)..(199): a, c, t, g, unknown or other
ctacgccacgtagacataagtaggtgtgtcagcgtaacatgcaggtctgtgatatacatgcatatgagattggcattattgtttatatagtatgataaacatgctattgatattatatactgtcttgctgggcttggctcacgggtgctgtactgtgcaggaaagggtaagactattgctgatcagccatgagtgcagnagctggacgaagaatgtacatgtctgggccatatcagaccaagcgggttgagggtctaccagtgttgtgtttttgagactctgttttgccgcttaggccggctgaaagaaaagaacttgtaataatattttgtaaatgtttttttttggatctcaacttctgtaacttttagtttataaagtttaaagtattataagtttattttcattcctattgttattaaggtttaaattcagggctaatttttttagtaatcctgtttaggggattagggttttgtaagtatcttgggtagcgtgcctaattatttagggcgttacaagctccttctacaactgcgcctaactttgcagcccaagttctggctgcagccttgactcttctcagaagcttggatcgacagtctagatttactctatagaaaaaataaagcagatccattggtccaaaatgccatcaaataggcattaaatgcagcatctgggaccgaggtaaatcgtatgatgaaattcctatcaagaattgcgccgaagtaaatatccgttaatttacttactttgctccaaatgcctcctcagtaaacagacacttcacaaaccaataacacagtgccacatgttgttttaaattcaaaaatggaatgttttcttccataataaatatttggaattcataaaactttcacctttagcttccacctgtccatctgcatagtttgaagcaagcctccacaacccataacgttttgaaagctggaggtaaatgctatctgtgtttctggtagctagcatatggattctaagtaaacgtttaaggctcattagtgagcattaaaaaaaaattcgcataattaacaacaaaataaaaaaaaaaaattatgtctcacacaacaaattataaaaaaaaataaataaataataataataaattaaaacaagaaaaaaaattgtatatataaagatatttaattttattttagattatattttctttatatataagaatggaatatacatttaagttttgaaatatatatttatatcatatatattaaaaatttaaaaattttattttttacattgaaatatatatatataaatatgtgtggattggattagatctattacttttacatgtcaaccaacatttaatctgcacaaataaggattttaaattctccattccaatccaatctgcacaagtacagatatccgcactttgcgaatttgattggattggatgggctatttcattaacacccctacccacgaagataggacacggttttaatatctagcatcatatgatgtggcatccgtatcagcatatacaaggtgtcccatgggtcagggttcaccagataagcctaaagtcaatgtattatttgtaaactccctaataaaaaagaaagataactagtatgacatttataatactatacatactcattgaatccatcctgtaaaaggttaaaaaatcatagcttgtttgctcatacaagaataga

SEQ ID NO: 71699 - DNA, 823 bp, Cannabis sativa
gtttttgtaaatctcagcttgaaatgctgagggatattttcattctatttatagagaaggtataatcattacagtatacaattgatcaatacaaggccaacacgtggctggtttgttaaagcaaaaaggaataaaaggaatccctatgctaacgaaaagatctggtgaatattctgataagagcagagggtatgatgcaggggaattacagaaaacccctaaccagatattacaatttcttaacaccacccctcaagcgaaggggtgattccatcagtccaagcttgttgattagaaattggaatctggtatgtgacagccctttagttaagcaatcgacaacttgatcgtgtgagggaacaaaccgtatctcgagcttttcttgtagaactttgtctgtaacgaagtgaacatcaagttcgatatgcttcgttctagcatgataaaccggattagaagcaagtgcacttgcactcatattgtcacaccatatcactggttttgagttcattttaaacttcatttcttgcaatagctcttccagccatgttatctctgctgcaagatgtgcaagtgctctatattccgactctgtgcttgaccgagctacaacggattgtttctttgaggaccacgatacaagtgtttcgccaaagaacacacaatatccagcaactgaccgtcgatcgtctgggaagcaagcccaatcagcatccaaaaaaccagtgagtgtcaggtgatcactcggtgttatatgtattccatggtgaattgtacccttcagataccttagaattcgctttgctgcattccagtggactgt

SEQ ID NO: 71700 - DNA, 864 bp, Cannabis sativa
tatatatatatatatcatataatttatatgactattttaaaaatataaatttcaaactaatatttttttatggtagttgatttgaatattaaatgcaatctatatagatttgtctcattattacaattaactaaaatataataattatatataaaaataaaaaataaaaaaattgttagtagttggtttggacgggttaacccgaccaaaccgacaaatttcattaggtgggttactatattttctttttcttaattgggtaggttgcatttagatttttgtaacccgatctttacgttgggttaaataaaatatagtataaaccgatcaaactgaccgacgtacaccccttgatagaaagtaaccacacaaaaatcatataatataattaataatatttttaaatataaatttcaattaacttttaataatgtagttcatcttttatacactgtgatagtacatataatattaataatttatagttaataatgatttattatggtatgatatttcggttgattcagataagtataatatatatttatttatttttaattttttttttttttaaaaaacaaagaaaaaatggcaggtgagagtcaacggagggaaaaaatatgctactagttatactacaaattatattagccttcaaaaaaaaattaaaaaaaggaattaatatttttcaaatatattatatacattcataattattttagaatttataaaattacactcaattaaaattgatttgacttatattattaaaaaaaatctcataatcgtttgtttgactcttagaagaagggaaaaaaaatgaaatctatataaaatatttacaaaatttatatttttaaatat

SEQ ID NO: 71701 - DNA, 1272 bp, Cannabis sativa
tgatttaagcgctcgtgtaaatcgggttgtctttgattcaaatgttcacaaagatctggctatctttgatcatgattgctcacaaaccttgtatctaagtaactctcagattgatagctcctcgtattactcatacttttttgatcataattaaggtgaggtttatctcctcctcgcgtatgtcttttttatcgactgtactctcaggatcttgtatgccccaagctagaacttgcctcgtcctgcacaggccttgtccttcgggaaaggttagatacaccaccccccctgccggggtatgtgtatgcctcctccctatcagttcgagaaggacgctgggggtgtctcggtggtaacccacttgtcccaggttgtgtcccaagatttctctcgttattaggagggatctcctgttccctagttctgggttgccttatgttctcatttctacgagaagactctggcacgccattattttcattcccctgatttgcaaatccctagggtctttgaggtactcctcgacgaggtgcttgattattctactgttcgtcttctggaacatccatagttttcccaggttgttcctcctgagtgttctggggattttctgtatttgtctcctacctcctgtttctcgaaccgtacaatccaaataacagaatatttcaaagagaaaggactaagcatgaattgatcactttcagtaacaatatcctatgccacaataagaaataactgaaataagaatgaaatagaggaaactagctaaagattgaatttgaaaatgcaatcaatagaaggattattcaaataataatccaccttcaaaagctgatctagaagatgagaagcactctgtacattagcatttgagtcgactgaaagcttacataaagcatcaaaaatctgattaaagaatatgataaaatctcctcttacacaacctgctcaaaaaacaagaatacatatcacatacaatatcaatatggggagttatcataattaagtgagtcagctaaccactcaccttttcaatattgtatagagcttcagaagcataatatctgactcagctgtcttggccagaaaatgaattcagcacgggaggcacaatttgcttgaaaataaattaaaagaaaaaataaaaataaaataaaaggttgtagttaaataaattcagctcaaaacataacaacaataatatatgtatatccaataataaaatacttgatggtttgaaactactcaatgtttactccatcactaaac

SEQ ID NO: 71702 - DNA, 645 bp, Cannabis sativa
  modified_base (296)..(301): a, c, t, g, unknown or other
agagagagagagagagaagggaagtgtttttctctaattttgaatttttttcttctttaattcattaattccaaaaaaatgcttaacattaagcattattcagccaccaaaaaaggcaactatcaagcttggaataagccacctaaccctccaattaaaatatgactaaaatgcccctttaagttaaaacttaggtatttctcaaaactaggggtaaaatggtcaaattctataaccctgctccacctcagtattttattttctccaatatatatcccactaagaaataaggttcnnnnnntacccatgtgatcaaactagtcatccatcgcattttccgttgtcaccaagcgaaaattgtaaaaataatatatttcacatataattcaaataatacacctagaatttaataaaatctccaaaattgagaaattataactctaatgcctatttctaataatagggcccacaattaattaaattcataaataattataaaaatgtcagaaattagtgttaattgcatttactaatctaaattactaaagcggtcattacatgctaaaagggttaaaaataaccgacgctgtagggaccctataacgttagttattatgaaaaaaccgacgctgtagggaccctacg

SEQ ID NO: 71703 - DNA, 1241 bp, Cannabis sativa
gccagcactgcatctgattcttcctctaaccatatgttcgaaccatcctcctcatccaccataccttgacgactgctagaagccataacagaactcctaaaaactctattaatcacgacaaaacaaacttttcaaaactgaaagcaatgaacgaaaacaccctaagagagcgtacacaaccatgtcagaagacaagaaatatatacttggatatttttatttgtatatttgagaaagaatagcgaataaaatatgtttatttatctatataggtgactattaaatggttagatttttattgtaactatgatgattaatttttttttttttttgacttgtaatagcaagttaccaataggtaaaaattttttttttaaaattaaattaattattttcttaaaataaataattttaatttgaatatttgacaagtcctattttagcaattaacatttataaataattttatttttatatacaagtccctattaaaattttttaacaattaaatagttgaattataatattcacaataaaattctttttttttttacaaaaattagacttccacatatatcttaattcaaaagcagaggtgaagatgaataatagagaataatttttatctaaactatatctacagatatcataatcgagtggggtggaagtaagaggactttcagaaactcatttctcaattaacacatttttttttttttggaaaatacattcaacataattcacatttcatcacatgattccaaatgaatttttacttttaaaattttttaaaataagtaaataaataaataagtgtaatacttttcaattaaggttatatgtgtaagaaaattttaaattataaagtcatatatgttataatttaaaattataagatgtttttctataaatattttataatttaagtaaaaaaaatttaattgctaaatgatcattatttagtaaaaagaatacaaaaaattaattaataattatgatttatttcattttaaaatatagttgatttttttttttttgaaataaaaaccataagatctattaattaataaattcgttcaaaacaatagaacacacttcagaggaacagtcttatttaaccaactgaaggacacgacctgtatagaaacaagagtctcttgccaagcaatgagccaacttatttacagatcattttacaaaacacaaattgtgaaggtataaaataccgctctgaatcgctt

SEQ ID NO: 71704 - DNA, 1136 bp, Cannabis sativa
tcacatacattcttctccacccacacactccatgtaaaaagttaaaaaatactacttgtaaactgtgtatggagaacaaagaaacatacaatacaagggacattaatgaacgagacttgtgcagtccgagtgaatacaggtttggtcccaaccttccttggtagccgtggaacaagcttcacgaaccgcaaagcattctcaaaggggcactaaacatatgcatctctgattcttcactgtgattacattacagcactgtaagctagtctccatagtctcatcctcactttttagagtttcttccaggcaaaccggtcgttttggtcgagccaatatgcagacatgatgcattatgcaagaagcgacaatatgaggaaatgattcacaaatctttcccacatttcattccattcccttgacccacctttctgccatacaagcttttaacagctcacccaatcattttcatcacaggtacagtactgtcatttagaacacctcaccaaatgattggttgtgtgttcatccattttgtaagctgttaattgtacatttaaaaataataagaatatgaacaaaaatacagccacaaacatttaattatcggatatcataaaagtgataaaattcagaataccataagagcaaactggtttgaagaacaggataagagagcaacatttcttgcttcatcataacaatgaagtgaagtaggattgacaagtaagtttccatctcaatgatttcgaaggtaatatgtatttattacagagatgcagaggctaaaacacctgttgctctcgcttgcttgtgtgcttctctagctgttggaacagtccttttcttgaccacacttagatttcttcattcattcttgcttgctcttcttcttctcaatctctctttctccttcagtaataaataatttaaaatcgatcaagtaaacaaagaaacatacaatagggattacatattttatcaaataaaagattgctgatatatcacaacgattaatatattaacacacaaaaaggtcacaaaacaattcaaaaccaagacaagacgaacactcatcatcatgaaagcactcaaaacttttcaatcaaaacaagtatcaacttatattcttctcctcc

SEQ ID NO: 71705 - DNA, 1437 bp, Cannabis sativa
gagagggactctacttcttcaatagctgaatccccttgatcatgatcacttcccttgttgagattttttctcttttttattatataaattataaatcaaattaaaatcagtactgaattcatatgtgtcatttgatatgtattatttatttattagaagaaaaaaagtggtaatattttcctttctgtcttcccaagacacctcacaccgcaagcaaacaccaaggcaataaagattgccgacttcttagtattaacaaacaagacagatagttaagaagaaacttttattatttattaaaaaaaatactaaaattatagttttggtgaactaatatataatgataaacttttggataggtttctctgtgaaactttattggagaaaatcacgttaaacataatccactggatcccacgtcggtagaggaccattttcatcgaccaaaaaaaataaaattgtatattgtacatacatatataaatatactttgtaccatcaaggacacccgattagtgtatattatatatattaactcaaatataagttgtagaaatatatattacctaatgttatatatccatccattattaattatgaaaaacttgaagtttccttcacatggaacgtggaaagatagtgggagagaaaataataagatgaatttggttgtgatgacgtacatagcggtggtcacctatatatattataattaatcaggggagttatttatatatatgtatagttaaattaatggaagcatggatggaaccactaattattgaatctattaatcaaacatcttcatcattgcccatttcaatctttatatttgtttatgtgtttgtttgtttggttggttggttggtctgttatgtctttgacattgtttgctctcaaatgtgtagccgaatgtctttgatcactttttagtgttttttagctacttggtagataagtggtgtagttttttaattggggtttaatagggcactaagtattcactaaccttttttttttaattggatttttcttgagtaagcacaattacgcatatgtgattgcatataaagtaaaattgtattttggaagtatttgtaggacggcactaataaactattccttttttgggttgaaaacatgtctttcacgagtcaataaaatggcatgaaaacatagatatatgtatatgatgtagtgatcagatcattcaatgttctttaatttttttaccaattaatcaaataaataaagttttcttaacttagcacattgattgaaattgtcattgaacttttgaaatcattcaagcttgacattaatattggataacattgtctcatggattaaatataaaagtattgaaccatatataagaacataggttactccactcatcactaattgattttgagagagaaatttgattttctatac

SEQ ID NO: 71706 - DNA, 1006 bp, Cannabis sativa
attaaatgggcattgacttatgtttatcaactaattaaaggaaaaatgtgaaaatctagtacataatagagtgatctagttctagtatcaaagagaatttccaaggtggtatatatttcactttcaataaatcatataatactatcatattattttataagtgagcctggatatgaaagaagagattatgatcaataaatgggcaggtaaaacaccaaggggaagaaaagtcatagggtcccaaaaagaaaaaaggagtggggtattatttatttgtttatatattttgagttttcaaaaaatatgatttgccacaatatggtagtaggttattcaatttaatatgcttaactactctgtctaccataatcttttctttggggctcaatagcttttataagcctttcatttagtgtttacctgctctttgtacccgtaattaggaacacttgtacatgctaatactattactatatatgcttttctaaaagtattttgtctcctttcaaagaaagaaaaaagtatttttgtccagccaaaatatgatttattttaacttttgcttcttaactagctaattataatttttaattatctattggccactacggtactaccacttgtgttggtatactataaattctttagtcttaatgattaaccagaaaagagcaaagttactcaccttccctttttgtactttacttatatgcactaattatattttcatttttatttttattatttcacaataaaactaatatttattgatggtataaaatccaaagaataatacatgtcctatactctattcctacttccttgattgagcatatataatacaaatattactataaaccctactaagtgatgttgaattgactattttttcaataacttgacatatataacattcatctgcattattatcattatagatttattatttgaaatatggtatacttgttatcagtaaagtatatatatttgttattcattattatca

SEQ ID NO: 71707 - DNA, 938 bp, Cannabis sativa
aattaaaaatcgatcaaatccaatcacacaatatataataaaaaaatatttatatttatttatatgataaaaatatatattaattataattttagtagatttttttttaatttgcaatacttaattgttttgtatgtttatttttattatattttgttctatttaattatatgacaatattgttattttagttatttaaaatttttagttacattagacttgtaacaataatatttttatcgagtattaaacataaataaacagtcatattaaaaatttgaaattaaattaaattttgaggtttaattagattaaattggataataagtttaattaaattaaatcggatgattgaggtttaattaaggatggtgattttttaagtattgaattggatggaatctctaacctataattacagcttttacaatattcatatatttcaaaagtgtatgtgcatatatatatatatatatacaaagtaattattttgccaagcactcctataattgaatatatatttatattaattaacttattatatatatataattaattttagggcaatgtaacaagcttgaggcaacaaataaaagactttgaagaggagagtttaccagaattggaaaatgtattgggttgcacaaccaatgattcacttccaaactacttgtttgtggttggagttggaggaaacgacatcgttttcaattattttcttaggaaaacttatctcactatggatcctcaaaccttcaccaaaaatctcactgttgttctagctcaatatattcaggtaagtaagagtttagtataattataacaaatatatatatatatatatatggaagaggtttcattggttacatttttattgtaaccattatggttacatttttttaaactattagattattattaaatagttgtgattaatt

SEQ ID NO: 71708 - DNA, 897 bp, Cannabis sativa
atatcttagtgtttgaacttcctaaaaattggtagcaacagggtaatctcagccttaaaatcaaatatcatgtttttttacgaattaacaaaattttctacaaatgtaccaaaaaaaaaaagattgaggtcaattcaaaatttcctcctctgtcttattatttatttattttaattttttcaactcataaatgattgatgtcataacctcacaatgcgacagcagatccatagcattgtacaacaacacagctcctttggtagtgctagcaggaagtgccacaaaacaagcatccaaattaggggagaacgcacacagtcctgaagggccaaatttatataaacatgtaagcatatatgtatatatacatgcaattattcaacaaacatttttttcctttttcttttttctttttttttttttggaaaaaagaatgatgattgtgaaaaactggccattctcaagaagttaaaatatatttcttcatcaccaacaagaaccacaaatttcacattttgtaaaaaaaaaaggagggtggggccttaaaaacagaaaagtactattagactaaacagattataaaaacgtggcaaccagcaacatttcaggattgaacatctatagtaactgttatactggaaaaatatttcagcaattattcttgcagtatctcttgtgattttcatatgatatgttaatggtaatatagataataagaaattcacatcaatgcctcaccttttaaattcggaactgtgtcaatggtgtccaagattgctagactattaatgtcgtatacataagtcttctcttgcagaacgacaacaagcctacacatgtaagactgtttatgaaagtattcaacagaaaggaaaataaatataattcaagatctta

SEQ ID NO: 71709 - DNA, 1033 bp, Cannabis sativa
ttcaatccatttgatcaggaccgtgcatttcaaaatccttccagccgtttccacccatataaatggggcttttgacgattggagtcattttctttacttcatcagcaattttcaaaccagagagaaccttttccttttcacacggacttcttgctttgaaagcatcagccctttcatacatctctgccctaaaatgaaccttcttcctccaactttgccattgtattccatcggcgcctatcgtcacctcaaactaatatgctattggagctaggaatattatcgtcgtcgtgcgcacaacatattcctagagcatcaccaccacccctaactctttcctcgcagtacaagtaagtgttcctcctcttttagaccattttttcaatgttcgattgaaatgtagtcatcatatttggtggaattgatcattttgcatgcgtagaacacaattttagggattagggttacttgtgtctgagccttgcttgctgggtccatagctgagcatttatggttttagggtttttaaagaggtattttcttttaggccccaactaaaatgcatattcgaggtttgagcgcttcttgattatgagagtttaattttgtaggaatttttttttttagtttctagctgttcttttgtttattttttctttggcccgttgcatacatttgttttgctctaccttcgataagaacatctagcccttttgttaccataataagttttggttcccgatttgtcaccatgcaggctgccatatggtagtgactataatgatgatgaatctggtggggacgtctccatgcagttcttggagaggcttcccaggtaccctatttgtcatttggatgtagggtactaactgcttggattttcttttcacttttttaaatgtctggtgaaggcagtgactttcattttccttggtgagttttgaggaggttctcgatgttggaaattatgttaccaggatcttagatctactcacaagtatgtttataacatcctaaataagaactttctaaa

SEQ ID NO: 71710 - DNA, 1005 bp, Cannabis sativa
tggctaagattgccttttagatagacaatgaactttcttggatggaagaaatcctctctttttgtgtaacttttgttatagttgttatcttaacttttatcggttaccaaaaaaaaaaaaaaaaccattgacgaagacacttattaattttgatacttgttactttatttattaaaatataaatactttacattatgtctttaattatgttcatataatacgttatatatattttgaaaatataagtatttggtagcctaatcttagatttaactaagaaagaaattatcaatttgacaaatctgtgttcatttatctaaaaattaaataattaaatttataacttatataaattgaagatattttaatcataataataaaattttattaattaaatttgacagtatggatggaaggcaagatgtcgtttctcagcactgagatatcatttcaattggggcaacaagtaatttacaacttcagttatatcataccataccattctttcatatatcgaccacatgactcgatcgcccaccccaatattatatccaaagacaaaaggaaaatattatagttgtaaatagtgaataatacaattaattattagttaaaagttacaataagacattcggatttctatcaaaatttcttaataataatttgaaatattgaaaaggttctgatcatcgatcatcttcaaccacacagctcctccaattttagacgtagacacacgaaccgcgacctgtacacatgtaattaatataggacaattagcggatgatgttaccaattaattaaatccaatgaaaaagaaatattgtatgaggtttaattaattacttggattggatgaagtaatgagtccagtctttgcaaaatcacaattgtagtcgtggcgaccgttggtttggtaaaaagagttcatgacgaaagaggcatgggacctaacatcattgggctgaaaacaggagccagctggttgaatgggcttacagtcca

SEQ ID NO: 71711 - DNA, 1246 bp, Cannabis sativa
  modified_base (1197)..(1220): a, c, t, g, unknown or other
ataaatatagggatctcaatgcagtacaatgtcatcattctatagaatattacttatagtaacatacatatatatagagtcaatatggtgttgtgttatatatataggacaaaacttgtttgagattatacgtgacttgccatcactttaaagtttactttaagctaaaactttcatattaattattgtggcaaagtttagcttaatttatgcattaaccctacatatttttaattgttgttttgcttgctaataaaattgaaggttatataaataaactagcaatgtcattaagttaaattatttcaccataaggagagatcaaacacaaacaatgtgaatttatataatatatatatatatgttatatatgtgtaacaaaataatactacaaattagagggctcttattttaattttttgtccatatacactttggttagatatcattaatatgaatacatatctctgaacaaaagttctcgccccatgcatgctataaaatgtgcctgaagaagaagagcaaaacaaacaaagcatatccgaaaataaatcagcacccctagctctaactgcaacgaaaaacaccatcgaattttaaattaacacaatctaattaaatatcgaattcccctaaaatatttattacgagagtttttcatattatattattattattagctaaaaaataaataaatgacaagatataattaattgagttaagacttgatagttgttatgtataatataaacctcacaaatctatggtgtttatattaccatttatcaagccttaaccttatatatatgatggggttttgatatataattagggtaaattttgtgtttggtaagcattatgtaatctatgtaatatttagattaaaatagtatttaatttttttaaaaaaatatattaattacgcaaggataattattttattttattttatttatgttgttagtgagttgagattattgcttaaaatagttgtggcaattctttcaagataattagagttgtattaactgtgaaagtaaaatattatagtattttttacaagatatgtaatcatttaattaaagtctaatatgaaaatccattaaggttatatataatttggggtaaattgcggcataaatacctattgtttcacacattttatacacttgaatacctaatgtttatttttggagnnnnnnnnnnnnnnnnnnnnnnnnctcttacaccgttactaccacttccg

SEQ ID NO: 71712 - DNA, 776 bp, Cannabis sativa
aaatggttttgctcttaatggcttgtaaggatgttcataagagaaagaaaattttataatattacgagcatgcaattgtagaacttgtgtaattaaggaatgtatgtgtatgttattatgatggagtacgttttgttacttaagtaaggtatagatgaataacaacacttaattaaggtgtatatattatatgtgttatggattgcccaaaggcaaagatttaatacctctttatagggtccatatgatagatacggaggcaatatagttagtagtgaaggacataaagtcacaatatgtgcccgaggagtttagtaattaaatttcgaggacgaaattttttttaaggagagtagaatgtaacactcgacaaaaaaacaaatatatgttatatcacaaaatgtaataccaggttaaaatatatatagtattcaaaatttattatattattattggtgtgaaaataataattttgttaatattatttaattaattatggtatatttatttttcttaaagctagggcttggcccattttatcaaaaactaatacgaattggttcataactagattgatatataaagctttattaagataggtatatattaagttagaatgcaatattctttaaaattaggtagtagtagccgagctttagaggagtattacaaatagaggagtttctagcgaaaaaaaaatattgtagaaatgtccaatttgagtttgactaattcttttttttaagatagtgattagaccttttcgattggagctt

SEQ ID NO: 71713 - DNA, 855 bp, Cannabis sativa
tctgagctactatcattctcaatattgttaataaatgctaccaccattacaaccccctcttgacaacccattttaaatctaaaatcaacacataagttatcttatattcaaacacaaactcaaaccctaactcaaatctaaatctcaaacacaaaatttcaacaatctaagatttcaaatacattaataaatcaaatttgtgtatgaacaaatatggaaaatacaaaaattgacatctatttgcacggaagaaagaggcttcagatctggaactagaggaaaaagcttgagattttgaataaaaggcccctactctctcttattcttgttctctaactttaatggcatatcgggaacctctgcctcgttgtcaatttggaaaatcaacgtccacccatatcgaagctccatccttatcgttagaaggtagatctgagatggaggagttggagttggcgtttgtgcgttttggggcttcagagttagtgaaaaggaggaggctagaggaggttcgggttcaacgctggttgtggaggaggaggatgtcagggacagaagaagaagaaataacagtgggtggtggtggttacaatggttgtggtggtggaatgtggaagaggttggaccaaaaatgaaaagacacgatctgaggaaagaaaataaaaagaaaataatggaaaataattgttttttttttaaataattacatgaaccaataaaattatgtcacgtgtaaactatgtatacgtggacaatgcaacatgttacttaaaagatgaaaatggatagaaaagtttaattgctaacaagacacgaattttagggattttgtcgctaaaaataagttttgggggt

SEQ ID NO: 71714 - DNA, 1215 bp, Cannabis sativa
ttttaattaagggtctaagcagggccaggcctgaactaagttgaactaggcccgcgcctagggctcacccagcctaagggcctaaaaaatatttttctttagtaattttcaaaaatactacataatttttaaataaaatgcccaataatttttattttcgtaaaacctgcctaattttaaggccgaacttggtctaagtcagcattgaagctagctatataagcttccctatattcctttgtacattgagatctaacacaactgattagaaaagagagactaagagaaagtgagctgtgagagaatataagagcaagtctcttttgtcattgtattctctgtttcgagtgatcgattcttgtaatcctccattgattcatcaataaaacaataaaacgaagaaccaagctttgctgttctttcgaggagtagacacaagttacattgacttgtgatcgaactttgtatacgtatgtgtgtttgtgttctgttgcttagttttcttgttctacaattttatgatttttggtttagagtttcatcacaaatttgtgttgaaattgcattttctaatcaaagtgaaccttaattcaccacaaaattaaacttagatcaaaaacaaaaagatagaatattgaagaccaattgttcaagaactaagttggaggggtgcaccaagcccatgcagtagtgcaaagcacgggcgacactcaagaatcccaatagcaagctattgtgatggactctttcccttaaaaaattaatttaatatcgtgtgagccattggctcacatatcagatattaaactgataagaacagatactacacttgatcttagccaaaaggccgagaaaggtatgatttacttagccaaacgacttttggttttataagtcattagttaactggtattacagtaagtaatgcatgtgggagtatttagacatatatgcattgagagataattgtgaaaaataataaaaaattacacacttgttagatgcgtacaaagtgatcaaatggaaatttcaattaaagaatttgataacctttacattataaagttctttccaaagagaagagagttttgagtttttctgttattatttgttgacagctttttgtatgctagaaactgttttgtatgctagaatttgataacctttacatcattgatggtttcttgatcatagaaaatgtaaacaacttcctca

SEQ ID NO: 71715 - DNA, 1217 bp, Cannabis sativa
tgagtggtacctttcaagtcagttttatgctgaatattggaaggttcagatgtggtatgattggtggctccactgtcgatgtaccaagagttgtcagcatgagcatctgaactggtgaaaaaggcttgttgatcattgttagtatgcatgttgttgctgttctgagagcctgaagattgactggaaccaggagccaagaaggagatgtcgaatcggtggtaacatttggaagcaatgtgcccgggtttgctgcacaattgacagatgggtctgttgttgttggagcgtcctcgaccgcgtccacgacctctggagttgtaagaacggccaccagagggttgattttggttgtgtccttgattgctgatgttaaaggatctgcgcatttgtgtggcaagatgggcagtaggtatggatgaatcaccatgggcagagttgagttgttcaagtcgaatttcttggctctgcagcatgtattgcacttcttgcagtgttacttggtcatgcctagatgtaagattcaccacaaccgcttcatattcatggccaagacctcccagaatatacaagattagatcatcatctgagagtaattgacctgcagcagacaaactatcagctatgtttttcattttcaaaatataatcatgtatagtaagattgccctttttcagagattgaagttgaaatctcagttgtaatattctggcctttgagctggtggtgtaaaggcgttcaagagtaacccacaactcatttgatgtgagacaatttatcacatgtccaaacatggattcggagatggagttgagaagccaactaagtatagactgatctgtgcgcctccacatggcaaatccgagattgacttgacgagactcgccaggaatcgatcctccgattgtattgtccacaaactgtggtgggcatggcttagttcccagcacatatccttcgagatcatgtgcacgaagagcaggcaaggcttgggatctccaatatggatagttagttctttcaagtttgatagtgagaggggccaggctttggaagggcgaagattgtatggttgctgcaggagtaataactggtgtattgactggttcgaccatgggcgtggcatcagctgggtttgatgcagatgacacttcagctgtggcaggattttccataacaggtcagcgattttcccgctctgataccaagttaaacagaga

SEQ ID NO: 71716 - DNA, 1404 bp, Cannabis sativa
tcttttataatttgattaattaggtggttaatcatgagtatggtgagccgagtagggccacaggtgaggcgccgctgagtgagatgagtgcaataacaataggagaagctctagaaacgacagccaagaccatcggatataaggcggttgaccagaacgacgcggctgctattgaagctgcggaggctagatgtataggcagtgatagtaatgtggtaatagctggtggcctcactgggttggctcagtcagcagtgtccttgaatcgcgctgtttccgagaagaataagattaagctcaaagatattttaaccgtacgtatacttgcttgattagttacacataccgaatcttttataaatataatatatatatatatatacatatattgatacgtatatatataggacgcaactttgaagctggctattgacaaggcggcgacacgggaggacgcggaagaggtagtggaagcagagctgctgaacaagccgattccggtgacaacgccgggcggagtggcggcagctgtgaagtcagctgctagactcaacgaaacttcaactatatgatcatacgtacttgcgcgcttttatatattaatttacatggcacttcttttctttccttcacttaagtagtactatgtttttcttttttctgttttgagaaatataagaacgaataattaatagtgggaattgtgtattttccttttgtctatttattcagctgcttgattttcattttcatttttgtcttctatataatgttgcgtaactatgcctttgcatggactggctattaaaaaaaataattttatatatatttgatcaaatgtctaaattttttttagttttgaaatacaattaaaaaaaatatggaaattggtttgattaaattaattttaaaagaaaattagtaaataaatttaattgtatattatttaaatttattttagagaatcttagagaatatactcttaataataattataaaaaataacacttaaatattgaagagcatacctatatatatatatatatataaatatactaggcgtgaaggacgtgacacaacccccttaaaatatgtaggttatattatataatattagtattatgtaatattataatttagagaaagaaaatagagaagagattataattttcttagtgttttattccaatgggtgatctcctatttatacacatacaagagtcaaatattacgaaactaagaaagagggaaactaagaaaaatgaaatgttgattacaattaatagtaataaataaaacattcagacattcacataattattaatatttataacactctcccttggatgtccataataactgcctcattaaaaacctcgctgagaaaacccagtgggacaaaac

SEQ ID NO: 71717 - DNA, 1485 bp, Cannabis sativa
tctctctatatatatatatatgtttcatcttatcttctttgatatctcttctttgtatctgccattgataaatttcaaggcttttatgcttttaaaaactttttgagtctcatgttagtttgtaatctttttggtattttgattcacatgatagtttttgaatgtataatgtgtaacttctcaatcgaaaagattcgattttggccttctttgtgattcttgactttttgagtcataaagaacatgaggcacatatttgagttttgagaaaaagaacacacatttagattcaaaaactaaccttggttggccttggaggtttggcttgagacctggccaaacctaggacttattcatgggagttttccagccctagggttttaccctataaagttagcatgttcatgcatgggtttggtgaccctagctagtattcttggctaagtcatgggaccctggccgaccctcttgaagcttggaaatcctggtcggcctgtgccttggttccaagtgggtggccaacttttggtcctcttttaacttcagtaagaatcctgtcatggccctgtgggcatatacaaccttagtctcatacgtggttcccttagaaactctgtatgaaactagtgatcagtctattatagtcgaatgttcaattaagactcaacatttgtctaaattgttacacttgagatgtgtttgggtcccgggtccgggtctgggtctgggttcgggtcccgggtctaggtctgggttcgagtcccaagtcttgggtcctgggtcccgggtcccaggtccaggtccaagtcgggagtccaagtatgggttcgggtttaggtttgggtctcaggtctaggtcccaactggtctgggttgagtccaagttgggtccggggtccaggtgtgggtccgagtttgtgtccgggtctaggtctgggtccgggtctaggtccaggtcgggtttggggtcgggggtccgggtccgggtctggggtccatgtccaagtccgggtcttgggtttgagtttcaggtctgggttggaaatagatgttgaccctaaatcctttataaatattataatacaagataatacgaacaatttgttatgtattaaataatacaacatacattgtattaaaaaatttgatcgtaataattaatacaatacattggtttatctaaacataatgttatttattatttaatacaatacgacccttatatgacatactaaacgagctttgaaactatatatatttgtcttgtgtctatattaattaattctatcaccacatccacatatatataatgctacaagtcaaggcactctacatatcattatataagttaatttttattttaatatttagtgataaatctatatatatctttatatattaaaagtgcctatgtaacgacaattcttggtttaacgaacgattaattaacgttaaacgttaacaaataaataaacccaataatta

SEQ ID NO: 71718 - DNA, 1410 bp, Cannabis sativa
  modified_base (1324)..(1355): a, c, t, g, unknown or other
actcacccgaaccaagtctagtttccacatcaatgagcctacaaagggagatgctgatctcaatgctaaaacaagacatggaggagatcgaaataaagaaaccagtcaccgcaagaaggatcaaactaacaagaagcctatgcttgaagatcctatgaatgaggataatgaatttgaggagactaactctgttgatcctggggataattctcaagttatgcctgttgatgatgacgtcgaaaaggaaggtgatctagaggagtcagataatgtgatcgccatggctaggaagttgaaaataaatgaggaaaaattatcgttgcaagagaaagtatctttgttgatgcacaaaaaaatggcaagaatggaagccataattatggtaatgaccattgaaaatagtgccaatcatactgcccaaaaataacactgctggtaaagttgatcctaaaaattctggaacctaaaatcctcataaggagaaagggaagagaaggtaggcgagacttcaaagaaggatgcccatattgaacagcaaaggaaatctaaattgtcaaccaacctcaaaagaaaaagaaaggggcccatgcttcaagataaggggatcaaactgatcctagaggtagagttacggagaaagacaaatctgatgctagagccaagaagcctactacccaaaaggacacaaatcattgtgatgattctgttagttgaagtgatgatgtcaaaaatgtgtatccattgttagatgagaaaagtggaagtctttccacaaatgatctctagacaaagctgacgtcaaaagagaaaaggccaaaactgagaaagtcaaactttggagagatgacctaagaaagcatatcaacgatcatatttgtggaatagaatcacttgatgctatgacttaacgattggagcataaaattgaagagttaacaaagcttatggaaaagatctcccagaagaaaaatggaattatgtctgacctggaggagcaggacacggaactgtgagtaaaaagaatcatagatgcacaattgtcgaaacactttagaatgccttagatagaattatatgatggaagagcagaccccatggaccatctatccacatacagtcaaatgatgcaggtagcgaaagctagtgatgacataaagtgcctctgctttcattaactttatcaaaatctacggaagagtggtagaaaagattatctcccaaatcagtttataattggaaagatttgcaaacaatgttaagaaaacaattcatagcaccaaaagatttcaacttggtagttagtgttgggttttgttccctaaannnnnnnnnnnnnnnnnnnnnnnnnnnnnnnnattaataaaagatcataaatcattctatgtcgcatagttcacatgatttatttca

SEQ ID NO: 71719 - DNA, 2655 bp, Cannabis sativa
  modified_base (926)..(926): a, c, t, g, unknown or other
gttctctcttatatgtttttaatttattgtattaaacggtttcaaatacttttatattatcttttactagtaagttacaaagatcgtattgcatttattttgtattctttctcaaatgattttcaatttagttaaaaagatcgtgttgcatttgttatacccaaaatttggcaagcacattgaaagatgacaggtgtcgagctgggaagaacgaagaactcaaacacgcaatcgtaagtacacttggaatggaacaacttgttagagacacaatttgtagagtatgcttataactcagctggctgaacagtcttctgcgagacagaaatgtacaaactgctaacttatgtgtcgacgagaaaccataagagtgaaaatgtgcatgatgaggcttcaacctcgtcgtgtggaaaagagacaataacgataaaaacacttagcgtatattacacggtacccaaactaagtataaatagttcggtaaatcgagatgacagatagcgagacgtctatctcgttttaagatggcatgcatacgagaaagatcatctcgacaccagaaaatgtagttatcagaattaaagcaatatcaatctcgggaagtcatatgacgagcaccgactccattcctagctacatatccccatgagataaggcttacagtatatctttaaaatatgcattcatcttggcccaataaaagtgggatactcacagctgtgtggattttaaataaaaatctgcatttacttagcataatttgtaatcaaatcacatgatttgagggaataattgttgtaaagattacaatcaacttctgcaatttagtgcccactatataattataaatagtggcaggcaagatgaaaaaagggggactcatacgagagggttcctaaaaaaataataatcagaaatctgaatanattgactcgtggactatgcaaaattttaactgcaaaatcacgtaaaaaaactatgtgttcatgtctttatttctatagcttttatttttctatttgaaattactactatgaggctcaaatttagttaacgaaaatctgcgatgacagttttgtgctttcattgagagcctttgtgaaaaagctcagaaaaagtctcctgacataaaagtaatggatgacgccaaagataatgatcctcaagaaggaatcagtcgccgccctagaaaagaaccattgagtcctcagggatctattgagtcatcgcatgaacagagtgtgagccccaggaaaacccgatattgaggtccctgacttgatggaccatgggtcaaccacaaccggtcacttcctaaccaggttgatgaggatggcgcctacgaccaaaccagatacataccgattgtggagttagaaaatcgccatgttaggcgtcaactagaggaagcaaactggcataatttcgagttagagcgtgaaatagccgcagtaagggaaacgtatgagaatgaaacccaaaatcaacctgaccttgggagaagagatccacaaggcaaacctcgcggctcgcaaaccaaggtgcaagagacaacccagaaatatactcagaactctaaggagatgcaacttgaggaaactgaggaaaatttagtgatacagcctaggatatgcagaacattagatggaaattgctaaccctctcttcagattaatcataaaggaatttgtgcaaacccttatagggagaataaggttaattaaaccttaagaggaagagtacggtccgaccgcagtcacaacaggagtgatcaacgagagcatctgaacttgaagaagcctgatctttttcagcaacttggtccaaagcaaaaggattcactccatttgtgaatggacgagttggagaataagttcagaaggcattgagtcatgaaacccagaagacaattggggaatgagactattggagaatttaattcagaaaccttaggatgaaagagaaaagacaattccaaaagggtgtccaaggataagaaacacaacaaatatatccctctttagactgagtatatcaagcataatgaaacttgggagaatatctacctcgtgcatgtacaggaagtcgtttttagcgagccaaaacctatgaaacatgcgaggattaaaagggatccaactaaacattgtgaatatcatggagatattagtcataccatggaagagtgtcgccagctgaaagatgagatagaaggtttcatatcgcagggacactttcgaggatatgtaaaggggtaggacaatgtccatgatcagctcgatcttccaattaacttgagtgacaagggattataaccctccccgaaaggaggaaaggacacctcagttgcctcgagagggagtgagtcacaagagtacaaggggcggttacttcggtaaagaaattttgtaaaaaaaattgcgacgtgagtagatatcgaccaactatggttgccatatcagcgtgcagggaggaaagctagtcgtcaaccaatagcagtcaaagacaaaactaggattacttcacctagaaccccgagatatgtcagggattgaccctggatattgaaacaattgagggagtatgtgagggattgaccctgaacatcaaaacccattttatcaaaaccttaaatgctcctagaagattgataaa

SEQ ID NO: 71720 - DNA, 880 bp, Cannabis sativa
ttttgtcataacacatctagatcggattattattaaattttattttgacaaaaaaattatttgtactattttaaaaaatatatgaccattttatcacttaacaaaataaaaaatttaattaataacttttataaaatacaggatttaaaattataatttaaaaaaataataattcttaataactattaaccaattgtaagacgtgacactcgtaggaatagtaaatagtgtgatcttctatattttattatataataatgccacatcagccatcacttcagcgtcaattcaattctttgacttattctcttgcctccacttatcttaaaaatcactcctattgaactgtgacaggtgtccaatcacagacgttgatgtggatatacatagctatccaccaccataatttaattacttaatgtttattattattttagtgcatggatgatgatgtagctattgcaaattttgttacattattaggcatcctagatgatcaatattacctttcaaattttagaattaaaaaaaaatactttcaaaattagattaaaaagttatagattaacttattaaattagggaaatttacatggtatactaattagggctgaacattttgagcgggtttgacccgaactcgagcaacccgcccgaacccgaactggtgaacccgcaaaaaaaatttcttaaaaaaatttcgagcgagttgggttcaacccggtacccttcgggtgggttggcaggttgagattttaggagtaccgggtttcgggttgaacccgcaaacccgcccgccaacccgatttataaatatattttttattgctatttatatatatatatatatatataatatggactttagatttttatggact

SEQ ID NO: 71721 - DNA, 1403 bp, Cannabis sativa
ctctatctcatcaggtggtgtatcctaaagcttgctgtagacgcattccgagtgacccataacaccacgtataaagaaaaaagtaggaactttctcatatttgaagttagcataaaaagcatctctgtttttctttcaaaacttcatacgccttgtaagaggggcttcaacatttaattgaatacgaatacgtaaatactcacgccaaatcccttaaaaattattaggatctgaatcaagaaacgaaccaatataattgccagcttgacgtatcgccctttccgtcttaaacgcagactataaatcatggatttgaacccatatatcaagcttattaagagaaatagttctgggattgtctccttccttcaaacattcaataatcaattgcttatgatcatacgtccatgggctacccatgattacccgttgaatatcgatttcataataaaacttaaagagaaaccgattttgttctatgatcttcacatacatccctttccctggtttccataggtctgctattatgttttggaagaccataaaatccgatactttcccataataagtaatcttccaacaaggcaccattgatcgtcatactcgatctcttccacctcttcatcttcgtacacaacttcattatcttcttcctcgtctaggtagatattttttaattgctattctaaatcttttgttaaaccattgcttgatgccatcgggggaatgaaacacacactcaaaattgaaaaaagacacactctatagcatagaaacgacacacatgttagaggacatgaccaactcacaattcaactttaaagagaagtttgtacgattaattaattttcatattgtccaaaaaaattaatagcagttacatggaaggagacgaacgaaattccaaactgtctttctactgttctttgtaccgcatcagtagcactgtcacgaacattttattgagcctctaatattgtgatgacgacccaaatttcattgatacatggcttgtacggtgtgactattaccaactaattataattgataaaagatatgggatggggtatgaatcatacgagttagagtgtgtgatgttagtgatgagagaaggctaatcaactcaccaaaactccgcaacgtagcgttttggttggaatttttggcctgccttcttccttttttttttctacagtaagtaaccgttcgtttatttaataattgaataattggcattttaaatttgtgaattttgatactacttgctccttcaaatataacaattatataattacactcttttttgttaaatttgtgttgacctcacttttggccaacgacagtgagtctaaattgtaagcgacaagtagtataatgtgtgtgtaatataataaagtaaataa

SEQ ID NO: 71722 - DNA, 1328 bp, Cannabis sativa
ccaaacccaagtggttgggaggaccaacctatcaatccacaaacttggttggctggccaaaggaacttggccggtctggccggccaaggaaggttggtcggccatggggtgctggccggccaagggtatctgtccagccaagaaaggttagctgaacatgaggccacaagaacagatctatttgtgcaagcacagttggatcaactcaaatacatgatcaaagacctatccagcctaaagctgtcagacttagaacttgacaggtcgaggggatcacctttctcagcatatattaatgcactgccccttccaaagttcaaaataccaacttgaaagatgtacatagggaaggaagatcccctagcacacataatatactttaagatcaaaacgaatctccaaaaagtaaccagagatgtgcaatgtcaaatctttctgactactgtctcagacagcccagcagtggtatttcaagctgtccctaaaaagattcaactcttgggaggaattctctggagaattctatactcaattctcgtccttgagataaatactttcacgacttgaagaccttgtcgaaataaaacaaagataaggcgaacccttgaaaaactacattcaaaggttcagggctgaggccactaaggttaaagggctaacagaagaaggttgttatacggccatacttggaggtatcttaccattgagtgaattctgtaaagatatcagaaggatctcaacaaacaagatgaaagagttcctcgagggagctgatggcttcataacgttagaagaagttgtctggcaagcccaaacaggaagacaggtcggtgtcgagcaaactcagggtgttatacaaccctaagttctgtccaacctgccggctagcataagcaatacctgtcagacctcctacaataagttaatggaggcaaatgcaacagtaatagctctagctgagatagtggcaaaaaaggaaagtttaacaattcccctacaacacaaaataaaaaggagaaggagaaaaagtatttatgcttcaccctccgacaaaaactcctgaaacaatctacatggccacaccaagttgttgccccgtacaagaagcctcctcccattaagaaggacatcaacaagagggactcctctaaattttgtcaatttcataatgattttggccatgacactaatgaatgtcagcatctaaaaagagagattaaataccttattaggaaaaataatcctcacctacgtcgttatgtgcagaacaaccaaacttaggcacaagctgcccataatggagacccaattgttggaaattattttac

SEQ ID NO: 71723 - DNA, 1489 bp, Cannabis sativa
gaaatggttccccttcttggagagagcgtttagcagtagagctcattggatttggactagccttggcaccctccatatgcaattttactaacaagtctgtgatgtattttgtttgagacaagtacatcccagtgttgtctctgtatatttccacacctaagaaataatgaacttgaccaagatcttttaaagagaaagatgtattaagatcatgaatgagccatgagatgatagtaggattgggacctgtgattaatatgtcatctacatagacaagtaggatgactaaatttgtacctgagccatatataaagagggagctgtcggctttggaatcttggaaaccccatgatcttaaagttgttcttagcttgtcattccatgcccttggggcttgttttagtccatagatggccttttgtagtttgcacacatgagttggttttgtagtgtcttcaaagcctggtggttggcacatatagactgtctcatttaaaggaccatttagaaatgcattgctcacgtctaactgagatacattccagttgtgagtaacagccaacgtaagaactgtgcgaacagtagttggtttaacaaccggactaaaggtctcatcaaaatctattccagcttcttgtaagtaccctttggctactaatcttgacttgtatctgttgagagagccatccttgttaagtttgactcgatgtatccatttacaccctatgacattcatggaagaatcatatggaacaagaatccatgtgttggctttcttaagagctgagagttctgtgtccatagctccatgccactttggattagacaatgcatcttttaaggttctaggctcagtaggtaggagagactcaggcaaagggtgtttagtggctaggaaggattttggtttgaatataccactttgagatctagtacgcatagcatgtgttctagggaggcattgttcggctgagggttcatttatatgtggctgagatattgtattagataataggctttgaccagtaggtagatgtgtgtggtcactagtaggcgtgggaattaaatgagagtggttggtatcttggatagtgatgttatggggaggtgatgtatgagctgttggagtaggtacattgggaggtgatgtatgagttgtgggtgtaggtacattgggaggtgatgtatgagttgttggagtaggtacattgtgaggtggcagagcaggtacattggcatggggaacatttatgggaccacggttatatgtactaggaatagtattttgtatggtgggtgaagtagagaaatgtgtagtaggtaaataagtagtcaaagaagggtgtacctttgtggcagaggcgtgggaggctggaaaaagttgttcattgaaaacaacatttctagctatgaatagtctaccttcaggactttcacataagtagaccttgtgagaggatgagtagcctatgaaaatgcattgttttgt

SEQ ID NO: 71724 - DNA, 1135 bp, Cannabis sativa
tattttacaagaattattgattgatcgttttattttttaaatgacaattcaaactttatattttctaaattgttacaaaacagacccaagcttaattttatttaaagttaatacttaataataatttgacctagatgtattagtactaaactgattacattttttgcatttattcatgctagatattggcttcaaactggtaatattaaaaaaataatttactacaaattgagattaaagtctattttgtaccatttaaaaaaaaacataaagtctaaaaaatagatagtcaaatcgataattttttgcagaatacagagtctaaaatgatattaccctaatttttttcttaaattaattagaaattttaaataaacaaaaataaattttcttttcttttcttttttaatcatattaaaatattaatttattatgtcaaaaaaacattaatttatatatatttatcacacgtgcatagtacgtgcctataagtaaaaagttttcgatgcatagcaagaatgggtctagcacacatgctttgtgaaaatgttatattatatatattttatatgtgggtttataatcattcacatatgaaccaagtaggaagagttgataaaagctcgtatatcaatagaatagtagaagtatttctcacatagtaatgtgtggaaagataataccacatataagatttatagattgttctttttataattaattaattttgagataaaatctcatacatcttacaattttaatatggtatcagtgcaataaaaaaagcttatgttgtctccacttttgacctccatttgaaacttttcgatcaatgtgtgtcagtttctagtattaggatctttaatctgtctcaaaaaatccacaaaatttctaatatgtacacccacaaattttttgatttagctgtggaattctttcaagtatcacgttcagtcatgtggtctcttgaagttcattcattatacccacactttctaaaatcaacaggtgagaagagtgtataagatgaatggattactcttctcataaacaattaattttgagatgaaaccctataaaccttaaccacacacttccaaattctaacaagatttgtaaataaataaataaataa

SEQ ID NO: 71725 - DNA, 1016 bp, Cannabis sativa
ttgagttgtttaactttttaggttcttttgtatcttgaaacctttgtggcttgtgtctatcaagcccggcccgactatgggtctaggcaagctaggcctgtgcctagggcccacttagctcaggggtccaaaaaaaattgttctcttttaaaattatacattttttttattgattttgaaaaatactacatttttcttataaataacgaccctaaaatatttttggataagttgaggaatacttttttttttatatatccatcaatcaaaaataccttcatattatattttattaaaatatacctacttttatgagtagattgcctctacttttatgagtagattgcccaatataccatcactcccttcttaagtctagtatataatttacaataactaagaggtctaataaagacaccatctataaaagtcgatatatcttaaaaaatatgaaaatgaaagtaaaaattaaaacaagtaaagtaaaatggatatataatgtaatttcctcaaatatatttttttctatgttacactaaactttagggccaatctttgtgcctattaatggaattattttgttctctttaaaaaaaacttattaataaaattttttgttattttttagaaatgctaaaatgtacttgtagttcctaatactttccctgctaataacgttaatgatgcaattaaatattaagtaccttaaaaaaaaaatattgttaactaattacaagacctttaaaaaatactaggcaataggtactacagcaggttccaataacaatgttcctccacttttctaattcatttttgttgtcgttttatatgcggtcgcattgtaaattttcagtgttgcatgaatttcatcccaaaggtatcttgcagcagctttgcattgaaatttcaccaataaaaagctgctgcacgttggaatatccaattacaacatatcagctgaccgtgattatagcaagtaagcttttcccaacaaaagtataaaataataatgaact

SEQ ID NO: 71726 - DNA, 1446 bp, Cannabis sativa
  modified_base (26)..(55): a, c, t, g, unknown or other
tttaaaaaatattttcacttttctannnnnnnnnnnnnnnnnnnnnnnnnnnnnntgttaccaaacgtcaccttaattagcttggtggtcatgatcctctctctctccacaatcaattttattattattattatttatttgattaaaaatagtttatttacaaccagttgggagtaataactgaggagggaacagtagagacactagtgattgatctgattcagatccacccaaaaatagaatacaataaaacacaatcaatggatgttctttatttttttttttatccaaatctaatcaaaattatattaaaccactctgtgcgtaaatgggcaacagtaagagctgatgcgatgaaataacggtggcaccaaatcataattcttaatcatttccaacaacaataatgcaatactttttgtcaatatttcatcatatttatttatttcttatttttttttaaataaatttcatcatattttttttttataaataatttagatttagaaatagctagtttcaatctttagttaaatgctttgattactttttaatttgttttgactttggagatttctttgtattgccgtatcggcttgttgctggagtcagtgatttctttgtagccttttgcctttgattgtttcaaaaaaactcaagaaggctcatatagcaaggtgatgtagattagagacaaattataaatcaattgcaaaagcttattaaaaatgatcaatcaatttatttttataaaagggtatctaattactattttttattagtagagtatttaattaaaaagttactaattagactttctattttcttaaataacaaaatagaccttgtattttctaaaattgtacaaataggaccttgattttttgttaaaataaaacttaataataatatgatctaatgatgctatgacaaaactgattacattttctgtatttgttcgtgttagaaattgtcttagagttggttatattaaaaaataaaattattgaaaatttagggtcctatttttactattttggaaaatataaggttcattttgtcatttaacaagacagagggtccaattagtaacttttacaaaatatagggtccaaaatagtatttacgcgaacttaaataaatattagtttaaatttatagttttattatttataattttataaataatattgtttaaattagttttaatattatcattcactttttattatttatttatgtttttgttatttatttctttgtactcgtggttatactacattattttcttaattttaatgtttatttttagttttattattgtttctagaagttatagagtaattgagtttttgttaggggttttttcattagtgtacaacaaaaacaattatattacaaaaaatgtgcaaaaaaacacaattttaaaaatgtacacatttgaaa

SEQ ID NO: 71727 - DNA, 645 bp, Cannabis sativa
gcataaaacccaacagtcacatcatctatcaacttaaccaccaacaaaccattgtaaaaatttcacgactcttgaaccaacacctccatacaatcttcatcgtgataaaaaagaaatggaaatcaattccctcccatctcattaatcatcaagctactcaaaagattccaaagttgggtgatggtgcctttgaaatcatttcaaataaaatattttgtaacaaaaagtctccctaacaatcccttccagaatactggccgtcctttagcctcaaaaatctccgcagcaccttgtctcatcctctattatagcaaagctaatcctatttccaacaaactcatccatactacaaacacacaacacaaactagaaagaaattacacaaaatggcaagaaaaactgaccactcagagagcaaaacctcaagtgagaaaagatagttaattttttttgaaaagtatagttacaacctcaaggaaaaatttcaattttttactattataaacctctttaaaaatctaagaaatacaacatgcaagtccttcacttttttatcatttaaaaatataatagtaatgtgtacatatatgaaatataagatatgatattttattttttagtttgataattaattatttaaatgtt

SEQ ID NO: 71728 - DNA, 975 bp, Cannabis sativa
ctttttctatgtgtggagtcagtcatccaacttaatttattgataggcctcctcttgttggtctctattgaaatttagctagaacgttcttattattaattttctcatttttgtaggacccttttttacaaatagctttcacttgtcaaaagttgtgagagcatatatctcagaggattattattggtcatacgtggtattcagcactttttataggtggtgttatatgattggttagtaatatttttctaaaagctactttcttaagttatatgagatttaataattaattacactaataataatataatactgagaaaaatactagataccaataatacattttaacaattttttccattttatttgtttttacattaaataagatgtaaaattatagtagtatagttttccacaaagctcatgaaaattaatgtgttacaataattgttcattaattagagagaagatatattcatagaacttttatatttgtataaaaagaaaatgttgaagcatgggaaatgacatgcaataataatttcacaaaaatataatgttgaattatatatgtaaccatttatctagggacccaaactcaatataacttaaacttgtgaactttaaagaaatatatattatcatcaattaattagtttaatcatatgatgatactctgtttttatttttctaagcttgcaaactaattatgatgtgatttttatccatttttttactataaactattttatacgttagtgatcaaattaagtaagattttttattgtttaggcttatgtgcaagacgagtgtgcataaatcgatctaattcaatgagaaccgaccgatccaattacaaccgaccgtaaacattagatatccaactgtgatcggatcagattggatcttaattttaaatatccaattggatcggattggatggtggatggggtgtctaaaatccaatacatccaa

SEQ ID NO: 71729 - DNA, 1224 bp, Cannabis sativa
ataagtaactcatttttttttaaaattcatatatataatttctcttttttttttttaattaagaagaattgaaataaaaagtaaaaggtttaattttttttttccttgtaattcgcctgtaattaagactaaagtgacagatgaaaagtctcacctgtaattcgcctatatatatacatatttcagttatcaaaaattgtgtacctatactattatataattttaacttatactgttatatacaaattttttagtgtcttttatattactcctatatatgtcgagaaatactaatgtcgtcactctatttaaataagtttcaggtgtattttatcattactatatatataataaaaagatatcttaaatattaccatttaattaaatacattaattaagttatttcttacctatgatttttcttgtctgtttgttatctacatattagaatcatcgatcactacaaaaaagttactttacaaaatttgtaactaaaattaaaaatttatgattaattataaattattattattattatattgtgattaaaaaatttataactaaatgtattaatcaccaaaattaaaattgattgtgactaaataagttattagtcacaatgcatgttaggactaaaactaaaatagtgacattctttttttcttttcttttttttgaagaaacttgtatatattaatattgaaatattacttatacgaaactagttattattatttttttgaaagaaaatattatcttttcagtaaacctattttttgagttttttttctttttcttttgagaaaaaaatctatttttttgagttggaccctaaactttctgaatgtccattacgaaaaaatgagttagatctttcttatccccacgtgtgatactaataaagtcatttatcaaaataacgagagaaattagaaagcgctaaaacattaccaatttttttatcctagtaaaaaaaaaaaaagaaaaaataataacaagacatatgagcaaacaagtgttgtagtgtgtgaagttaagtccctaaccataattatgaagagaaaaaaacagaatattatatgaaaataattaaaatagcaataaataaataataagtattgttgttgaacattgctattaggtagtaccagtacattccttagtagtgatttttgatattaaaccccatatattagattaattacacctataagagctttagat

SEQ ID NO: 71730 - DNA, 811 bp, Cannabis sativa
gagattgtggccacatgcccgtctactagaggtggagcgagtttgggaggatatgtggttccaggtttcagtgcaagcaatgctacccttgttggtgctggcggagcaaggagtgcaggtaatgatgttttgggggcatgataatgccctacaccctgtaacacttttacaacattttgctgttcgggagtgaccatgtgtccgtgaacgactccctatctgggataaatgatcagaattcaaactcactatcccaaatgtcccgctcgaactaatgtttcaatctcatctttctaataataacaatcattagtggtgtgacccttcctccatgatactcgcattctttattttgataacatctattcctccctctgtgtgacatccgtggaggttttctatgatggaccatattgcaggttgctttgtagacattttcttgagtatcttttagactagtatacttagtgtactttagatcatactccttccttgtattctttgaggattcgttgcaattgtgccttttgccccctctttcgctcttgaaatggctcatagtgggttctagaacctcaatttttgcctgtttgggagctacacttcacccaatctgtgccaccctatacccaaaaaaattggtttgtgtaggggcgagactagaggtagttgttccataaataattgtggaaaattgagttttgggaagagttaaggccgaagctagaacttggggtgtgaagtagggagtagccgtggaaggagttagtgttgggttttatgccctaaataatactcatttcaatataat

SEQ ID NO: 71731 - DNA, 1885 bp, Cannabis sativa
taatctaacatcctaaatatgaaattcctaaaatgataagtaaacacataagagattaaggaatccttataatgatggcaatagaataatatgactccttccatttagatctctagcacttaattcctgtctgtaacagagcattgtcaagatctaaacatgaatcttcttctaatgatgattgaactacataatatttcacactatgcataggtatttctttaacatgtgtggacaagctctcaacactaaggagcacaaaattttgagagtaaaatcaaaaagaattttaaaataaattaataaaataataatagctttccttttgtttcaatttttgtcagacaaagagagagacattcatcttcttatcaaagggtattatgttctatttataaggagatactagggtttagatttagaatgaatgagcttaataaaagaatataatgacaatataataacaagccattgccaaaatctcgtcaagggcccacgggtttgacttttactattatttagtttccttgatcaaataatcttttatgtcttcaaaaatatcatttatctattttaattacttaaatgttaacttcatctatttaataattataattaattattaaacaaaattactatttaaatatattaattaattagaccctccaaaatctcttaaataataaactaatcctgaattctcttttcttctcaattatgttgtttcttagtaaaattcagacatagtcacaatttagaatcctaattgattaaataaatcaattaattgagactacaaaaataatattaactaagttagtgagagaactatgggcctatgtaaaagctcctaattagtagatcaattgttacatagatttagaattacatgattacatagtacgctctatatactgtatatagatacgctatgaattatccatggttacaatataaattatcaatgatcctctataggtgatccacattgaataaagactaaattatcgttttttcctacaatgtatgttatgcttaaaatacttagacacttttaaatgatatttcgagaaactaatataattaccgaaatgaggcctcaacgaatttaaacccgtttagccaagttctaaggaaaccatctttcactttattagttatagaagctatagattctatatctatgattaacgctcccacttaattgaactacccagttcccaagatataagtattgggatgatccaattggtcaactttaacgaacaagttaaagaacccatagagaacagttatgctagaacttaaccatcttaggattgagaccaattgacctaagatcaactaagtgacattgacttagaaaagacgtaactgtaagtttataatatcttttccattgtcaatatcggttcagtctgatgtatagctgatacatctgatactagtttactttgctaatgatctggaaaggatattctacttacaaaagtataagtaaaatacatcattgattatcacgttattgtaaatccaatacactgataaattgtggcactaaataatttgaagcatataatcatgattatattcacagtgtagacaacactataataatgaacaaatatatgtttgagatttcatagaatttatatatcaaacatattgttgacttcaaaaagtgatcaactaacagcggggtcgtataaatctgatgcttaccatgtgtcatacgataagaacaataaattaaatgagattagaattttatagaggttcgacccccttagctagtgggtaatgacctactccccttttagttgtattgataattagtgttaacgcagattttcgttaacacaaaataactagcctttcagtaata

SEQ ID NO: 71732 - DNA, 1449 bp, Cannabis sativa
tttcataataatatgacatttttttaaaccgacgtaataagttttttgtgacagttttaaaatgccataaacaatttagcgtcatttctaaatcgacgcagaagataagatagaaaagtaaatattttgcgtcggtttggaaatgtagaaaattgttttttgcgtcatttcaaaaatgacgctaataaaagactatatacatcggtttaaaaaaccgacgtaaattctttaagtgacacttaaaaaatgacggaaattatactttttgtagtagtggattgatgaagaacaatgacttgctataggtgtctctcatctactagtcagataatgaaactagatttggccaacagggccctacattacaatatttgaaattctgatgagagacacgctaaaacacttcctgaagacttaaaatcaaaactagaaatatccttatcgataaataacacgacaataccccaaacatcacaaaaatgggcaaaaattagggttcctagagttgtccgaaccggtaaatcagttcagtggggtttcctggagaccaacttgttaaccagtttcccaggtccctctaaaccaaccgacggaccagttcagtgcaggaaaccctaaaatcgagctcaacaccacaattcaatcccaaactttccaaaaatctccagaacacctgtatataccataatgaatccaactcaagcaataaacctcaataagatgcccagaaattcaaaacacgattaaagatccaattcaagttctctattctaaattttttacaaaccaccctacaatctgttagcacaaactaaaactacacaaataaatctatcttaactttagagcataaaattaaactacttgcataaccacataacctaaatcctcaaatcaaacaccaaaacccaaacttgagctaaggaatattaaaaggaagaaggcaaaagtgctataccttgaaccaaagctctcaattccttctagaattcttagaaataagctgaaaaatcataatgaatccactaattcatattaatcatattacctttactacaccaacaataattctacaaaaagacaaaaaaactccttaccataatgatcattttgcccttgaccaataacacatataccaatgagaccaaagggtaatttggtcatttccaagtcccgtcgaattcctgatagtccaacatctaacaatgataccccgctaataaaccattgtaaacatatgaaaacagactctctaatggcccaacgtcgtattccactaatgccgaacacaaacaaaaaaaaacaaaaaatcacatatataacatatttaatgcatactgaatttaaataagtctccacaaaaatgaaaatcataattaataattcaatctcataattaaaccctaattatttaataatccaacatattaaaattaggcggtctttaca

SEQ ID NO: 71733 - DNA, 1966 bp, Cannabis sativa
tcttggacccttgagagttttggggtctcgtacccttaagagctggagacctctcttttggggtctcggaccctatacagttgggaacctctctttgaggtctcaaactcattagagtgggagatttttgtttggggtctcagaccttttagagttggagacctttgtttaggatctcgaactcatgaaaggtggatatctcttctttagatcttggacctcttaggttatacttgttcctccttattacatttgggatatttatagcaaactttagagcccttggtattttatattggcttagtacttgccctctttaaccttgatgtctttaggcttttcttcatacacttttacatctttgacatttatgcctcgagatcttctattgtatgtggatcccattgtaggggtctctaggcttcttaaactgcatcgaccctgaatgtgttatccatgtatcattgtaagggaacttttgcccttccttgtgcagcgctctaccttatttaagaaatataagtttgtgagggaagctttagccctttcttaggttgcactcaactccattttattacattcttcaccctgacggtgtgcgcttaatgttttgtattttatacatcaaatatgacttgttagagtttttggatgacaatatataaggtattgttcatggtttcttctctcatttatttctgcataagattcttagagatgagtgcttaatagaggtttattatagggtattattggtggatgtatagacacattttaaggttcggggtgaccttttgttttcttcatcagtcgttcaccctcacgctttgcattattttgtccagtgtctcataagttattgccacatgcaatctctaacttcttaaatggggtttgtttattttacttacccccattttatgcctcttacaacactatttcttgcaagaggttgtcatctccaacctcaagcaagatgtaagagtaaggcacgaaggcttagtgagatgccccttcagaggtgcatattgacgggacacatgttgttgagatgcatactatcgagatgcatgcgatgagaggcatgttttcgggatgcatgatatagagacaaatgttttacgaacacacgctatcgggatgcatgctgatgaaatgcttgctgacgagacacatactaccgagatgcatgcagttgagacagatgctggcgtgatgcatgatgcaaagacacaagctttaggaaagatctcggccaagatgattgggggaaaaccttggtcgagttatggatttgatagcgggtagctcgttagaaactgttgtctttatggtaactcttagtaaatttgattagtagccagtgaaatccatgggatgaatcccatggatgatgctagtattataataaaataaagattacatttattatgtgatttatgtacataaactaataaagacttctatagagagaactaagcaaatttctaactagtaagttgattatgaaattagtaatatatgtgtgccatgtgattgtgatatctatttaatgtttttaagatcaacaatagtagaaatttgacaaattgacaaaaatatcatagtggtatagcttaatagaggtactgagaatttttatggataattagagattatgtgttttagtgggttataagggaaatgatcctttcgccataaaattttaagttgacgcaaatttttcgtcaactcatctaataagattgcaaaaataaagaggatcgcggtaaattaatttgactaataaaactacaatagattaaattgaaagtagagattaatagtagttcaccccccatgtcgcgatggtaatggggctacgtctacttttatttttattgatcatattcgacacatcagagttatgttctcaagagtgtgttgataaaagtatagcataggttttctaggtgaaatcttaatc

SEQ ID NO: 71734 - DNA, 1255 bp, Cannabis sativa
atcccacttgaccttccccaggcggtgtgagattgcacagcttacctggtatttctccttacggatcacgggactactgactgtcacacaaaatttaaggagtaaaaattttaattagcttttattattattattttattattaacataatttgtagagaaacacatggacctaatactatgcttctaagaaaacaacaatttgttgtgaaaattattatttaattcactagatgtgccaccttcaccaatttttttattattttttttaaagaaaaaactaataaaaatttcacaaatgttctgtttttatagggtgttgaagattcaatatacagtccaactttattgttcaaataaataaataaaaataataatatagtccaacttttaataacttataattttgatccttttccctcatctcaaacaccatacctaataagttatttaaatatatagttaaaaaaattaaaggttgactttttttttttttttacaattatttgaaaaaaacataaaagaaaaaacaccatttatttacatttaataaatacatattatttttacttttttttttaaaaaaaagacttcaattgggacctcctttggcaaaaattatatgaagataaatcatagataatagaatatgtaatatcaaaataaaactatttacttattatttgtaataatcacattaattaattaattttttcaatagatccaaataatgtatactttacagaaaataatattaaaatatcaaaattttggaagatttaaatctataagaaaacaacaaaaatttggaaaagcaaaattgaaaatttggtggcaaatctctaaataataaatatcttatgagaagagattattgaaaataaaagtaatttaataaataaaataaatatcttatactagagatatgacaaaaagaaaatgtagaaaatagagaaagataatattctaaaaatgtatttttatatgctgaaaaaaaaattataaactataatacaatatatatatatatatatatcgtatatcttatatgtatattatatatttttgttaacttttttttttaaaaaaataatattacagaaccataattgcataatggagctcacaacaataattgagtaatgttattttaattattattgtttatttatttatttaatctaaaaaaaaaagtaacttcaagtggtattgtatattattcattatctcacaccactcaattatctcttaataaa

SEQ ID NO: 71735 - DNA, 833 bp, Cannabis sativa
aaaaattaaataaaaattttactaaaaataatattttgtgtaactttttcaataaattaaacaccaaatttacccatcacttaaaataatatatagcatgtaattatttgatgcacaattttgtgttcataaattattatatttccttttttcttttctgaaacttattatacttctctttcaaatgatattgattttatgttttcttttaactatttatttatttaaatttttttgcatgctctcatattttatattaagaaagaaaaaaagagataaagatatacgtaaaaagagccgtggcgtaatccaatttattcttagtgagagagacatatatacatttttttttaacaaaaaaagaagtgatcatcctaaactgtgtcattttaaaataattgagattatctttgtttgtttgttatgacatagccaccagtgtcaattaatagcacaaggttttcatggtgttgttttgtgagttttgtcatagtgcactcacataaattaaataaaaggtcgtattcatcactatgaaaacgaaggctcatatatatatgagcattgttacgaggcattcatggtgtctgctaggcaccatagtaaaatatcgtcctatgattgattagcaattttttataatattaattattaaaataaaataagtgggacgatcgataatattgagttgtaatatatttacacttcaaaaaaatattaagtggtactctttaatatttctctaaaaaaattatatataaatatcttctaggtcatcaaaatgtggtcaatattgtattcagcaaaacttgtattaaaaaacaaaagttgat

SEQ ID NO: 71736 - DNA, 1308 bp, Cannabis sativa
  modified_base (442)..(442): a, c, t, g, unknown or other
aaaaaaattattttggtatctctcatttgttttcccatttctaaaaattttagttaattttttttttatatataaatgtgtattttatatttatttaaaattattagtaattttttttttaatattttacagtttcaaaacaaaattcaaaaaattaaataaaaaaataattgcgctcgtaataaaatatttattaattattcataatttttttaaattataattgattttaaagaattataacacactcgattataaaataaataaattgaaaaattcttttcaatatcagatacaaattgcacaagaataggccatgaatatataattattccaaaattttagtttatttgatggaaacccattaccttgaagagtcttcttttgttaagcaataatgggttcagattcagagtatatataattatataaatatatatanatatatatatttattgtatgtttgcttacatccaaaccacatgaattattacattggtttccaacttcaaatcactattgttacaaaccatcattacaaaacttgtaatataagattttgaaaattattaagaagatcacaaataatttaaaattataattaaatatttattagaatagttttagaaatttgaagattaatgaaacatatgatgattttgtttattagcaaataaatccacatcttaataaaacacatgacattggatttaattattattttttttataaaatatttgatttaatttaatgtaatctaaaaaaaaaaagtgagaaaaaatattgttaaataatataaattagaaaaattttgtgtagaccttctctttgtttagatagtgaggaaattttctttttgtacgttataattagttaagatcacttgtaaatttttaaaaaatttcgagtagtttataaataattatttactacacttataagaaaaagtaatcacacgtatataaaatatttaaattttattttcagtattataaattatttaaattttttttaaaatttacacataattataaataactataaggtacacgattataaaaaaaatttgactaattttttttttcttaaatgccaaaataaatagagagtgtagtatatatatatatatatagacttaccctataaattaatggatttaatgtgaatttttttttgagtcaatttaatgtgaatttttaatatttggtagttataacttttattgtaggagaaaaagaattgttaatgtaattttgagaaagtgaaattagtaaggtattaatcattagctcgtgcatatgatgtaat

SEQ ID NO: 71737 - DNA, 1742 bp, Cannabis sativa
tttagcgatcgttggattggtttaactcttggatgtgtgaagtctgtccgttatcatgtaatcaacagtggtcagaagctggggcctatctttcccacgagaggtattcgtcaaggctgtccgttgtctccatacttatttattgtgtgcgctgagggtctttcatcactcatcaaacatgctgaagctacaaaactcatcacgggttgcaaggttgcccgtagtgcacctccaatatctcatctgctttttgccgacgatagctatgtgtactgcaaagcttctgaggaggaagcaaatcgtgttcttactctcttgcgcacctttgaagaagcttcggggcagaaggtcaatctccataaatcatctgctttctttagctcaaatacaaggtcggacatgaggagacgaatctgtagcttgatgcaagttcaagaagctggggcagatagtctctacttgggcctcccaagtattgttggtaggaacaaaaatgctgtcttggggttcctaaaagaaaagatgagaaagagaattaccagttgggaaggcaagtttctttctcgggcgggtaaggaggtcctcattaaatctgtggttcaatctctcccttcatacgccatgaatgttttccttttcccgatcggcacttgtaaagagcttgagagattaatggctagcttctggtggaaatcaaacaagtccaacagcaatggaagtgggattgtgtggatgaattgggatagaatgacaagggataaagccgagggtggcatgggttttaggaatttgagagattttaaccttgccatgttaggaaaacaaggttggagactcatgtttagacaagactctttggtcagcaaggtgtttaaagcaagatactactcccagagtgacttcttatctgctgaattgggttctaacccaagctttatttggagtagcatccatgctgctaaagacactgttaaactggggttgaggaaaggtatcggacctggtacttctgtgggaatcacctctgacccgtggctgccaacacttgatagagcctcccctataccggttgtccctggtcttgaaaactttagtgttaacagcttgtttcaaatacatagtcgcaactgggatgtcgaagtggttagagatgtattctctcctgttgatgctgcgattattttggggattcaaatcaaccaatcaaccgaagatgattattggtactggtgtggtgaaaaagatgggtcttattctgtcagtagtgcttataaattgatccaagacaaaaaagcttcccccctgaacttaaccgaaagcaccttttggaagaaattgtggtctcttaaggtgcctcccaaagctaaagatttgatgtggagggcggtctctaattgtctagctacaagggtcaatctttgcatcaagaaggtgttgacagatagtgcttgccccttgtgtggtatttatgctgaaaccgaaatccacctatttgtgacatgccaattcgcaagctcttgctgggaagaagctgccgttgcagatgccagccgaaacaataacacccttctgcaatggatgtccttcaatgctcacagtaaagataatgaaaagctcagccgaatagtcatgctttgttgggcactatggtcggctagaaatgatttaatttggaaggctcgtgttcgaaatgtaagtaatgtagttgcttttgcttcctcaagtcttgatcaatatgttaa

SEQ ID NO: 71738 - DNA, 1330 bp, Cannabis sativa
aaatttattttatatctatacttatacgggttattggattcttgtatatacaagcattaaattgatatcatattcacttgatcatgataacacacatatatatacttacatatcgaaatacagcaaagcacgggcacacacacatatataaacaagtgaaagagtagtatactgctatatgattagctagggtttacatgctatcattaagttgtgcagatatgaaaaaggaaaacaaatatccatgcatgcaaaaataatatgttggcgtttttgtctttacagagtgttcacaagtcacatatataatatatatgaattcaattcttgtcaaagatgcagtatatatatatatatatatatatataaatacaatcatgtcgatcacaacaactatagctgccttcatctcaattttcaattcaagtacttaatcattttaagttttgtactatatatatatctttcaaaatgacgcggtggtatctttcatatatagtacacttgactttccttgccctagctagctaatatataacaaccaaaattacacacatatctatatatatagacccttatatatataattatattgagctggcatacacatataattaattctattcgttctatatatggccaggtgtacaattctccattctcttgtaaatatgaaaattttgcttacgttacttataacagtatcaataataacattgctgtcataacgtgtttttaatcaattttgcatggtcaatattcatgtagtttttggctcttttaacaagaatatatttcatttttttctttaacttattatcactgtgtaatacgcgttgatattccaattataaattgactttacagcatacaaatactatatatatatatagcatcctaggatatttatataaataaatataacagattttatatatttatagttaatttaaatgatatatattaaatccactacgacgataataatatatgtgttacgctctctaattagtatattggcacttgactgttctttttctaaaacccaaaatatatattaaggttttcaaaaactggatcagatacgtactgattagtttcacgaatcgagaagaaggaaggaaagataacttcatgtttttttttaaaaaaaaaaatgaaagaaagataacatcataaaatatcataaaactcacaataataagatacatgggattatatcttaaacaatttatttccacagcactaactttaatattgttactttgggataaggtgaatgaggttctatctcaaaactaattagcaatgggagaaacagtcaattcat

SEQ ID NO: 71739 - DNA, 1390 bp, Cannabis sativa
  modified_base (75)..(75): a, c, t, g, unknown or other
accttaggtattttcaccgccaatttttgaggttgaggactaatcggcatcaacctcaagtttttggggactttngccgcaattatccctaaaaaataatataggtaatgagtctcttatattttatcatcatattaaattaaaagaaaaaaaataatgctaatgtgacaactaaacatcacatcaaacttttactatttttttattttataaaaaataaaaacagacattaaataaggtcttattaaatatgagacaagtgtcaaaattagtattacaagtaaaaatgacagtatataaaataacagtaaaaatattaaaaaaattacaccatataaaagtataaaaataataaatataaaagaaaaacaataccatataaccccccaaaaaaaagcaaattacacaatacacctagaaatttttatttatatttttactgatttattttacaagttttcctttgtttgtttgtttttttttaaggaaatttgtatagtttcaaaaaataaactaataatgttactttcctatagcagtagcgttaaaatagtatttttcaataataataataatagaaaaataacattccatatttttataaaaaatccttaaaacatatcaacagattcataaaaatataaatattttatcatttatctataataattctcccaaaaaaaactaaagatggatgttttggaagttggaaggatataaacctacatggtattattcatgaatgtgcatctatatctatatatttatataaaggaaaatttaaaagtaatgatgtggcatgcatgttatactcttttcaaagtatttttacaattttttttaggaagtttaagtttttaaagaaaaatttcatatcattttttattaatttagttaaaactctcacatttttaaagcgactttagaatcgctcatgtagtctataaacaggattggtcctgagttaaaatgggttataggaaaaaaataaattttgaacctttactataaagataaattatatttttaaaaattagttaaaaaaatatgtatatttttgaaaaggtattttttttatttgggctcctaaaatgagtgggccctagcccgcctatacctaggaccggccctgtctataaataattttttttttttactttgatgtgactcgatattaatattaatttatttttacgagtgattaatatcttactcaattagttataattttttaatatattatttatatatttaaatttctttatttatatctatatgtatgtatatatcgagtttatatatgggcattttacataaatgtatacatttttttaaataattacaaaaaatgtgcaaaaaaacacaattttaaaaatgtacacatttgaaa

SEQ ID NO: 71740 - DNA, 1328 bp, Cannabis sativa
tttattttcatacagaattttgttttatccatcacgtagagaatctgctattcttgcatggattttgagaagagaaatcggaatgtccttcgaaggaggacagcttatattggaatataattttctgttactttaataatccatctaccatatttattgaattctacaatttttggaaggcagaatgatttccatattgaattatttctctcttcaatttgaaaatttcagacgtcacttgtggcaagcaagcaacaaaatacataatttgagacattcacttaatgcatggatggtgttgaatttatgaatttatgctaatgattcccttttttgtaagcatatctttgctatattgcttttccagcacttcatattctcttttctaccacaaaatttaccaaaagagcaagccactgtcaccactcatcaccatctttcatttttcttcattctctttctcttaactggatgggttcttgatgcccaactgaaagggaccttaagaatcactcgggtgtccgtttgcagagaattgcttaaaaaataaataaatgaagtgggtttttttttttcaagattttcatgttaacatgacaagtctctctttttttttttttttgaaaaagtacgactttatttttattttatttatttttttggaaggagatattcattaaaccaaacacacagttacagaaggaaaaccaaatccagttctaaaaaggactagcagctgccccattccaactagcagttagctcatagcaaaacttcattgcaccataacttgaacagggagaatcaatatccttgagcatactattgacgtcgtgacaaatttcaatgttcaatctatttggaaagtgtaacttgaaaacataccaaacctcaatataatacttcattttttttcttcaaatatgtagacacacatttggggaggtgtatacattgaaaccaaaaaaagaaataaaaaaaaaaaagaatcccttaaaaaaccttaaaaaataatgtatctcaaactcacactcaagtaagaatttatgtctcttggtaaattaaattgaattgcatagagcaatcctaagcacccacaacaagcaaaatctttttttttttttatcttcataaaaattcttaactttaaaggccatcaaggaccatcaaatttttacaaatttgtgagcttcaaccttaaaaagaaaaaataaataggacaaaacgatgtataatgccccttctcttcagtgaaaactgttggattaaaaatcctatgtgggcacatatgtataatgtatatgctattataaagtgtgatacaaaat

SEQ ID NO: 71741 - DNA, 1379 bp, Cannabis sativa
gagtagcttaattaaatggaatacgtttggtacttaaaacatctttaacaagtatgtttagaaagagtacttagctaattaatagaatgtgagttttttttttttttttttttgaaagggaaatcttcatagaatgtgagtttagagcatctattttagcatacttttaatttaattttataaatttttttaaaaataatttttattttaaaagatttgatttgagtactcttaaattgataataaataaatatatttgaatatctagaaatggggccaagagtagcggaaggaaaaacatgtgaggcacgaagccaaagccacaggggaatatgcgtgacgaaccacacctgcgataatgtttgcaaaatcgaacgcttttccagtggttactgcagtggcattgaccgtcgttgtttatgcactaaacattgctaaaatgctaattaatcaaaaacaacactacctcacctttaatagaatattacaataaacatagtaaaactggcttttatatgccatggttttactgggtgtgttaaatgtatgtgtgtgtttatttttgggttttgttgggggtgttatgatgatgtaatatccagaataaatatattattatttgatatattattgtgtgttatattttattattgtactaaatgagatatatatgcgtattattggtattattggtatttgttaagtataactatattttaatgattatagattttaatagttagattaaatattagttaattttaattgtattagaagatataatttattaataaatatttgtaagatgaaataataagattgttatatatataataaaattatatatgtatagttaataatatacatacgtaaaaatcaatataagataagcacaacattcttttatttgttgtttaaatttcttttaaccatgatttagtttgttgatcttgatttgtgtgtgttcaaaataaattcgaagcttgcaaattgaagaaagttttgaggatcgtcaagtgaaaagtattttgaaacttgtaaaagaaaatttcgaggaggatggagacgagcacaacaacagtggaggatgatgaagcttgtaaaggttttggagcagttgcaacatatacgagaagtggttttgaggatgatgaagatgataattttttttgggcaatccactatagcgatggtttaaaatcgtcttctatactatagacgacagttttaaactgtggcctatagtcctgactatagccgacaattttaaactgtcgggaattcttttatactgacatttttttaccgtcgtctattctactaaatattcgcaacgcttgtgtaggtgacagttttatagaccgtcgagaattctttac

SEQ ID NO: 71742 - DNA, 881 bp, Cannabis sativa
  modified_base (50)..(50): a, c, t, g, unknown or other
  modified_base (288)..(295): a, c, t, g, unknown or other
atatatatatatattatatagagacttgcctaattattattattattatnattattattattattattaaagtctttggatgcctatgacacatttcacctgttgtggtttctctatcttttctcattaaattaagaaatataaggtgatgggatgttgttcgaagaccttatagctttaccgtttataatttcaggggcagttttgtctgatgtggctcgcgatttgattttcgcagctcatgatttggcaaaacataccattcggttagacgatgagctatcctgnnnnnnnnggctccaccgccgattgtggtgtgctgcattgttaatcatgaatgactctgttcaccacgtcaaacaaaattaagaaatataatacacaaatatttaaaacgttattagaaatttatttttcacactataaattattggaaattttttaaaaatttataaatagccctaaataattacaaccactacaaaaaaaaaaattattattttagtcacaacaaaacttgtaactaaaagtaaaaaagttataactaattataaattattatttttatgttgtgactaaaaggtctgtggctaaaagtattagtcacaaaaattacaatttgttatgattaaatatatttttaatctcaatacttatggtgactaaaactcacatttagtcacaaaaatttaattcttctaaatgtcgaactggataagagatatgctaaaacatatcttttattggagatgtactgtaaactttctcatatataataataataaaaataataataataataataatgaagtctccttaatcataataagattatcattgttaattattttatgagagatctccttccacatgttaattat

SEQ ID NO: 71743 - DNA, 1212 bp, Cannabis sativa
gcctctgatctcacccaagatttcaaaacagggtacctaacattagcttcgccacgttcaatgttcgtgagccaattgattggaacagcaatgggttgtgtcatctctccttgtgtgttttggctttttttaaaggcttttagtaacttgggacagcctactagccaataccctgcgccttacgccgcgatttatcgaagcatggctttacttggagtagagggattctcatctttaccagagaattgtctaactctttgttatgtgttttttggggctgcagtggttataaatttggttaaggatcatttggtgaaagtgaagccttcagtggcaaaatttgtgcctattcctatggctatggctatacctttttatattggaccctattttgctattgatatgtgtgttgggagtttgatcttgtttgtgtgggaaaaggtgaataagaataaggctaatgcttttgggtgtgctgtggcttcgggtttgatatgtggtgatgggttgtggactttgcctgcgtctttacttggtgtttttggggttaagccacccatttgtatgaagtttttgtccagggctactaatgatcgagttgatactttcttagctactttatcttagctatagtaagacttgagagtttttagaggattataatttgtatatatatatatttatatattatatgtgtatgcttatcaaatgtacgtatctttttatgtacacgtatttaagaaactccccatatatattaaataatatatatgtttgtgatttggttttttaattgtgttactaatttgatgtttgatttgcttgtaaataaaacgtgtcattcatgaaatctagagatcttgttatgactagacaagaatatggataattacaaaataattaataaattaaattgtatatatattaaagtccaagagataggggtgttgattggattaaaatcattcatggaattttatctcaaaactaattagtgatggctccttcaaaatggtggctatttttttgtgctcaccaatcttaaactgtatcagagtggacatggccattgtctgtataggtaatcacgtttaatattcaaccagaccaacaaattcaggtaagattccaaccaaatagcattatcaagccaaaacttaattaatattttaaactttattgtataattaaaattaataatgtagtttctac

SEQ ID NO: 71744 - DNA, 1904 bp, Cannabis sativa
ttcttatttttattaatttaaaaagtactggtatacagtgacgcaccaagcgtgaatggacaaatatatccccactcatctggcgcgtcactatatcacaatcctattttttatataaaaaaaagtacagctcaattaataaataaataaatatatgtatttaataatggtgaaaccctagtaaatctcaccacattctctctcttaatcaattaaaaatctcaatcaattaaaataaaatattagctcccttatcagccaatacaaaaaattaaataataaagtataaaataaatgtaataataaaaaataattaaaagaggtaacattttaaaaaaccctagaactttctctttctcttaagctctctcttctcgtttcttcttgccatctgaactcaaatacacttcacagtcttgagccgaggatgaagtagctttaccagacgacaaacgagctccaccaccgactacgctccataccctaagctccaaccccacgacatcggtcctcctccacagcccgagacatgggcattcgttacaatttcccccgaagcccaaccccagccccgatcccattcttaatcgaaccaagaatccccttgtgcctttcctcctccaccaccagcggcgatgcatgtcgaagatcgggctccaatctccggcgatgccgccacctcgatgccggaggagtccaatccctacgtggcccctcctgcaccgccgcctgcctcctctgccaaaagtgagtataccttttatctttatgcccttcatttcatttattaatcatcaagtaaaagttgtttgtgatccgagagtttggaaatatttgataacaagtttggggtttcatatttttgtgatcagataagatggattcagtgaaagatgctcttgggcaggtgcgactctaactattttctgttctattttattttttgggttttgaagattgtatagatttttctttttgggtatggttattttgtgttcatgataattctatgtatatgttttcttttagataaactattagtaataatggtttttgattttttttttttttttttatgtttttaggtcctaagaacatccaaatctgaaggctttgaagctccagattatggatatgcatattcccacgagcactatgtttaagatctggtttataacttaagatttgtatttaggtttttgttctagtaatttttgtatttttttttctttaaagattagagattttagatgtttatgtccatttgtttataagtttttgatttatgatttaagttttttttttaattcagtatatatgttgtatatttattatataagtttttatatatagtctttctttttatttataatttatatatagtcaaattaacatatattaagtttagtatatagtaattaaattatatcattaattatctaaaaataaaagtataaaattaaataaaaaaatataaaaatatgatattatttttctaattaaaaaaattatattattttttaaaaaaaatatttagtatagtggtactttttgtgtgccactatacctaaaataataataaagaataaaaaaaagaaaaaaaaaaagatatagtgacactttttgtgtgtagctgttactttttcagcctgacaaaatttgactttaaacgcttatagtgacgcgcattgagtgactgtaaaagggttacgtgacacgcgtgaagtgtcactaaaaatggtctttccagtcacactcattagtgacgcgcagtgaagtgtcactaaataattttagattcactcaatgtgtgtcactaaaatccatttttctagtagtgatttcggtagaatttggatcaaatttgatatattatgttgtgttttgtttagggtccactcgct

SEQ ID NO: 71745 - DNA, 1810 bp, Cannabis sativa
cccatgcggcattaaatgcgagatgactgttcagatagggtctgacacctcccggaggtgctttcttgtggccttgctctccaggggcatgcgagacttacatgccttctccgggaggcatgtctaaggtaatcctgtgcttaaggagacttagccaatttatacaaacgctaaaccttttccacctacgtgtcatcatccggttggtccacgtattttaggcaaaatcaggggcaacaattattattaaagaagtgttatcatcgaccttctattacaatcttttaccgtatctctaatgggagcaacatttataattgccaaaatacacatattatgctaaaatattatttttttttttattttctctctcatccacatataagatttgtcattttttcttaaaaaaaaaaaagaaaacctctaatggtgacaactttaaaagttgcccaccaccacatcatattgaacattttaaataaatattaacttttttaaaataaaaatggaaaaatgaaaaagatgacatgtggttattgtttatataacagatacatgatcaaatattctcttatgttctctatcaaatattagaatttttttcatatatttaagactttgttttcatattttattttattattattattaaagaagtgttaccctcaaccttctattacaatctttatcttttaccgtatctttaatgagagcaacatttataattgtcaaaatacagatattatggtaaaatattttttttttttattttctctctcatcgacatataagatttgtcattttttcttttaaaaaaatacttcagtggttgataattttaaaagttgcccactatggtgacatatcacattgagttaatgacatcttaggtaaaaaataacttattaaaaaaaataaaagaagaaaaaagatgacatgtggttattgtctatataaagtaacattttccacataaaatttttcttaaaaattagaccacattacatatgtggcaagacaactccaattaacaactccaattccagatgctctcagtcaatctctgtgtctcaaaacacatggcggattttttttttaatttttttatggcagtgtttgttacgcttacaacattattctcgtatatttttgaaatttttttaaaaaatttaatgttttttgaacacgcgtagtaaactaaaatatcaaaaactctacttttgttattgtaaactattattcttttaaaaaaaatttacaactgatactataactataataaatatagaaattgaaaaaaaaaatcatcttatatatatgattttgagacttgatgaatatggccatatgaaaagttgtaataagtagtagttatgataattagcactactcttattattaatattcatgttcatctcacgacatgcatcctgttgtttgatccgacgtctgtctatcctcagcagtgctattttctattaataattaaggaataacatatagatatttcattcctccagcagttgaagttgaactggcaacaattaaaaactaaaatataatatgttttctctaaaaagaaaacattcaaatatatataaaatagatacaaagtcaaaaacacaaatattcatctatatattggcatttctattcacattggcaattataaaaattattaatttgattatttattttcttaaataataaattagattatgtattttcttaaatagtagctaaattaattttttattatcaaataaaattttataataactcataattacatgcaataccaaatttattt

SEQ ID NO: 71746 - DNA, 636 bp, Cannabis sativa
tctaccaattatattcggcagtcctaagtagaaagacccttcagtagcttcaggcatgcgaagagttgagcaaatttgagttttgaccacgccatcagagttaggactgaagaatattaaagacttagttgcattgattcactgaccataagcaagctcaaaagagtgaaggagtctattcatactattagcagcacttggggttgcttgggaaaacatataactgtcgtcaacaaaaagcatatgagttatagaggggccccgtttgccacacgacacccatggatgatcctgtttgtttcatatttcttaataagatcttcaaatgataaacagatatgtggacaaaggatcgccctggcgaatgcctcaagaaggagtaacaggacccatgatatgaccactgtggataacagagtatctaaccaaggtgacacattttagaataagattaatccatttgctggcaaaacccatacgacacattacagcttgcaagtagccccattcaactctatcataagccttgctcatatcaagctttaaggccatatagccttttttgcctcttcttttttgcttgaggtagtgcatgatttcaaacaccagcataatattgtcagagataagcctacc

SEQ ID NO: 71747 - DNA, 1076 bp, Cannabis sativa
gcccaatgcttcacaagtttctgcacatgtttcgaaatatgttcagcatcatcttcacaactccgcagtgatcgatgaagatcactgcggttcgccatgaatatcctaagctggaatgctcgggggttaggggaacccgactgcatttcatttacgcttgcttatttctgagcaagctccctgtgttttgtttctcatggaaactaagttacaatctggtagtatctccaaattccgaaatagtttgcactttcctcatggtattgaagttcctcgaattggattaagtggtggtcttatgctattatggaaatcgaatgtggatattgcaattaataattactcttccaaccacattgattgttttgttgaacttcacggtggactatcttttcacttcactggtttttatggtcatccccaagtcagctaccgagttcatacatggaccttactcaaaagatgttttgacatagctcctcttcgaccatggcttgttatgggtgatttcaacgaggtactttcaaataatgataaaattggtggccctatccgcaatcagcatcaaattcaagcttttcaatccaccattgatctctgtcatctcactccacttacttttgaaggagaactttgtacttggacaaataagtgtcaaggtgctgggaatgtcaaggaaaggctagattatgggttttgtaatgaattttgggcagatttttaccaacctgttacaattaagcatctcgatttttatcactcggaccatcgtgccttaaaatctcaagttttggaacttcaggagcagcaaccacaaccagtcttcaaatctcgatttcggtttgagaaaatatggctccaggatgatcaatgccttgatataattcagagacattggtctgaggattaacctgatcatatcttacaacttactaacaatttggcctcttgtgcatctcatttacaaacttggcatcatcagaaatttggtaagatgaagaaaaaaattaagaaatcgcatgaacatgtagctgcactacagaactcctcaaacacttctcaatcgcactttgctg

SEQ ID NO: 71748 - DNA, 1574 bp, Cannabis sativa
tttccatcataatcaatttttttttccttgttataatttccatcttctgaattatattggttttgattgaagaaaatcatattaattattgtaacaaattaatatctctgaatttgacaataacaatcataatggatcaggaatatatgtattgatgggattggtatttaagagcttaataaccatcatacattactactaatattaattatttcattttagtgtatgtgcccagttatgttaggggaactctataaaataacccaattttaattactttgaattatttaagcacttccgtttaattttactaacggatgtctgacatgtataaaagtataaagatcacaatttagtacatgttaaagttttgaaacagtaggcgcaagtcatagacgtatgtttctgcggccccccaaaaaaaattattaatgtatagataaaacactaaataataagaaattataataaagttttggttggtgtagtgtagtgctaaagaatcttactttaagttaagagacaacaaaagtccatgactccaataattccggagaagttttaacgtgttgaaaaatttagaggacacaatttattatatatggaaattcggggaataaaaattctaattagcctaatagtaaaatatgtataattcataatttgcattacaattaaggtgtaaaaattaaattatataaatttttgtcacaaatatatatgaaataaaattttaaacaaacaaaaatattattgaaatgaaacattacaagctaattaagcacgtaatgatataaatatggtattaattaattgttggttatatcttatgctaactacatatatatatatatattcattaccgtgtgatcgtacatgatttcttctcttaattatgtgatttaattagtcatctttaaaaattattattatattgttgctgtaatttcatcacttaatttaataatctctagttgattattatggttaaaaaattaaatgaggccatttatttgacatggcacactcttttctttgcatccacaccttccaaatccttaatcctccatggccagaagtattactactcctcttctccttttgtttcttgtaaagtacaaaattatgacttactcctttggatccaattttgtctagaggatttagagaatcaaaatttggataatataggatgaaatcatggacattagtcccgagaataggccttcgttgttgttgagcgtaatatttcaaggcggtgcgaattactgaaatgacaagctcatcctcatctaccaacagtttcatcggcccggggctaccgatgaaggagatactgattaacatcagtcttttctttgagttcttctttaactttagaccaaacattttgacatatgtttagctttattttttcaaatgttgaaaatgaattagggtttagggtttgagagggagtagtacttagggttttaatttttggtttagtctggggtgatagggaagtaatagtagtggtacttagtaataattttggttgtgtttttaatcatcaatgaaggaattattattag

SEQ ID NO: 71749 - DNA, 1463 bp, Cannabis sativa
tccaatcaacccaagttttaataaaaccaataaaagttaatgtaagcccaaataaaaagtctaacaggataattatttttaatctgtctgatgcaattatctttgggagcatgtaacagaatttgaagaacaaaaggaggataaggtggcggtaaattagtgctaccgtgaccgacaaccgaaattaaatgaccactaccaaaaacaatgtaatgatttttagtgcttgaattgaaataagacgagagaatatctgcatctgctgtaatgtgagatgttgggacggtatccatgtagtagttttaatcgggttgagagaaagatagagcatgcatagcgacctccaccatttagtctaatagtttgggttatttgccaaagtcggacttgggcgtaaccattattatgtaatttagcttagaaactagtgacaagattaagcttatgtatattgttgtttatctaaatatgtgcatctaagttttagttaatgttttcttttattttatgtgactacatgacaagtatttttttactgagtttagtaactcacccttatcaaacttaccatgtgcagattaaggttgtaaaacttagaaagtcggtggcaagtgaaacattggaggcttgtgtgtgtactcgcttaggaccatataactgagggtgatttagggcacgctccatttattttattaagtgttattaaattattgtcgcagttatttttattttattaattattatgtctttaagtccaaactgagctcaaatatgaaatattttatgtttataaataaaagcgacattacagtttttctgcattttaacgcttataaataaattagtaatttatgtaaaagtatgggcgttacacttagttctatcgtcactgtatcgtcgtatgtgcataaccacctttgtctcaatcttgtaagtgtctctcattcttgatttgttgtattattcaacactttagactgatgacttggtgatcgacgaaacatatgagtcgccataatacagaaagaagtctttcagattattggtgatcgcaacagaaatatcagatgccaatctagccatggtctgaacttccttcccttccacttttcgagcatgcacaacaattaacaagtccttttccttgatattcagactctttacgaaattaatcttctcatgaactgatgccaaaataaggatatccaaattcacggactgattcaggtctattaaattcatcagtgacttctcacaatcgcaaatggtgtaagtaacatggcaatggcattggactcaccgctgcccttcgcgcttgaatacccttgaaaaagtttcagtggccccgtcggcataagtattatttataatcacattcactttttttattttttttttattgtaagattattgctttgtttttttttttttttttttgctgaaaacatttctctggttcatat

SEQ ID NO: 71750 - DNA, 1051 bp, Cannabis sativa
agttttgaattgtgtttcttggacattgttactgttgtaataacctattttgagggtgaagattcaccacattaacaaatgatttaaaataaataaataaataaataaaataaaggaactaataatactttatcaaatttgggagcatgtactcttgtaaaaaaacacaatttattttttcaattttagatgtatttttcatcattttctttttcacttcatataaccttaattccaacaataagtttaaggccagaaaaaagtacaattgtcttggcaaattcacatagaaaacatacagaatgtgaagtttttcattattattttctttttaattttatgttattggtggatgggatcgaattcaatttttatttttctaatcaaaggaattcaaacttagaaccacagaaaatagatttcatacatattagtctatatagaagctatatatagctataactcttgtgcaccaaactgttagagctgtataaaaagtcaacattttgtaataaagtatagaaagaatgccctagctaacaatacatatagtgactactccaaattaacttaacctcttactaaacattatcccatcttatgtgcttaaacaaatttgtgatgaattcatgagtttcaataattagaacagatcctatcctatgtttcccaagaaaatgtcagtttttggtgttagatctttttcccactaaaaatatgatcacagaagagtagttgaaccttacatcagtaaataataaattatttattgcaaacaataaggttcatgatcatcatattattacatgatgatcttttacctaggttcgttgtagagtttttgtacagacctagaaaattatatgtaaacgaataattaatatataagagagtattagtgtatatatatatataaagttgttatgataatgttctctctagaaactaatactactaataatcaataataagtactactaaaacagttttaataaccttcccaattttataacttaattgataaaaaaatagtctctctctctctctctct

SEQ ID NO: 71751 - DNA, 1755 bp, Cannabis sativa
  modified_base (27)..(28): a, c, t, g, unknown or other
tctggattacattgaaatagagttttnnttagggcataaaaccaaacagtagatatatcttttgactttgaatatcttagattagtggtatcataatccgtgaaatcaagaccaacaaagaatttggtgtgagatcaaactaatctatgtctgtagcaatgcatggtggtgttacaagttcatttgttgcatgatttgcatcagatggagagtgagtttcgggctgaaaagactttttgactatgggaggtagtgtttgtgttggttggtcagtcattttctagttggaaaacaagaagaaatgtccaggagtgtggagtttgaacttcaatatagttggctctttttggtgagtatttaagaagccagttttatagggaaattctttctcattgaacattacattctttgctatatattgcctacctttggagcttagaaacttatatcctttgtgagattcattataccctaggttttacacactttgtggagtgaaattggaactcatggttctgatacggcctaagatagggaaacaagctaccccaaagaccttgagaaacttgaaatttggatttttggaattaacaatttcaaaggaaatttttaagacaggtgttggtagtctattaatgagatagactgttgttgggaaagaattaactcaatacttaagtggtagaagtgctatagcagaaaaaggactcaaaacttgattggaacctggagaatcttcactagattgtgaaaattttgttgagacagaaaagcaagttgatggagtggactgtgtagagtggaaagaagaattctcaagctgatacaaaccatctataagcttttccttcataaccactttctttgttgctaaatccttcacaagacaaaaataaaaagaaaaaatcaaaaccctatgtgggtggcgacatggtatggacatgaagtggcccatgtttttgattggaggctccttggtacaatttggggtaggcagatggtgtgcctaaaatttatgggcaaacaaaataaaccattcgatgacatagaaaaactcatgccatggcgcacctagaattttcggacaaaatgaatgcaatgccacggaattgcatcaccaatgccatggcctctgtatagcatccaaaatgcaaactttctgccaaacttttcaccaagagcgccttggcattgaatttctatgtcatggccctaatccaacttttttaattccttggttttaaagattcaagctttcccaaaacttcccaaagactccaattttggcatgccaacaacgaaaatacatttctttctctattttgcaaccatttttctctactcattcattttcttccttattcactaaacctaaaaatacaagcaaactaaatcataaaataaaactaaatgacataaaactaactaaaataacttaataacaagacccaaaaaaaacgtaaaataatatctaacagcttattatcatagctaagaagaacttcttgaagctcttgtcagctgattgattccctagcttcaagaatacatgttattggtcgatattccagaattaggcctcctagaacattagccaccaagcgatgttcaagataaggatatcctactaaggaaagcatgtctacccaagatctcttcaattgaaggtaattttctattgatgtgctccctttttgaataatttgaagattctctgtgctcatcaattccagcttttgagtgagctccaaacaa

SEQ ID NO: 71752 - DNA, 501 bp, Cannabis sativa
aaaaaaaagaaaagaaaaaaaacccctcgtgtagctataaatttagaaacgaaaaacttaattttttaatttagttaatgttaatttttattttcattcattacctacaatcttcgatctatttttttgccttatattgaaaaagtgatactcgatcgaaaacaacaaagcttagtgacaggcctgagggagcatagacaggttaggcatgtgctttggacccatctagctcaagccaaagaaaatttgttttaaaaatgtacatttttttacttattttgaagaatatcatattttttttctaagtaagtgctcaaaaataattttttttttttatgatctactaaatttgatgatcagttatgcttagcgatgatcaacaaccataatatataaaagtgttataataaaattaatgaatatacagtacgtactttaaactaattagtttgagttaaaaactgtaattttattaaaatgtctgtaacaccctaactatct

SEQ ID NO: 71753 - DNA, 950 bp, Cannabis sativa
gattagtatggtgtgctagcatatattaaataaaaagggtatatgggtctttgtgtggaagggtagtcttaaaggagaaaatatcaatcttctaaaaagaaaaggtatgcaatgtattgagtaatgttttctcttacattcaatatcaatcttctataattttcctactgtttggctaataatttgatactgttgctattgtagttgctactggttgactactgtgttattcattttcatgagcttttacttggttcttaccaaagatatactaatagaagtgattaaacaaatccaaaacagaaagcttaagaaaaaaatcctgacagccatccccaaaaatgaagaacaaatttcggccaaaacaaataaattaagagctgtattatttaagctaaaactaaaacccaccaagactatatgcttaaaacaaaaaaaaagaaaagaaaaagaatccacctccagccaaaggaagtttcaaacatcaacaacttactgcacagggaaatcgatacgaaaataaaaggaaattaaacagaacaataataaataacaaatagacagtccgagctaaacaacctgtcaagcaagaatctagatttcgcagtttacatcataacaataaaacgttaaagctgaaatattggaactaattcgctgagcaactaaaatccaatgcatctcacatttcctccattcatcagtaattgaacgcagtagagagagagagagaacttaccggagattgaaagatacggtacaggcaacaaagtagaagctaaggctttctaggttaattgattaaggattgcgattttcccctcccaaaaatgatctacaccaagttttggaactcgaactggaactgtaactctcgaaccagacagagtatgaaatcccaaaaataaaagaaagaaatttggaaccctaaatactaatttcaattcaaa

SEQ ID NO: 71754 - DNA, 1384 bp, Cannabis sativa
ggaaattttctaattggggatattttactagtcctacaattgagaatcgtattctaataatgtggaggaaaaactatgctcgagttattgtcattaaagaagatcctcaatatgtttattgttatgtcaaaatggcaggccaaagtagtgctatgagtataacctttgtctatgggtataatacagcagaggataggaagagtttatgggctgatcttatgggggtgcatcttcccgctaatccttggctcgttacaggagacttcaatgctcttttcgagttagatgataggaagggaggtaatttggtaactttgggagatattgaagatgctaccaactggcttgctagaagtcatcttgtgcttcctattaaaacaggttctaggttcacttggacgaataatcaagaagggaacaagcagatctactcgaagattgatcattcctttgtaaatgaagattgggtagacagttttccaatgacataagctcactatggctgggaagtagtttctgatcattgtgtgtgtgttatatcgatgagggtggatgagaatataggtaggaaacctttccactactttaatttctgggcagatcatccagagtttaagaaagttgtgatagaagattggactcggccagttcaagcagttgggatgaaaggtctttttttgaagctcatgcgactgaaacacaagctaaaaaagttcaataaggaggtcataggagatattggaaagacttatcaggaagctaaagataggtacatggacccaagttaacccgcatgatcagtttttgcaaaagaaagagaaagaggcggctgtcaacttcaatgagcatgagaaaatgtatcatagctttttgaggcaaagaagcaaggttgattggctttgtaagggggatgagaacaatgctttttttcatgccttcttgaaaaaaaggaaaatggagaacagcatagttgcttatgcaaatgagcaaggggaagtcattgacaagtaccctgaagtggtcaaccactttgttaatcactttcgtagctacatggggactagtgaaaggccaacaatgactcttaggctagactgtatgaatcagaggaattgtctcaatatagagcaacaaataagaatgataaagtcgttcacaagcaaggagataaagaaggctttcttcagcattcctgattcaaaatcgccaggcccgaatggttttggagctggaattttcaagaaaatgtggccagaattgggagaaggttttactaaagcagtggaaagcttcttccaaacaggaagtatgccaagggatcttcatgccacaatgctaacgcttatcccgaaggttgactccccctcaaaagctatagactaca

SEQ ID NO: 71755 - DNA, 1875 bp, Cannabis sativa
attgaagaacaagaaggttgtctttttctcactgattcttatatttcaactctgtaaagaccacttatattatattttactcaagtcaaatattccaaaaaaaaaaagaaaaaaaaagttctctacaagttgggacaaatgtttatagcaaataaaaacaaagtgattccaatcttcattaacatctacacatactttgtagctttataatagatttgttatagagtaaatatgattttgaattctctttttaaaagttacttgaatattttgtttgttaaataataaattagattttgtattatttaaaatagtaataaagagtacattaaattatttttttggcaaaataaaacttaatgatgagctgatctagaggtgttataaaaaaaattggttatgtttttttgttttttgcttctgttcgtgctaagaattgtctttaagttgattatatataaaaaaaaaaaaaattgtggaaaattaagcttagggtcttatttgtaccattttaaaaaatacaaagtttattttgtcatttaacaaaacagaaggttcagttagtaatttttacaaaacataaaatccaaaatattattaatccttttctataatgatgtttgaagttaaaatcaattatatcattatatatggacacagtagtacattaataatagaggagtactatcgtcaactttaattacaacttcttaattaatctttgtgctcgaaaacacatattagaatatttcttttaatttttttagcggtgttcgttatactcacaatatcatttttgtaaattttttaaaaatatcgaatagtttatagtgctaaaaatatgtttgaagttttctaaacatacgcggtaaattagaatatcatgaactttgttctactacggtaaactatttcaaattttttaaaaatatacaaagataatattataactataatgaatatcgctatgaaaaaaaattaaaaaaaaaaaattctaccatgataatttcaggcataaagattaactaagaggttgtaatataaaattgtaattaacactcctcttaataatattagaataattagtatttttattttttaaaagtgccaacattattatttatcaagaattttgttgtttctaagaaatttgtcatttttcaagtctttgtcgttttcgaggattattgtcgtttttaagatttttagtgttcaaaaagttcttttttcaagaaaattttccaaatttacacactagctctcttatatttatacatagttaagacaaagatcacttatattgtgttgtttactcaatatgtcaaaaagttctctaaatactaatcttgagtttgagtttagttaaacaaaaaaaaaaagcttgagtttgagtttgagacaaattttataccaaataaaacaaagttattccaagcctcattaatatcttcactttgtggctttataagatttcttatacaataatgatgtttcaaaaccaattctaactattattattattattctccaccattttggggcctagttatgagagttcctactttgtataacaagaatataatttcgatttgaagtattgttaaaaaataatatatttatttttttacttataagtagtagtaaaattaggagtaatattttattccaccctctaaaaagaagtatcgatgcacatgtactcttagtattcaggaaaatttattagtctaattttttttagagtaagactccctcaactatcaatttacttgcaaaaaaccatccaatctcatattttggtgggaaaaccctccaaagtactgtttcgtttacatttttaaggtgtcgtcaattcagcctcattaagtcctaatt

SEQ ID NO: 71756 - DNA, 1377 bp, Cannabis sativa
  modified_base (27)..(27): a, c, t, g, unknown or other
tgaataaaaaattaaaaaacaaaagtnttaccaaacggcaccttagtaagttaatatagttttactaatttacattatatctcaattagatatgctttttatatcattgaattattcacgataccttctaaattatatgcaatattttagtatcttgatgtgattatctctaatggtgctctatatttttttaccaaaatttaagttaaaatagctaaaaactaaagtagagagtcatttttattatttttgctttaactatacgttccccattttagttagcatttgattattttactaatattttataatttaaatttattaaatataaattaatttgatgaaataatgaaaaagttaatagtatttttaattaaaataatattaaaaaaattaacaaaaaaatagagaactctctatatttagagagctcactcttcatgctctattatatagaaatattttttttcatggttggaactaattttgttaaaactcattctttattttagataaaatatgcgtttaaagaacattgttgaaaaagctcgtttttaatatgtaccactttgaaaggtgaatcaatgaaggaaagtcttgttataaaaatttattaattagtataatgttatgaaatttagaaggattattataagtctccttatacatttgtgaaaaagatttcttctttcattatttttccttactatttttcttcatgaaacttttttctaactaaaatcctaattgcaaacaaggcttatatatattgatattttgaattttacgtacttacccactttttacaataaggtagatacccattacccaaccctacaagtaaatattatattattattagtgtgtaatttaatattgagttttatagtatgtcaatatcatacaaattaattgagtatacgagtattttttcttttaatgatcaagagtattatgttgaatttaataccaaagaaggttgtaataatgaagagtgatgcatttttgtaagaaacaaaaaatcttgataaggttataattaattgctcactgtttattgtggagacatttttttagagtgtatcataattagtaatatgccttagagtaattgggtttgttttaagaagatgtacgtattttcaaaaattagtaaaatattgtatattttttaaaagaaaaaaaataaagcccttaaactggatgagtcctaaggacggacttatgtactccgccttgacttatagccagctattcatactttggaacccattctcgagccaaaatggatgacaccagaactctaattcaaaccacaaggaaaagaataacccaatatcttaatttatttaattttggtttggatgcccaatatct

SEQ ID NO: 71757 - DNA, 1235 bp, Cannabis sativa
gcatgggactctatgggtaacttggtggagattccccgcaacaagtaatagtgatagttttccatctttttggtgaatgacaaaggaggcaaagatggggatgacatactatgttatgtgttagactataaaaacactatagaagccaattagtaatttgcaaaaggtgtgaaaacctttaaatatgtaattgtatagttaatattgaatatggaacaagataatataattttagttcatttggagaattgcactgtctcaaaaaatgtgtttcagagatttatcctgtctcaaaaagaacttattacctatcattaatactttcattgagagaaattacagtgagaaattcactataagaactctacgccatgaagaaaactaagcttgcaaagatgttgaaggagtcaacactatgatcatgcatgctttcgagcttatcatgctacttatttttgtaacatctttgactctaattagacatatattaaattttagaatgctcataattcttaaaaaagcaagatcattgataatgaagaacagacacaaaacaagatacatcatcactagaacttaatcatcaagaagataaaaaccacatataaaattaactagcttttcctatacattttacttattcgaaattgaaatataggacatgataaacacttaacaccaacgtacaaagctgcataagaatccatggtagcttgcttgatttgctcctcactcaaagtataggcaccccaatcacaaaatccaagcatacaatgcttattgcttagctctgttaatattgttccttcacccaattcaattggatcataattataagagttagtgtagccgttacatccatgaaccaataataacaagtcgtaaaactcatcacaagatcgattcttgaccgaggctcctagttggccaagatcaacaaaatatctacaactcaatccataatccctttgaagatcaaccatgtcttgttttattctcatacctaaaaaaataagactagagaagtctagaaaaatggctaggcaagttggaatggtagagaaatgagtgaggtgcacgattaggcattctttcccaatgcaaaattttataagagcaactttttgggtgatgtaaggagtagttgggcttgttctaaatgacttttctatgccaaaacctactagtgttgttcttggtgtggaacaattattagaattataagcagtattcat

SEQ ID NO: 71758 - DNA, 1983 bp, Cannabis sativa
actcactcatcatctccttgcgagttcagatctggggataataaattatggctcaaatttagggtgtctcgaacccaaccgtgttagcacataggctcgacgatgcgattctaagggttggggatctctgatttagggttgtcaaaccctttcatcgtgggtctcaaggctttggggttttaggttggggcttgtcgtgagtctttgagaggggtctgaagtccatggcaacgaagaagaagaagaagaagaatgagagaaacagatcgtgtttttttattaatggaaagaaaaaaaaaaggaaaagatcgtgctttaggaaaatgaaaaaaaaaataaagtagagcaaaaagaataaatgaagatagaaaagaaaaaaaaaaataattgatttatttaacttatatttatattttattcattttaaatgattttttataattttaaaaatgttttttatcattattttaataattgatattatgtgtactatactaaaaatttgtcacatgtatacttctgcagtcaatttgacacttaacaaaatcttttaatgaaaaattaaaaagcaaaacaaaatagtaatttagagaattgtaccactgaaatatcaatttgtatgattaagtgtgacaaaatgtttaattcaaataattttgcatctaacatcctatctaatatctatacgaaaacttaaaaaatttatatgcatgcaatacatgtgataaatattatatagttttagttcatatcatgactgatcaaattattatatatattaattacttaaatttaattaaggtaggattacttgttgatataaatatttaatagaatcatataataaatacaaaaaaattattaattaattggtcaatgacctattctttgagataacgatgatcttaaattttttgtgtaaatatttagacacgttttaaatttataatagttaaataacacatgatcatatagcatatattaattaattagaactaaactacatataaatgatatttaatttaataaatataaagtttatggttaaatgtcacaaaattagtgacatgcaaatttttattaaatattatttattaatattagaaatatatattatgaaagttaatccaacaatcaaaataagtgtgtatatggctagcaaaatactaacttaattgctataattttagggatatattaatttgctatttctatgaattttaaattgcattatttatttatgctaccctaaaaaaagacaagagaaaaataaaagtgacatgaatggaaatattttagtgggcattgacaaaattttgggactgtgacatatcacaaatattcaaaaagaatgtttcttttaagatcatccacaaatttttctcttaatatataataaaggatacttttcatatgcgggtccagtaatgcactttctatttattttagtatttaagagaattttttaattttttttttatagtggtctacttgtagttatttgaaatgtaaaattttaagatacgaaaaagtttaacacgttgaaaatatggtttaaatagtttgttacacatgagatttttttttttattttatatatgtgtgaaatagactgtttaaaccttatttttgacgtgttaaatttttattagaatctctaaaaattttacagttaaatttttattagaatctctaaaaaatttacaggatgccctaaataattacaacataaacgaccataaaaagagttggattaaaaattcttccaaataccaaaatttaagtggtgcatcagtggaccccctttcaaaggggtacattgttgaatttttctataataataataaaaaaatcacccaattatttaagggcgttttttagttttaaccaaaaaaagtaacaatattacaaaaatactttcagctggccaaatatacaaatatatagtctaaataaaaaaaaaatacacaaataccacttaca

SEQ ID NO: 71759 - DNA, 1059 bp, Cannabis sativa
  modified_base (513)..(539): a, c, t, g, unknown or other
ttgataaaaatcactttttttttttactatttgcatttttattttattttttaaaatgttatttagtatttttgtccctcaaattatgatgaacacattagtatgcttcttaattttttttgtttgttaaaaatagttcttgaactatttgcaatgttgtaaaatgacttaacataattatagttagtctgaatagtggttagactcttactaattatttgttagttatagttggttgttaggttaggtaaggtgattctttactctagtttaactggttcttgatttagttatgttaattaatttcagtagcattttgtatatataagttcttattttatctttgtaatttaattcagttcagttcagtatcacacttttattttatttcattctgcccttcctgtaatatggtatcagagtagaaaaagtgaaaatttcccttgatcttggttctacaggcttccatagatcgtgttcttcttcggtcttgttcttttttttttttttttnnnnnnnnnnnnnnnnnnnnnnnnnnnatttatctttatctctatgacgatctatctcctctcttctctccatctctattttccctccaagaaaaataatggcgatcaaggcaatcaaggcacccagaccatcaatggcccacttattcaaactacaacagagccacaaaatctgatcgttcaaggtttacaggtagctcactccaaaaatcctctcgatgatctcgtcaacccctattatccatggagataatctaagtaacattttggtctcacatcctttaaatgggcaagccaattatgtctcatggagtaaagttatgcaattaaccatttttatcaaaaataaattgggatttcttgatggtttgattcacaaacctccatccacaaattatgttctttataacatttggattagaaataacaacattgtggttttttggatcttaaattttatttttaaggaaacatcatctaaaatactaatcatttcatttggtttcatttagttgtgtataattcttgccttggttgtttgtagctt

SEQ ID NO: 71760 - DNA, 1227 bp, Cannabis sativa
taataattagaaaaataattattaaaaaaacacattataaccttataaaaaaaataataaaaaaaaaacttctcaaaaataaataaataaataaataaaagaaaaaacacattataatttaggcaaaaaaaagtctctaatggagtgtgaaacaaaggttgatctcggcgagcaaagcatatagaaagaaccgatcccatttcttcagatttctcccctaataattttcatgattagaagatgaattcagctacacccaaaaccctagaaccagagaatccaccttcttcttcttcttcttcttcttccggcggttggaattggaaggagcaggttttcatccctactctcctcgcaggtctcttctcttttctccttaatactatggaaaatgtttggaacaatacaattatttgtgaattgttacacaataatatttatgatgatgatggtgatatgggggcgcaggtgttgttggaggtggagttggattattatcgaagcatcgaaaaattcatggtctcgccaacatttctgctacttatgctactaatttcgctatcgtaactgcttgctattgcggtaatctcctccattcctttttgaactcagtctctcaacttttgactttttctgcttgctattgaggttttgagtgatgatttctactgagatggtcctttaaactctgcaattttaatggtttctttgatttgatagggacgcgtgaattggtaagagaaactcgtaaatcagaccgtgatgatctttttaactctgcaattgctggcgtttttagtggtgctatccttggccgtcttcagggttagacttcattccatttacatagatacatatttcactctcatttgtgctcttctgtttgcttaaatttaagattcacaaaaagttgagatgatttatgttcttacattggatataatttaatgtttttatacattgacaatccaagataaaatgttgatcatttagtaaaattgactaatttgcactattattatcttactctagaatagaatgtggatagtcaattgattagttattttctctagcaatatggtggacggttgctctgatataacctgagaacacagtgatattttactgtttgagttttgagataaagggtagtcgtaactttttaatgagacatggattacattaggagtcatcaacaggatttggttatcttgtttttcatgcttt

SEQ ID NO: 71761 - DNA, 753 bp, Cannabis sativa
aaaaaggaaacccaaatcccaattttaatgagaaacaaccatttgtcttcatcgtccctccttccaacagtaatggtcagtgcgataaaaatcacaacaaaactcagcaatgaaaattacgatcaagttcgactcctgcaaaaccctcttcttcccaaatggacaatgaccacggcttggagaccgctagagatggcgagtttggcggtagcgataacaacgaccaccaccatccgcatcaacaaatagaggagcataattaaactcccaatcagatgcatgggaagatcaaaacaagctgttgatgaaaatggtaattagaagcttttaatgactttgttatataaatataatcaaaatatttgggtttcattttaattaggtcgttgtttttgtttttatttgtgacattaattttggaattaaatgttgttgatgaaaatggtaattagaagctcttaatgactttgttatatacatatatgtgtatatatttcattaccgtatattggtattaaatattaatgattggattttttttcctattttgtataggccccagaaatatggatgagacaagacagtgataatgttcacaaatgcattgctcgacccaagaatcaaataagtatgtataatcaatgtataatcaagcacaagagaaactcattaaaacaattcaaactctaatgtttttggaatgtgaattcaattaagtgataggttctaaaacgaatggttatcttcttgttc

SEQ ID NO: 71762 - DNA, 1073 bp, Cannabis sativa
ttttaagaagccgatgtttcgcctggcggccggtacgagatcgagtcccagttttatggcctcaacttcggaaatctggctgaggcttctggtggacatgttggccgatgtttcatcggagctggtgatgctggacgacatgtcgtctcgtctggttaattagatagaaactttaatgagcgaaagagcaagagagaatattatataaatacgatacgaggaatggatgtaatggaaagtcgaaacccgaaacagtcactttaattattatgctgttaggtgtcccgattggtttaattattatttcaatcttcatttattaattattaaaacagtccaataatatctctgcctttctacaaaaataaaataaaatagaaaatgtcaagtaaaagattgtaatggacaaatgtgaattgttgaaatataataaatacacgaccaaataatgctctcccaatcttcttaagattttttcattgttataaaaaatgaaaatatatgtatatttttttagcgatgtgcattgatacaatttaacgagaatcgatttaattataatatttaattggatccgatcggatagtagatagggtgtctaaaaatctactacatccaaccttcaatcgaactaattagtattttcatttagtttggatgagtaattaaattttatattattatacgtcaaatctatatgtatatacgaaaattaacattaaaattttactttttttttcttagattggatagatccaattcaattcaagatatactggacttaaaatattggatggatttgatacgatctaaaaaatatgaggtctaaaatattgaataaacctaacatccaatggataaaactgatccaatccaacctccagtagatgttagatgatgactggaattaattggatccgatcggatagtaaaatctaacatccaatatatgattggattagatctgaataggtttaaaaatattaaatgtgatccaataaacactcttaatttactttatcattgttaggtagaataatttcgaaactgtatgattaatgaaataattgaat

SEQ ID NO: 71763 - DNA, 716 bp, Cannabis sativa
acttttaaacaagccacactcacatgacaattgaaaaacaagtattctttagtttctctatttgattcacatataacacagtcttcatcttgcaccatattgaatctaaataattgatcttttagcctcaaatggtcaataacagaaagccatagaatattcctgtgtttcaaaattgagagtctattccaaactcctccttgccatggttgcttttgaagaggagggcatagaggttcaataacgtctttgattcggtagcattgattggagtaattaacagtggtagccattgccttgaatttctcttttaccttcaccacttgtttctaataccagctacttgttgttgtcatcacataattcctccaacgtttttgatctacgttcatgacattaacccatttgacccataaagagtcttgttttgttgcaatttctcaaacatattttccaatccatgcttcattccattcttgaattcttctaaatcccaaaccccatattgattttggtctatttatttcatcccaagccacaagcccaggtccgtttgccttagctaaacctttctagagaaaacttttacagactgcattcactctctggaggactttctttgcattaatcatcagttgagcccaacaaaaatgtaaagacataagcactaaattgactaacattgctcatcatggatatgaaagattccttaagct

SEQ ID NO: 71764 - DNA, 1238 bp, Cannabis sativa
caaggtctttttaacatttgaattggtgaaatggaattaacaactaaatataacacaagagagtaataaaagacatggacatgtaacaagaacatcaagacaaatattagcatagaaatattttcatagtagcacacatactgagatacacatgtgataataataataataataaaacttgcaagaagcatcagaacatatagagcttcaaatttattttaaaaactaataaataaccatcattccttcctataaaatatttgatggagtttaacatattgttttaacacataaaacacagaggtggcctagtaagttgtagttctgctccactgaaacttcttgtgctccagctttatgaactcatcagcttctttgtccacattttcttcttgagcctgataaccggtgtcattaaaccgaaggcccgagaaattgcgctctgtcggcctaacatcctcataatcactcttgtactgcacatagtgataggttggaggaggaggagggctaactatgtacatctgaggttgaaattgaggttgaggttctactttgtatgtaacatattggtaatcctcattattttttgaggtattccaaccattgtgatgatgcttattatggtgatggttatggtggttggcacttgacattttctttctttctttgtgtttaatgtttgaagtttagaggtaatgatcatgagtttatataagcatatatattgagtgtagtaatagtatatggtcaaaacattgagcctaatttgtcgaaaaagtttctgattctcaaaagataggattgaaagtgaatctaatgctcttttctttttcaattttcatgtgaaatttaaagaatctatttatagtaaaaggaggagcattaagaacttctatgagtagtcggggcatgccctgagatgaaataagtcacaggcaaaataaaatttttgaacccttactataaagataaatagtatttttaaaaagtattatttttttatttgagtccctaaaataaatggatcctaagcacgggtctagcccgcttatgctcagggtcggccctgatagtagtgcttgagtatttgaattatatgccttaagctacttgaggaatatccaaaactagttggcataatcttttgtggacaaaaacaaaaaaaaaagtttcttgaaaagactaaaagagtagatgctttttgttctatatatataaagcatgtaagaaaacaa

SEQ ID NO: 71765 - DNA, 1536 bp, Cannabis sativa
gttatatttaacgttaaaatagaatagttaaatggccaagttatttttgatattaagatctaatttaaggtgtctaatgtaattatccctaaaaaataactaataagggctcacatatatagcaactctaagactaccaaagaaaaaatagtagcacaaagagtaaattagacatgtttcaattatatcaattaccctaattaacttttttaatttaaggttatttattatgtgaaacaaataagaaactcataagtagttattttattttaaaattaactcttatatatacaaagcaaataagaaatttattagtaacttttcatttcaaaaataacaactaaataaaaaatgaataacttttcattttaaaaatagcaaccaaataagaaactaactaatgagtaactttttattcgaaatttaactcaaatgccatttgatacgatagattataaaaagtaatacaattggagtataaattaaagaaataccactactattttagcgtatcaaatttaagatctcaggtattattaaatctaaatgtatatcaaactcaatacatgattaaagtagtatttgattggaggtaataaaaagaaaatggaaaagaaacaattttttttctattcatttgtttcattacatattaaagtattaaaatgtcattctaatagaatagtctttattctactattttgataaaatgactattttattttgaaatggaagaaaagactattacaatatgcatgaagaaaaaaaaaataataatttttttatcaaatttttttattcatttttaattttattccattctatttttgttcttattcttaatcttatttctattattgtatttttattcctcccaaacgctatttaaataaaaaatattaagaaattacatttataataattaaagagataaaatattattcttctagaaaacaaaaaaaaaacagtatattctaagtcccacatgtgcacctaaataaatgatatggttgttgtttcaatattaaaaaaatggtactatttttttttcaaccgaagaaatattccatacaaaaaatcaaaaataaagacaatacagataactgtcacgaaaaatagtatcatattaatgatcaatattatacaataattaacaaaattgatattaatttaaacaaaagtaaaattataataaaaaataaataaaaagtataaatatttatagaaatacataaataattgaaatatctcctatattaaagccgtgcacacgacgccacgtttacatattatttgcatatgatttatagtacttggttgttgtgttaatatttctaatttatattatattgaacaataataaaaatttcaaacgaaatattgtgtgctaagatttttttaaatattttatattatctgtttgagtactttttcttcttaaaacttttatgattatttttttgggataagttgaaaactactttttttttttattacacattaattaaatataactttaaaataattttaattgat

SEQ ID NO: 71766 - DNA, 1287 bp, Cannabis sativa
tatctcattttgtactaagtcttctctatcctttagtagttgttgtttttcttatgtcagtaaatcttgtaattttgccgcatgtggctagatgggcttttacccatcagacttttgggtttctcccggttgcttccgtcccgaaaatcctattttgtaatgaccgagaggtccaactctttaggaatctatgttataaacactttctatcaaaaaaaaaaaaaagactagattaagtgagataaataaactatcgtatgcaattatatatgcaattactcatggccatattgtaaaaacaagctcgtacaataccttttctatatctttcgttgcatcctctgccaatattcttgaaaatttaattgaagagcttctttgacgattttttcttcttccattaccaaatttattacaatgtacttcccaaatatgataacctagctaaaattattaatttatagggatccactgtgggctgagctgaggtgagctaagccatcgcaatattaaatctacaacaagtacgtacaaaaaatgaagacgttaatgtaatttaatgctaactggaaagggcatttttgtcccacaaatttgactatctctccttttttggctcctaaagaaaaaataaacactgaaaagtaaacagacgcgccagcagtgcgcgtgaataaaatttgtttgacaaaagatagagtagcaaatatcttaccgtgggaaaagtggttttatatgaaggtgaagaagtagtagaaaataccaccctaaaaatttaaaaaaagcatcaataattttttctttttcattcattactttttgttttaattttcttgaatactgtgtgtagattggcgaataatcctaaggttataaaccaaagagtggtagatagagatatagagagaatccaaccaaattaaatatcagaaatcatatcaccacaaccatcaaacacgtatataaatatatacatttttttctctctctattaccactattccattcctttctctttctttctttctagggtttcaaccagtagtgaattgtgtttataagagtgtacccaattgtgttgtgttttcacaaatttggggacagtttggtactgaccccagaaagagaaggctgtgtaggtatacccaaaaacaaaacaagaaaaataatttaagatttatcagatcggatttgagtttttttatatatatatataaaaaaaaaaaggaaaaaagaaaacaagtaatatattattggttttttagataaaataaaagtaattaaaat

SEQ ID NO: 71767 - DNA, 2009 bp, Cannabis sativa
  modified_base (1932)..(1948): a, c, t, g, unknown or other
caaagagtgatctgaggctgagtgttgaaatcctacttcaatcaaaattgtaaaaaacttttcgaaccattacctagaggcttgcttaaggccatagagagatttcttgagcttacaaacagcattaggtggcaactcccccttaggactataccctggaggtagagtcataaacacatcctcatgtaggtcactaggaaggactgcattattgagatcaagttggtgaagaaccaatccttgaatggctaccaaggcaaggatgagtttgacagaaactagcttgataacaggggcaaatgtctcattagaatcaactccctcttgttgattagaatagacatggtttggtctggtatttgattctctctctctttttttttttttatgttcaacagtgttttggctgcaaggattcttgggcttgattgtggaatatcgccagtgcttggtcacatgtctgccggcgattcctcgcttcttacatctcggtaatgactttctctaacaccaaatttcttatatagtaaaaaaaaattaaggtgaaccatctaaaaaataaatcattgtagaattgaaaaatgataaaataggaagaatagtttgttgagagaatacccaagaagattcattgatcgttctctttttcttttgcattctttgttcaatgtaagctgaaggtctttctttctttttcttttatttttggtgactcaatcctttttctcacttgggcagtatactgttgttccttctcttgggaacctaaaattcttctcgatgttccgtatgaagattgtgttttgttgggatggaatatgtaggcctctttcatatttaggttgcctggaactctaacaaatttaagagtccagcaagtgcttttataacttttttcatgtaagtatatattcatttctttaatcttctattttgttaaatcttataatattttaggatcagttttcaatccacaaatttagtatgacaaagattgtattttatacaaaattaactaggattaaagatattattattttatgatcaagatatgaagatttttattagttctttctcaatggcaaatctttccaaatgctatttaattcgaattctttttattaattatttatattatcatttgtagttgacaatgtaaatgtggtaagataccaatggagaaccacatacttggttacttgagcaataatcgtgaaaaaaaaatcaatggaatcttaaaggaattaaagaaaaaaatgcgagctaggattgccttcaataaagcatggtaaagagcgtgcaacatcaaaacatgcaataattgaactctcaagtaactactttaaatgaaacttaaaattctattgttgttgtagtaatatgttattgatagtttcaagtccagtagttgaaaaggccaaccatttccaccatattagatgaaaatgatcttcttaggggatagtttgttgcaggtccaatgatatttaccataaaacaacttatatcttttatttattgtatatggaatcaatcttaattttttaatattataatattgttatataatgaaaattttcttattaaaaaaatattaatagtttttaaattttgatatttgtagtctgtttgtttgttgatttatttttgaatttgatttaaaatttaaagtaaggatatcttatctaaaataattctttatttatttattattgaatgattctcattttaatctaaattaaaagatttggatttcttataattaataaaatttagtttataagaaaataaatacatttaatatatttagtaagtcaaaaaaacatgattacagtaataaagaatcaaaggtagtaaggttgtaatatatgttataaaactttagaaatgttttcttaataactttcttgaatttattattattattattannnnnnnnnnnnnnnnnattattattattattatttttcataccttatattaatttattttagaatattatttattta

SEQ ID NO: 71768 - DNA, 1890 bp, Cannabis sativa
  modified_base (50)..(53): a, c, t, g, unknown or other
atattacagtaagtttatcatactgattcaagttcaatatcggtcccttnnnntgcatactccatacatccaacacaagcttactttaactaatgccatagaaaagacatagcatttatccaaggtacaagtaaactacattgtagattatcctatcagttaaatcctgtgtactgataaatcattggaatacatttaatcacacaatcttgattattttccactgtgttgacaatacaataaacaagaatataattgtgataaggatttggatgaatttataaatcaaatatacaaataaatgatcacatgaaccaaataacacactaaataagtaatgcaaataaatatattcctttattgataattgaatagaaaagattacattaaaatagagttttatttagggcacaaagcccaacaattctttctctagcggaaccaattactttttcatgtacaacgaacaaatttctaatttcaaatcatagtccaatggtcatcctccaactcttctataaaatctcgcacattttctataaggttgtattagtttaacccatcaacgttgaacttctttcgcttttataaacccaattaaaaccctcaacacccccaaacactatcatacaatataactagaaacacagtccatcctgcaatttcatacaaaaaaaagttagttaagaaataaccaacaaaaatattaaaaacactcaaaataaaaaaaatacatttcatcgagaaaatattgataaattattgataaccatcgtgaagtatacaaaacaacattttccaagtgaacattgagaaattatcaacaaaatatcgagaaacaatcgtgatggagacaaaataacaaatttctaacaactatagacaaagcatcgataaacacttgtgatggataaaaaataacaattttcaagataccatatgtatcgaaaacctattgatataatattgataataaaacgaaaagtgtaaaaaaacaaatattcagacaaccttaaaaattatcgagaaatcatctcaaatcaatcgaaaaattgtctattaaattcatctctaactttagtacgattatcatcgataaaacattaacgtattatcaacataccatcaaaatatcataaaaaactcggatctcaccgaaaaaaccagatctctcaattccaaagaaaaaaaatgacaaagcaaccctaatgcaaacaacaaccacacagatctattagtagaaataaactacatacttttctaaatatttttttaaaaaaaataaaaaacatttacccattatggaagagaatgtggacatttgatttggggtgtggtggacgagcaacgggctggctgtcatggtaactctgacatggtttgtcacgtttctttgataaatttagaaaaattaaggaggggtaattttgatataagggtgttaatattaacattaatttgcataaggtaataagaggatatttatttgatattagggtgtctttttatgcataattaatgaaaattttcttttggtttttgttcttacatgcatcgaaaagtaacacaacaaattccaataatcgtgcatatatatgtaaaacttaattaaagttaagagataattgtggcaaaagtcttcaaaaacttaaggttaatgcaggttagtcctcaacctcgaaaattgatagtaatagtccctaaggtcgcaatatttgttagtccgttagttcctttttctaacggatcccttttctaattcaaaatgccatgtgtcgataaataattggtttaaattataattttaattcaaaataatttaaaattaaaaaaaaaaaactaaataaattattttaaaatcataaattattattattattctttttttcg

SEQ ID NO: 71769 - DNA, 707 bp, Cannabis sativa
tattagattattaccttattaattttttttaattcccatcaatgggtattactcattaagaagtgttccatacatatcaatatatcaatatatatcaatataaaaataagatataaaattgtgatgtgtcagtctaaaataacttaaaatacttcaattctttactttgttttcttttatttttttaatactatcagcacttaacaaaagtggatttacagttctactatggtgtatatattctttatctatatcgtgttttcttatttttaatttaattaataattaatgatgatttattttacaaaattattaataattttttttgacaaatacattaaaatattaataatacattacaattttttattatttttgtatgtgtgtgattgtgagtactattttcatttaaaacttttatgattattattatatactagtggagaaaacaattatgcacgtgacttatataattaaaacataataaattatttaaaattaatttgattataatatatttttaaaaaataatttataacatatgactcatcttatatgtatatatatatataaaaaaacacttttttattattctaaaataaaaaaagaaaacttaaatttttgtaaaaataatattaaactaaactcaattatttttctatatatatatatatatatttttgtaaaacaatacctcataataatta

SEQ ID NO: 71770 - DNA, 980 bp, Cannabis sativa
  modified_base (633)..(644): a, c, t, g, unknown or other
ttcagatcttgataatgctctcctacagaaaggaatcaagggctacagatcttgaacgaaaggagtcatattattccactgcaatcaatgtaaggactatgaattgtaattttgaacataatcgtgaagaaacctaaccgcggttaggttgaatttcaaatgtagaatataatcgtgattgtcttcatcgtgtaacggtaatgcttagttcacagtttattctaagaatgccaaaatttgattatatcttatcttattttatggatatcttatcttttcaattgtaagaaaagataaattgaagaagaataatatatattaaacatacatcaaatttgaaatttgaaattaggttcataaaatagaagattagggtttgaatttagggttcttttttaaaaaccctatttcagacttagatattgacttagaataataagatttagtattgtgattggaatcgaaaaaaattcagtgttaaaattttattatttttgtgttgatttaataccaaatttatttaacattggagataccctgaaacaacaaataataacttaacactagaaacttaaattaagtatttttctgtctaaatatctatgttatataaatatttaagatatgatttannnnnnnnnnnnaaggaaaaaatgatatatatagaaaaaatatcatgatagaacactagtaattatggatattaaacacttgagagaactaagcattaccgttacacccttttaacaaacctattatttccagtgaccaatggtatatattaaacatacatactattactgaaatggataagaaaattgggatatgaatcgagattgattagtctttatattgattaaatatagaatttataacataaatccatttctttatttaatttacaaataaaattaacaaacctataatactacaaaacaagtctttatattgataactaatcagattgtaaagagttttat

SEQ ID NO: 71771 - DNA, 981 bp, Cannabis sativa
atcatatataatttgatactaattactatttacaataattctttatgatatccaaataataaaaaaaaaaaattgagtactaattttcaaatttaaatacttgtgttacttgctataaaaaaaaattattagtatctaaatataattttattattgaattttaataaaacataataaaaataaaaatataattaatattaataattatttaatgacatctaaaaaaagtattcgtattgcatcccgtcaggttcttgggaaaagtaccagcacagagcacctcgatcatcctgtatatactttcgggtctgaagtggtttgttggtccttaccctctaaattttgaatcaaccattatcatattcaatctccaagtggatcaacttggttctactgtgggtccctttccttttacagggtcacgagatagcctggaattagtagaccaatgagaggtagctctcagtggtaatcaagtttccttacgattcatattgctctgagtagggtccttattggctcggtccaccgagggtttgcttccccattaatgggtccctcacttctggtttgaggcttgtcagactcttgatgggggttagcttccctaattaggggtccttcacttttgatttgaggcattttgggctcttaccaaggatttgcttctagggacattagtgtcagttgcttgaggagcattggcagtgctactgggactagtagctgtagcattttgtgcatttagggtttcaccccaaacgttggtgcctatgtggccagttggcggacgaggcacccttcctctagtggatgacattttccctagttgtgtcatgttatcaacttgatattcatcgcgtatcgattgagccatattggctctcctctgcctctaggcaacttgctgagcctcaacgctagtccattgctcttggaactagcattgtgttgggtttggtgccctaaataaaacccatt

SEQ ID NO: 71772 - DNA, 1602 bp, Cannabis sativa
gaaaactaatcatgctaattgggtcctttttgaccaaacacctcttttgctttcatttgaggagctaatggagccattcgactcctttggtgccattcggctccccttagtgccattcagctcctttggtgaggaatagaagcattcaactcatttgttggagccaatcggctcccttatttttttgtgtaccaaagaagtcctttgaaaagtttgagcacacacatttttatatatcaagaacaccaataaaactattgcttttaatttttcaaaggaaaactttgatatatccaaaatatttactaaaaaataaaatatttctcttaataatatttatttagcttagtttatttaaattagatttgctccaatttaatttaacaaaattagattttttcaatttgatttaatcaaatttagtttgtatctattttttttgcaattaaattagtttttatccaatttattttaattaaatagcctaaatactttatcaagtgagtttaatttattatttttttatttatttttgggttacctcattccatgtcggtatactcacttcccctccttgtatttgtagatgtatgctcgtgaccactggggatgtgacaaccgcattgacgacgatcctctaactctcgtttggccttggtgttggctttgagtaatatatttggtcgtgcgggtcaaaattgtttaagcatcatgcttgggcacaacttcctttcatcttgaactatgtaccttcagtatggagttaaaacatagagttgagactcgtgactttccttgttatataggctgagttacatatttcatcccatcagatatcgagttgtgttgcttctcttactcaaacttggcacctgactagagttagaatctcttactcaagtttgatacttgagtagatttaaaacctcttgctccattttgatgtatgagcaaagttatatttcttactctttttttatgcgctaatagagttatatcccttactcttattaatgtgcaagcggagttttgtctcttgctcgaggttgtgttttaattttcttggttatattatcccaaatactttatacacactatttttctaagtttctttagttaaatagctgatatggtgagttttctctttgagctcccttgagtaacatgtttcactcactagttattttttagagttaatactcattttccagattgagtgcttatcatgtgactataattaaatccattctttatctattctaatttttagtttaagtgtttgtgtatttaaaaaattcacccacttttccaaaaatcgttattaatggtagttataggattttttaattcaagtatagttatatgggtaaatagtggcataagtacccaaaattttaggtttgtaagcgacataaaccaatgattttttttagtggcataagtacccaatgtttataaaactgtaattttcttcccgtttcatcagcacagattcagttattgtcttaaacagaacacatataagacccaagttttagattatttggtctggacgaaaaatatgtagtatcagttacttttaaatatttttaaaataaattt

SEQ ID NO: 71773 - DNA, 1583 bp, Cannabis sativa
aaccgactccatatggtccttacaccgttggttatttttaaccgctgtagtgtcacttggaataacatccgtagcgaattttgccaaaactgatgctgaaaggccttaaaaaccgcctccaaaaaccaattttgtagtagttgaattgtactcaagctatcttatgttttttttaaaaaattctatatctatatgtaattatgatgttatgtaaattaagttggcattttgtatcataagattataatttttttttatattttgtgctacttttagattataaaatgcataagtaataatatatacataacgttaatttcaaagtttttatttatttaagtatttcttttttacaattttattgcacaaaataaaaataaaattttctctccttctcaatattattaatatatattttttttgatgggatatttgtataacaattcttacttaattaattattatatttttcttatagcttttttaacaaatatattgccttaaatatagttataaactaattagaaaaaaaaaatatcaacacaatagataatcttgctttcatatttgctttgtgtaatttttttttttaaattagtagtaaaaatagggggaattatcttatatattttttttctttttcaaatttacggtttggattgctctagtagtttttatgtcggttgctatatgtggattttggttgctatttaagttgtttcgttggtttctatgcgggttgttatatgtagattataatacaaaaagaaaactatattgaagtgtaaaaatgaaaaattcccttaatataattcagttaattaaaatatatgattaatatatatttaaagtccaaaaaaaaataataataaatacctttaacttattaaatgttgtgtatttattattttttttttcttcatattaaggacacagaacatagattttcttactatgctttatcaatatatatatatataaattattggtattcttttttattttttaaaaaagaagtctatattttttataatctataataaaaaaaaaagcatatatttatactttgtagctctattattttattattacataatttatagtaagttaaacactaatggtcatttattataaattacattttaaatgaaattaaaaaaaattacattaaaataataataatgaattaaacaaattatgaaactggggttgaatcacgcgaagcacagtttagttgtctaattttgggtatgagcaaaagtaaaaagtttgccgaggagaattgttaatttaatttaagtcatgaaatcaacatgtctattactaaataaatactaataattaaataaagttagtatatcaaattaatgaaattggaagacgaaaagctacactatctacaacactttatagtgttgactgaacaatgaaattgtactcgaaccacatatttaacaaaagattaaaggtcttataagaaacaccaaaaaagacaaaaaaaaaaaaaaattaataataagccactgaaaaagaaaaggacagataattgaaacctagatatgtccctttaaaccttcattaat

SEQ ID NO: 71774 - DNA, 873 bp, Cannabis sativa
tttcacttttattctaagtgtattttgttggtttgttgttttgtttgttaattatattgtcaagaaccttactaatggtattggtagctttcgtgatggtataaatgtagacaaataggatattggttcctattgttaagtatattttggtggatcattgcttattttccaacaatgaagcttttaatcatatagttgattttgtgtttgtttttctttcaataattgtagttgatttgtcattttactattcagaatttcgccattcaaaaagggagttttgtttgctctacactctccttggatgctaaattgatgcttcctattagattttagtagaagttcttgtataggtttttttttctttaaaacttgttcgagtttgttaccgatatgactcattttgagtttgttagcccattgaaaagttcaattaaatttttttttttataaaaatactggattttgaataaaagtttataattttactctcacatggaatttttttacaaaaatattgtctttttataaaacaaccgtaaaacaacaaaagagaactattaaaaacaatagtagaacaactaaaaaataagtgtagaacaacagtgaaaacttaacacagtatacagcatgaaacttacactgtatttttgaaaaaaaatccgtcccatagtaaaaaaaaagttaaaaaattttaatatgtggtgtaaaaatctctaaaaaaatcctaaaaagcattaaagaaaaatatattgtgccttttatttttttggaccctgttcagtagcccaacttgcacacgaaaagggttggccctggatctggtcaataaggaaggatccatatgaacttcaatggattagcccaacctgc

SEQ ID NO: 71775 - DNA, 1200 bp, Cannabis sativa
aatatttagtaaatcgtaatctgaaaaaatttaaaatatcaaccaattaattgtgtttaaattagattcatttatcttaaattaattcgttgattctattcttaaactagaaaatattctaatatcaataagttttatacatgggaaacaaattttaaaggattgaacttagttgtagtctatggcttaaaaatttagcttgaagaaaccatcaacataagttaatttaactaacagataaccatgagaataacaattatatattgtaatacatgtagaaaattaaaagcaattcatgcaacaatttcttttaaaactgacttctatattcactatttcatgggaacaaatctgcttcaactaatgttgctttagggactactgacaaatctttttggaaatttctaccttggttttggggtttggtcggggtttgaggtccagggtacaagtattagagccaaagttcgagtctagtgttcgggtcagggtccaagtttaggttttatgttggggtataggttgggggtcaaggtccaagtttaggtcaggagctataacgtccccacatcaagcctccattaggcatcttcccacagactaatggttcttatacacgattactctagattacccatcccaagattactccagatcaagtacgcttaactttggagttctcatgtgatgggtcatcagaaaataagatgcaccttattgataattgatataggtactcatcaatccgtttaaactttaaaccttcttcaactatgtagtcttatacctacatagtatcaaaatcatcacacttgaccttccccgaggaatgtgggattgcacaacttagccagtatttcccttacagattacaggataactgactgtcataatcatccccacccttaagggtaccgacgtccttgtcgaccacaaatctggctgggtcaaggatgtgataccatttgtaacatccccgcttcaattttccattgggaatcttcccacggactaatggctcttatacaagagtatgtcactctgcttcctggactgacagctggtcttgcaaactaacacgagtgtttgaagcatgctttgtcctcactcgcatgctttttagaaaatctttccaggaggtcaccaatcctaagattactctaggtgaagcatgcttaactttgaagttcttatgtgatg

SEQ ID NO: 71776 - DNA, 756 bp, Cannabis sativa
tgttagacactactatacatttaaatatacttttttaactagataataaaagtagatcaagcattctttctttttttataacaaaagaccgagtattaaaaataagaaaatttacatattgccataaagatttataatttttgtataaaataataatgcatgcatgcatatttgtagagttaagggtatacattttcataacaaaatacatgcatttacagattttaaatttatatactattgttacaattaataattatatggtctgctgaaatattggagatcgagctttgattttgcggaggaaattgagagacactgttttttccttgttataagtatcggtgattaattgagagatgataatattgccacaacgtaaattgaggactttaattttgcctaacttcaggtgcaagaatagtcatgctaccaagttcactgaatgtatgtacctggttcattttttgttttcatatctagaagacaaaaaaaaaaaaataataataataaaaaaaaattattattatttataattgttttaagttttggtatatgtgtgaaccaaatataaataacatataaactttactgaaaaaaacaaaagcaaaaaggaacacttatatataaaatcaaaatccaatcttaggaagtatcatgtatatttcaacacgtgtaactattatactaatcttagaagtttaattagaacaaaacacttcctaaattggcaaaacatacatccgaaaaatttct

SEQ ID NO: 71777 - DNA, 1961 bp, Cannabis sativa
ttgaatgacagcaacagcacaatccttgttatactttttctccttcataggacatctaatttggaaatctgtcacatagtcccaccagacccaaggctttttggtttcatttgccactttaaaaacacagagctgcctcaggttttccaaaaccacatctttcccttcataaccagagctgaaatcctgctcaggatcaggggcacagtatcttccatgattaatacactgggacttgcactgtttgctcaaggtgaatgcctcaggacagtaccaagttatgtaatgaggcgtgaattgagtataaccacctttctcaagaatttgagctgcacccttaaaatctttcacaaattccatcagcatgtcacacttaactccgcattcatcattgctgttggtccatagttcatattccactcgatcatctggatgtgggacagcttctctccaatcaagattcacgttgaccatgtccccagaacggattgatttctttaatacttcaccaaagtttttatcaatgagtgcagatgggatggtgatgttctcaatgtacttggcagttgaaccatcttcttcaggagaatccattgtaattagtggttcctccatgtcatcagctaccagaactgcagaagctccagccttctgggcattccagaccttcaaagcaaaaaaacaatctggaaagaaatgcaaagagtggtgagaacagtttttcatgagcagtgtccaataactatccaatcattcattcccagatcatgaagaagaagaatagtaataataacttcctttctttcacagcaaaccaatatatataaaaaaaggtaactctgagatcatatcaaccataatctcatgcattgaaagatcttttctaaggaaaaggtattgacaaataaaagacaaatgaccaactgaaaccacaacctaaaattaaagaaacagccatgagagacactgaaagcaagcaaaccaaaacagtgaaaggaaataaaaaggtaggaatgacccaatccggatcatgaagatgcaatctaccaatgaagcaaatatgaactctaacagctgtagttaaaacccaagttaatcaattagtggagagagagagggggcagtagaaacatcacaacataaaatggatagatgaaatttgattaccaaaagtataatgcaataacaaacttaaataccaaaaatgaaagtaacactaacataatatttaaggagtcatctttacttgatccgaaatgataaaaatattgttaaaaataaaagcatttcagtgaagaaagtgacagaaaataagtcaatgtaactaaagtaacacaaagaacttaaagaaaactgcaagtataattcaaagagtatatgtcactactaaagagcaccggtcttctatcaaagccaaacaatacaaactcactgtagcttcaaaaaggagtgccgagcaagcactaagacccaaattatgaaacagctatcttcttcatcaaccaaaaagcaaccggtaaacatttcgagtttacatgtatagttttatgaagcaacaagtgcacggataatcatcaaatcaaatttggataaagcataactatcgggtcaattaaaatgaagaaactaaatccaatctttgatcaaaagtagaagaagggaatccatatgtgttagatgataaaactggaaacgactcaagaacctcacaaaatcaattggaaacctaagcgaacatattttcttgattgacaaaaatcaacaaaagcatatatcatcagtaatagataaaccaaaccatgcaacagcaatcaaattaactacttgaaatcgaaattaattcttacaataatggaattggaagctatcaatacaaattaattcatcataaaaacagtaagtccaaaaaacgatctaaacgaactaggcgaactccaaaaccctcaaaatcaagcaaatta

SEQ ID NO: 71778 - DNA, 2692 bp, Cannabis sativa
tctgtttctttattgatgttgaataaaatgggttatattgaaatgaagttttatttagcgcataaaacccaacaatatcccctgagtgttcaagctaaagaaaggggatgacttctgcagatttactctttgacccaaggcatcttcgaaactctgaagtaggagcattaattgagcagcttcatcttcggtaacttgacagtaccaataactatcatctgcaaaaagcaaatgggaaacaataggtgcataattccacaatttttattcctctttttctaaaaaaaaaaaactgttcaatgtaaatgaagaatcaaatcacaagacccgcaaataaaagtatatttttttttagaaaggacagacatttaaatctctcatctatttatctatattttctctacttttcataattttttttcctattcagcaaatacctcaaagtgaacattagcatatgctgtgctattgtcatatattcataatttaattttaggatttttttgataacaattaacaaattaaattattaggatttttttctttcgcaaaaattaatggtattttctttaattaaaaagtcaaactgggaatgtaaatattataatatattttttaggattttttaaagggaaattatcccttatgttattttttaatttttttttaaatttaaggtttggatttctatgtggttgatatatggattttgcaattgctaataagaatttttatgtgaaattctttaaaaaattaaaaaataaaaatatattttgaagtgtaaaaataataataaaaaaaataaatcattttttaaataacaattcaaaattttataaggcaaattatttaacaaatggtatttgatataggtaggacttatcagttatctttcatatgaatgactatacatggtatattgccatatccattattatgtgaaaaaatattggttgtggcagatcgtggagcagtatcctagttaattagtttgcatatatagttaataccgttgaatgaaatagcatgtttatctgccctgccttctacagaaaatattatttctaaaaaaaatccatttgccaaacctcttttttctttgttttcgtatatatatggaaaacaaaaccctcgctggggactacaaattgaaacagcactccctcttcaaacttttcacacctaataataagcgtttcaaactcattatatcgatggagtccagggtgattgggggaaccactagtgggtctaaccctagggctgggttagtggttcctaccgcttcgggccatgcccagcaaacaatgttgaatccatgtgctgaggagtgggatcctcaaacgaaccgagcaccggaggaggaacgctgcttgtaccttacattctccagtggataccctctctctccctaccatatcaaatccttcttcaaccggtatactatcacaaatctttcatctctctctctcttaatatatataaatgtatatatatatatatatgcagcaactaaaaactatagttctaagaaacaaggatatcacaagtactaattaaatctataatcaccacttcattggtgatatcaccgttacacgaataattctagcagtataggagcatatatattataaagttaaggtaaaattacaaagtttaatatttttatgggcagatttaacttaccgaatccctaattatggatattaatgtcccacggagaatcaattaataatattaatttttaaaagaaatctgttagcggatactttcaatttcgcgataatataacaaacttagaaaatacactttttagataaaataaataatgaattaaaaaaaatgagctatgtaactatatttattcttaataaaatatggctatataattaatatatatttggctatattattattttttaaaatatatatttgaacataatatataaaatttgtattttgaaataataatttctcttatcaaactcaaattttgtcaaaaaaatttataatataatccttatctagagatatcaatataaaatatgtgtaaatataacaatgaaatttattattttattgtatatctaaaatacgtatatataatcacatctaaaactatacatcaatatagccgcaataattaaaaaaaaattctcaaaagattaaaatttcaaaccatattttaaaaattaaaaaataaaaatacattatctaattaaaataattaaatatacatttgtgtatataatcttatctaaaaagtacacatcaatgtagtcgcaataattaaaaaaaattctcaaaaatcaaagtctcaaaacctattttaaaaattaaaaaacattattaattaaaaaaattaaatatacacttaacattatttaattaaacctaataaaaacatcaactaataaaaacataatatccaatacaatatggataagaaagctccctaatctttcactatttttttaataatattctaatcaaaactatttctatttttgcattgttttattgaattaatttatttaacaaatttaaattataaaattattattaatataatcaatctaaaattaaaacgtgctcttggagagctgcaacgaattattgcctctattaatatcacccttattaaaattatttttttgctgtataaattgggttggacttatttgtgaaa

SEQ ID NO: 71779 - DNA, 1420 bp, Cannabis sativa
attggtgcccaaataccaccacaaaatagtatcttgtagatagtaatattcataacaaaacaagtgaggtctgatattatgcgctgatactattctcatgagagattaaagaaacattaattttttctttttaagaacgaaacaaaagttagtttccattacaagttaaagctaataataaaaaaaaaaaccagcaaactagtgttacaactacaagagaagtgttataataataataattataatgtacaaagttacatcaattttgcaagttttgaatccaatccaatgtaggtagttcctgtggagtaatgtaaaacctctataaattaataacatcgaaaccggacaaaaatataatttaatcgaacgttaatttaaactatttctccccaagtcggaatcgaaccatgtataatttaatcgagtgttaatttataccatttcgcctaagtaatttaatcgaattgttaagtgaataaatgcacacataccatttagctccggttatgcatctcatcatgttaagtcagatcaatattgaaatttgtttttgaacctaaaaccagcaaataaatggatatcaaaaagcaaaaaaaaaaaatgtaattcttctacgccgcagcctaattctgatcgctagatcgggaatgttatggtttggaatgaaaaggaaatctattaaggacttatgtatgtaccttttagtcattatattctacaacaattcaatcttctgttgacgggtctaatttgttctggtgcaatgttcgccgtaaggaccggtatactggaggacccgaagcttcccttcctgcgttttacagaacaaaataaaaatatttgtaatttagtcagttttctctatataatattttgagtcaaatttcggaacaagtgaatgaaattttctttgacaatgtcaaccagaccttggttccgtagactagaccacctccggcaaaaggatgaaagcaagcaacgttaacctcgtcctcggcactaggaagtactctcactagttccatgtctgaaactctgtaaacctaaaatgatagaaaagagtagcagaaagaatgacagttagcatgtcaagtaaagagttatcattaaatagtaataataataataaattaatatgatttgcagcaagttttgagtttgtaacagacataaacttaataatttttcttagtaacataaacaacaaatgttagtaaatagtaatttttatctagtttcgttattagactctattattgtcttaaacggagcacatataaagctcaattccaaatcattagattcggaggaaacatgtcgtatcagttattttcgaatcttctttcaacagagtaattacaaatttaagacactagtagagtctatactggtggaagtaaacaaaaattacaatttt

SEQ ID NO: 71780 - DNA, 690 bp, Cannabis sativa
gtatttttataattttttttattacttttgtgtatttgtgaaattatcccttctatatatgacacattaattacataccattccttttatttccttttaaaattagtatatatatatataaattaaatcattactaatgttatattatattaatagtttgagaaaacataagcaaatattataagaggaaattattattttaaaattttgtttgaaaagtatagcacattttattttgcctaacttttatggagttttagctttttttgatgtcttttatggtttttattaagtcagttttttgttattattaatttcaaaaatcatattttattatttttcttttttgtcaatcaaatcgtatttttttttctcagcagctcaccatctctttcttctgtcataggagttgttgccctaagccagatgttttacatctggtggccgatgacccaaacagacaccaaatttgaaatctccaccccaaaaattttaaaaaccccttttttgcctcctccttctttgacccccactgatcttgaatcgcccactccgacatctctcctcctctctacctcaccacacatttcgaactcctcactgttggataataagaagaattttggagagaatacttgaatggaagaagctatattttatatttcagcttgtgtgatttgtgacttggta

SEQ ID NO: 71781 - DNA, 1000 bp, Cannabis sativa
aataatctccactttggcaaaaaaccaaaaacaaaaacgctgccttcacatgcgccctgggtgctctatgtccgaaagatgttgatcaagttcaggtagtgttgaaacttgatccctgtaactacttttgtaagcatatctatagggttatttgtaatcttgactttctaaagaataacattcccttcatcaatgatctcacgaaaaaaatgcaaccgaacattgatttgcttagtgcgaccatgatggacttggttctttgccaaacaaatggcactctgactgtcactaaaaacctccacgttcttctaaaaaatacccaaatccttggtcagcctgagaagccatataacttctttgaatgcttctgttatagccatatattctgcctctgtagtaaacaaagctacagttgactgtaatgttgatctccagcaaactggtacacatgccactgtgaacacataactagtacttgatcgacgcttatccaaatctccagcatagtcaaaatcaacatatctgaaatgatgtttaccatcagttctaactctcttaaacttcaaaccaatatctacagtaccatagatatacagtagaatccacttcactgcttgctagtgacctttatcaagattgtgcatgtagcgactcacaccgtactaacaatatatgaaaaatatcaggtttgttgcataccattgcatacatcagggcaccaacatttgcatatggaatacgcaccatttgcttcttcacattggcagtgttaggtgacatctttgcacttaacttaaaatgaggtacaagtggtgtactaacaggtttagtcttctcatccatgcaaaacatttacaatactttcttcaaatacgtactgagtctatgtcagacagactgtacttgcaactctgtttcttatgatctccattccaagaatcttcttagcttctccaagatctttcatttcaaattctgaacttagctgagtctttagcct

SEQ ID NO: 71782 - DNA, 1093 bp, Cannabis sativa
actcttgttaatttgttgttatcatgtatattattttttattgttgttttgatgttatttaaatattattttcatgttactttatatatagttttcttgttgtttttttttttttataaaaaactatttaaatgtaaaaaaaatatttaaacgtaaaaatatatttttttttttttaaaaaaaaaaattaccttatgtaattattccataaatatatgtattatgtagatagtttgcaaataatttttggcatgggcttgagtgaaacctggcccaaatgggtcagctcaagtacttgttttcaaagaactaattggaaagaatttatttatttatttatttttaaagatgtacactctaattgaaaaaaagggaatatcctatataattgtagagtaaatagtgggtaaaatatcaactcttttttttttggtaaataattaagatgattgtattgcacatcaaatatgtacataaaaaattaatgaaaatctagacccctttacacccaatcatctcaagttacacacaaatactttcaatccaacttttatctatatcacttacaatcctaatatttagactatatgtatgtcctaaccttaacaacaaactttacattttgaataaagctattggcattttgtaaatctttttcccacaaaataatattactggctcactaaattaaatgcattcaacactaatgaatacacttcttttcaaaatttactcttcttagatcttcttatccatttaagaatctctttgtaatggtactagtttgaaccaataccacaccagttcaggacctgttgagaacaacttttactatagcaacacttgaaaaacaagtgatcatgtgtttcattatccaagccacataaaagacaagtttgcacaccatggatcctataaccacccaccaagccacaaatttgtgttttggaatgttgtatctggttccatgtgttactaaacaagctgctgcaggtttttttgatagaataatccatagatttgagctagtttttggtgaaagaagattatagtttatccctcaccctcataatttgaatccaatactaactac

SEQ ID NO: 71783 - DNA, 1079 bp, Cannabis sativa
aatatttttgggggactgccaaaatttcctaagataacattgataaatgatagctattaaatggaaaattgtaatgttattattattttgaaatggaatttgtatttgtatttgtattttttttttttttgaaaccgaatggaatttgtatttaaaaggtagaatttttaaacacttctttaaaaatcgcttttaaaaggcaaaaagaaacgttccacaagcggttcaaacctaaggaacggtaaagaagatatcgatcaatcataaaagcattccaccaaccaaaaacaaatccaaaaaggaatcttcagagttcatcaaaatataatatgaggaacatatactaaattttacaaaagaaacaaaaacttcaatgttaatttccattcttggaaaattattttttctcacttggaaaaaaaaaatcctatatttgatatactaagttaagaacttttaaaattagattaagagagacaacttcaaaatctatacaatttcagaaaaatattttatagtttgtatttcttcattaattttcctcatgttagcaacagccactcattcagcataataattaaacaatgtttagctttgaaaaaaaaaaactcaaccaatatatattccttcaaaaaaaaaaatattatattttaataacaagatttttatattataggacacagcgacaatgaatattgaattaatccatttattttgtttgtttttcaagtaataaaagtaatactaattaatttttttttttaatttatattacagtataagattttaagttcgaatttctttccttaaaaaaattattcttttaattttaaaatttaatatttaatcatttccaatttgaaccgtaaccctcgccaaaactcatgcaataacaaaaataaataaataaataaagtaattattatacatatataacttaattaataatattatacatcttctttcaaatacccttcccaatgtaaataataataataatattaaaaataatataaaataatatagagtagatgagaagaaagaagaagaagatgaagatagaaagagaaagtgaatga

SEQ ID NO: 71784 - DNA, 824 bp, Cannabis sativa
gaatcaccattagtgtgctttgtgtacttgattctctattgttgtaagttgtaatttttgcctataataaaatcatcccagccaataaagctgcttctacccggggattaggtccaagttttatccaaaacttatgattgaacctcgttatttcttgctgtcaatttgtatttctggttttacagtttgtggtttcatgttctaagcctattattgttcttgcattgtgtttttgtttgtgcttgagtgcatggatctttgtccggtcaggatgaatgtttcctctcttatatttctttatatatccctaggcttgatcaacctgatgatatatcttgatgtatcaactaccagtgaatgagttaacattcttgaaatagaatgagcttggaaaaactttgagggtataatcactttgatatactggtttggaaaaaggctctactgctgatttgtcatggagtaggaacaatcacattaattgtgtctgaaccaagtaactcttgtctcattttatcattgctttattttctgttttcattgtgtcttaaccaagtaactcttgtgtcattttatcatagctttattttcttattttcattgtgtttgatctattgttctttctcttaaactctttggtgttgcttgtctctgtgtttgactgtgattgcagggattgttcccttgtagccttgttatcacagagcaattttttcatgctcaatactcctttaagatagacaacaaccatatcacttcactcgcagcattagctattgctctatactcagcagatgactttgataagcttatttttatttatt

SEQ ID NO: 71785 - DNA, 1047 bp, Cannabis sativa
atttataattattaataaaatattttatatatttaattatgtaatgtgggacagaaaatccactgagttaatatataagaatatatatatatatataattaatttttttctacttttctagttttcataacacagccgcaccactaacaagattttgaaatcatgaattagatttctgtatatcattttatataactttagttaattaataattaatattacacttatttataaatataatatgtttcaacgtgttaattaatctccaaacatatacatacgtataaattattgtaaattacaaatatgaatgacttcatatatagttatttggactttgaagtagtactagtgtgaattaattaaaataattaaaatgaaaaatgaaggctgctaaggacaaagaatatgtgtacattttgaaatagtattattagtatttagttcacacatgtatagcggctagtaatactgtgtacacaacttactaagaattaataaagaataaaggggtttttttttgggtagattttataaaaattgtattgtattaaataacaaataatattatgtttaaataaatattatattgtattaattattacggccataaatttaattacaacgtgaattgtattatttaagtacataacaaatgatctgtattagcttgtattataatatttagaaagtgtttggacttggaactggcatcgaccccagccccagcctcgaatcccgactcgaacccgaacccaaacccaaaatctcgaacccaaccctaaaccccgtaccttgaccctcgaccctgactctgacctcgatcccaggatcctgactccgaccccgatctcaaccctgaacctcgacctgaaccctgaatccggactccaaatccacatctcggccccagactctggctcagaccctaacccatccctggaccccgaactcgaactcgaactcagacctgaacctggccacaaaccttaacctcaaccttggattcagactcgaaccctaacccgaccccaaaactctcgaacc

SEQ ID NO: 71786 - DNA, 1040 bp, Cannabis sativa
ccaaaaatcaataaatcaagatgatgaataaatagataaataataaaacttgactagttgttgagaaggtatttgctagttcatttcctttaactataaaataatatcatcatccaaaggtgggaccaacatctctcaacaagactctatataataaccaattaagttatactaaaaagaagaagaaggaccccatcaaacccatcatagaatcataaagcaaatatatgactcaattttatgtccttttccttttttcaattttgaaaagttggtcaatttcatccaattaaactaatcatatcatgtgtccgtacaatataaaaagtccttacttcatactctagtctagtctacttgcatcataagcttatttaggtgtaacatagtatgaagatttttattctattttttaatctataatttgtttttttgtgaattaaattaatccttataatagaagctaaggtgactacatagagtaaccttagaggagaaaattattttagttatggctagtaaattgtaaaaataaaatggagaaaagaataagagttttctcaattgtgtaattacttaatgtaagatcatatattaaaatgtttaaaaaaaaaaatatcatacattaaaattaaatatatagaggggcatttttgtaagctaaatttttgaagaataaaaatatcttttaattttaaattttctattataaaaaattaaataaagagatattgttttacatatatatatataacttttatagaatttaccaattatctcattccatatttttagtacatataaatatgagaattattataacaccacacaaataattttcattagtctagggaaacatgacattataaaattttattgagtgtacaatggaccataccattactaatagctatagaatagtcatcttattatatgaatttttattaggctaaaaagtttaaaaaatataatttaatacatgttaaaatttaaagataaaaattttaattagcttaatatttttttaatgttaattttaa

SEQ ID NO: 71787 - DNA, 1117 bp, Cannabis sativa
ttatttaaataaagtgtaaagtctataaccaaagtccactaggagaattcaattatggaattctttagtagccaagaacttgtttctttttattttctatttatttaattaattaattggatggaaaataagttactttcctattattctctctaccttttggctataaatagaaggctttagggagctacttatatacactttattttagtaattatactagtttattgaaatttatttacaaggaactaataagtggtcaagaataaattaaattgaggcaaaacagtaattttattcctgctcagtataaccatctataaaggatcattgattattttaatggaaatactggataaattataacgtatctatattatgtatatagagtgtttcaagaaatcaagagtgtgattctgagtctatagtggagtcatgaaaaattaacaagatagaaatttatagtgtgaattttagatctacttattgggagcctaaattttatgggcccatagtccctgcagtatcttatataaatacctattgcccagaatttttcccaaaataaatggttggttaggaccaatccaggtggaaatgggacccacactgcgggacattccatctttaatcacttttagagtttattatttcaaaggaattatagcagattggtcatttttgggagggtctacctggatgatgggtagtccttgtcccttactttccgtaagtgaattcaactcggagaggatatgggaggagaggcggagtgcaccacactactcaaggttatatcaatgtatacacatttaatgcggcatggggaagaacgtccaatacttagagatattattacaatggaagataaatcaagatatatacaactcaattgtaaaaataatacaagaacaataaaagagattgattaaatatatgttataatacacatatatatatgcactgtatatatcacacacatatatatatactagaggagagttacgtggcgagccacgtaaatattagttttatataagttctagtggtttttgtttaagaattcagtaactaagcaacgacaacaacaatggtagatagatctatttaagttttt

SEQ ID NO: 71788 - DNA, 2317 bp, Cannabis sativa
ctcgtgtatggcaaataggattggctgtatctccccctcatctatgcaccgcaagagggaagttaaaaaagcccctcttgtataacactccatcgatcaccaattaatgggttgccttatatacaaccctcttggcctccttcttatccactggtagctcttctttttggatgtagctgaggtatgcgctcatcgaagagtctccattagtcactacacatgcctgctcctcctctatggtcgacctttcgagatattccacaagtcttgattctaaggtatcaatatcctgagtcgatgccaatttggccaatgcatcgacatttacgttctcatctcagggtatctgttccacggtatagtgttgcagctgctctagataacttttcaccttagcttggtacgccatcttcctactccccttcgttggtattctccattgacttggaacaccagtagctgtgaattgctaaagatgtctagcttgatgattttcaattcctttgccaagaataggcaactagcaaagcctcgcattcagcttcattattggaagccttaaacccgaatctcattacgcaatacatcagtagccctcctagtgcggtcatcactactctcgccccaactcctccataatttgatgctccgtccacatgtaaattccatcttccttccccatcctgggtgttttcctgcaacacttcttgagttctcgtatcgtgaatttagctataaagtcgacgaatattttcccattgtctgctgcccgtggtacataagaaatgtcaaattggctgagtttaatcatccattttagaaggcgtcttgaggtttcgggcttgtgtaggacttggcgtaaagggtgattggtgagtactactatggagtgagcatagaagtgtgactttagcttccttgaggccattacgagcgcataagctaacttctccatttttgggtatagggtctcagcatcttttactaacataatacactggttgttgctatttcccctcccctttcacaaaggccacaataacgacatgtcttgacacaaccaagtaaagagataacatttctcctttctctagtttcgccaatagtgatggcttccccagattttgtttgagtctccaaaaagcctcttcacagtagacatttgtctatcgactgcgagatatatctattaagggctgccaccatccccgttaggtactgcaccttctgattttctagtgattccatatctatcagtgcttgtatcttctcaaggttggcatctatccccctttcattaaccatgaagcccaagaacttgcccgacgacaccccaaatatgcatttagcggggttaagcttcatctaatacttcctcaaggtagtgaacgttccatctatgtctttgatcaagtctccagctttcttggtctttagtaacatgtcatgaacatacacttccatattatgcccaatttagttggcaaatattttgttgacgaatctctgatatgtggccctcacatttttgagtccaaatgacatgacctgatagcagtctagccctctgtctgtgatgaaggatgtgtgttcctcgtcagctgggttcatagggatttgattgtatcccgagtaaacatccataaagcacattacctcattgcctgttatggcattcaccatctgatatatgcgagggagcgagaagctgtattttgggcacactttattcaagttggtgaaatctacgcaaaccctccacttcccattcgactttgggaccaagatagaattcaacacccaaatagggtaaaaggcttctcgtatgaaccgaaactaattgagtttgtctacttcttcttttaacgccgtgtatcgcactgagttgagggctcgccttttttgccttactggtctcgcatgtgggtcaatagttatatggtcagacataactgtgggacttatccccactatgtcttgatgtccccaagcaaagacattagccatccctttgaggtattatctcagctcatgtttgagggcctcgtagagtccttttcccattttaagcactttcagtgggtgctcggatatcactccttctttaattttttttcatttagttctacgtgaacctcctcctccttcacttttgggtctaagtctacatcgaccctttcctggtgggcctccttgttgcatatggtattgcccataaactcgcggggttttatggcaatcttaagggatgtgttataacatttcctcacctccttctgttctcctcttacgcttgaaactcctcccatagttggga

SEQ ID NO: 71789 - DNA, 1577 bp, Cannabis sativa
acagtagaaaagaaaatctaaaaagtgaaacataaagtctaagaaaaaaaaaaactaataggatattggctatatggccaaagacttccatccatgagtgaatagcttggactacatcatgggttgttgcagagtatagcagcagctgctcttaatttttttctttctaaagaatatttaccagtctaatatagaaaacatatcagagtggaattcataaaaatcagtactggtatagtttttctgctatgattactgattttttttcttgtttgtatattgcaaggaaatttatgctcctgccactataattaatttctaggaatttcatgccatttaaaagtgaaaatacaaaagcatagaaaatgtaaaacagtgaattatataaagaaagcataaataactaggacataaaagttttttgataaagaaatatcaactgcagctcttgataatctcttgataattacaaccattattaactgtaaaaatgaaatcaacatatactatagcagtgtgcataaataataaatgtactcaaaacatagaaagagagataagttatcaaaataagggtctgaacttctgcaacagcttcttctaactacagctgttctacaatttatagcacatggctcaatagaaatacttgttttttcaattgttgctattactcaataataggattgataaaatgattaaaggaaatattaaagtcaagcaagtaagaagtcttcaaagagagtaagtgttatgttagatttcattaacaatttgtagtgtgtagcttattgttgctcagtttgagcaattgtttgatagtggttagtgattaataaaaagtttctttttcttttctggtaaaagaatgaaaaaaaaaaaaggagcttaggaacaaacaaacatgtaggatcaattcagtataccaggaagaagacaaatagggagttaaatgaaatggagaaaccacgtctaacatcctcccaccattacaatatctttatacttatttcaaaatataacatgaaaaattctatgagaattgcttattgtggttcttaccttaagtgaatctgtatccttgaatgtggtatagaacaaagagtttttcaagtttgtgactctccagtaaactatttctatactatgttcttaaactaaagctttaaaacattcattatgaaattacatgaaaatagcaaactagcaccttggcctatgttcagtatttagaattaaaatcataaacagaacataccatagaaaattgttataaaacactcagaacaaacgacaacaatggaaggacattttttgcagacactaaaagaaaaagaaaaaactctaatactgcagaacagttattctatcaaacttacctacatcttcccataggatctggtacttagagcagtgcactcaacatctcgttccagatgataggatccccaaaaagcaccagtggctgcattcaaatgaaaattagttcattgaaatggagaaggataacaatcaattttttagaagatgattaatcaaattgatcaattttctttttcgttctatttccttttttt

SEQ ID NO: 71790 - DNA, 1272 bp, Cannabis sativa
  modified_base (623)..(624): a, c, t, g, unknown or other
tattttttgatatttttttttaatcaagtagttaaatgaagcatagaaattcaaatttgtgatttcattattcgttgttagatcaaaattcgatagtttgatatttttaaaattaatatttataattaaatttgtttagtaaccattcatgggtaatacccataaagaaatgttcaattaattgataataatatatagataattaaaaataaggtgtccaccataacacattatttttgcatcaaacaatcaagttttataattttagaacaacataaataaaaagatgtgaataaagagtattagtggaaactacatagtcaatgtaaatcaaaataagagaagactatgtcaaatagaatgagaagaaacccataaaattttctatgatttatagatttcaaaaaatcatcaaaaaatatttttagtaattttttaactgcataattatcatcaaattcataataattattaaacaaagtcaaaaaattaatgaaaaatcatagaaaaatcgtaaatcaaattctatccacaatggaaaaaaaaaattgtcaaaaaatgacgttgagaggagctgcacgcactgttgggattttatgtcttaaataaaactcattttaatnnaatcagatttactaattaataaaatatgagaaatcattttatgttgcatgattcacatgattgctttcatgattataagtttaatgtataaattctatttaatccaaaacatatagttattcatgattatagtgttgtcaacatagtagaatataatcatgattgtatgtttcaaagtttaatgtctcatgatttgtcagtttactgaatttagactgacatgataatctgcaacaaagtttacttacaccttggataagtgttatgtcctttctaggatattggcaaagtatgcttggatcagatgtatggagtatacatcaaaccataccgatattgacattggataagatattataaacttatcgttacatctatataagtcaatatcagttaattgatcttaggctaatagatcttaatcttgatatggttaggttcaatctaaactgtgttatttatgtttttggagttgttcgttaaagctgactaatggattgatccaatacttacatcttagaaacatgatagtataattgagtagaaaaactaattaaagatatgaaatctataacttctataagtatctagaagtgaaataatgatttccttcgagcttggcttaataaagataaatgattgaggtct

SEQ ID NO: 71791 - DNA, 856 bp, Cannabis sativa
gatttaaagcagcaagtcaccaatgctgtaatggctagtatgttgtattgggtgtggaaaaataggattagttgtgtgtttaatttgatgtgtttttctactgcttttattaatagagaaataaaaaggctggtcaagtttaaggtgatgggtatcacttgtaaaaacacaaaagctagtgataaatatgtaatgaatgtaatcagcagttggtgatgttttgtggctgttgcttcggcttagtcttggtttggttgtattttgctctgttttgaataaaattatcctttttgttaatataaaatgacttcattcatgcttccaaaggccagtactcttctaccacttggagaagtattctgcaggaaaaagacgtgctcctaaagggtttgatttgaaaagttagaatggcacttgtattcctactatcggctcatgttgggttcccaatgttaggcctctgtattttaaacatggtatttcccctcctaatccttttgtctcatactttattcatgataatggtaagtggaatgttgaaagccttagcctctatttccttgagaacattattgatgaaatcctgaaggtttcaattagtcctgctatggatgacactttctcatttgtttggggatgtcatccctcgagcaattaatttaactgtcaactctgcctaccatgtttctaaagctttcgatttttcgtcatctccatcttcttctaatccagttgcttttaaggattggtggaagcatatttggtccatgaaaatcccaccaaaaatcaagcactttgtttggaaaaccttccatcatgtgttaccttaatgccttttccaaaaaaaaaaaaaaaa

SEQ ID NO: 71792 - DNA, 2100 bp, Cannabis sativa
  modified_base (1767)..(1772): a, c, t, g, unknown or other
tccaaatttcttactcttgcagcagccgtgctaaaacaacttaaatacgccttaagtatctctccaagttgttgctttatgttggtgagtgaggacacttcgggtcgtctatcccttgcagactgaaactgctttttaaaatccttggacagttgttcccaagaagtaatggaaggatgagtaaatttattgaactagctgcttgctgctccaactagtgaggtgggaaacaaaatacaacttaaattgttcgtaacattgctagcttgcattattgtgttgaagttattcaaatgcaagaccggataggtggttgtaacatacgaggagacgtgagggtttttaaatccctggggaaaaggagtattcatgatatctagatggtacgactcgagttcctcatttgagtcgtatcaggattattttcctaactcccccaaatgataccttctgaacttatcctccaacttgtctattcgcaattggataagatcctcttactttggaatgagtttttggcgaagatcaagttttttctgattcaagtgctctcgcagatctggttggttatagatactagcgaacctcgttctactcactgactgcgtcctgcttacgaacctcgtcttgcttatggacctcgtccttgagtgacttgtagtcttactggttctcatgctttcttgatcattattacgacgagtactttctccttctcgagttaatcgactatgggtccttgagtgccccgatgtcacactcgcttcttcacgccccgttcttcccccttaggcatggttcgttatgtttcccccattgggatttgtacgagccccttctctatgggtccgggaagaatgttggtggttcctacgctcgtcaggttgtttcctaggattttccttgtttccacgaggaatttcctgtttcctggtttctagccgcctcccattctcatttctatgagatggttctcgctgatcatttggattttccttgttcttcctgagcattttgagggttctcctgagatgtttcatgtctcctggttcttctcgtggccttctcactccagggtcaggttaattttgagtattattccccgatgacgccctggtcgcgactgcctcacactccaattcagcattcaaccaatttgcctcctccagacggcgcctgagatgacagttttccattttgacaataggtatgtatcttgtagggtcataagcaccctcatccatgggttgagcacccccaagattgggttcttcatccctcactctaggatttttgtccatttgcatgctgagtcctcctcggacgtgttattcgtttgctagggccaccctcaagttgggtcgtcctagagtgagtgctctgagtgctggggccaccctcatggtgggtcctcctggaacgagtgatccgagtgctggggccaccctcaggttgggtcctcctggagtgagcggtccatttagactaagagttggaaggcctcgtagagcccattggctcttttccaggacggtgaagagtttcttcatgtggtgtgtcaacgtattctgtgttgtcagccatgaagaggattattttttgtatgtaaggagggttttttctgagctctttcacgaaggctctcaatgaaagcaccaaactgttaacacagatttttgttaactagatttgagcctaagttgtaataaacttgcacagaaaattaaaacagtaagaacacgaaagtttttacgtggttttgcagtnnnnnntctgcatagtccacgagtcaattttattagatttttgatacaattctagggcctttcctcttatgaatttttttggtccttttttcagtataacatgcctctatttataattacatagtcaggcagttaattacatagttggctgatatctttacaacagttatcccctaaaatcgtggggtttaattacataccacgtaaaataaatgaagataatatttgaatatcacacagctgtgatatgtctccttttaccgggtcaaggtaatcgtgtattaaatacgttgtaaattataacgttctcggatgtctcgatgggaacacatca

SEQ ID NO: 71793 - DNA, 1124 bp, Cannabis sativa
  modified_base (26)..(26): a, c, t, g, unknown or other
ttacattgaaacagagttttatttanggcataaaacccaacagtaatatccttgacggataatcttcttggataggcgctgccaacctgcatgatctctacagaagccctcatgaatctctttgattcttttgcttgcttatgctggtaacacacatcgtaagagtggcatggaataatccctcctgtacaattttccctcaaccatcgtgtagcgaggtagcgagtataagagtttgcatgcctcggttttttttttgtaggaagttctccacttactagatacttgacaattggtgtcatccatgttggcaaagtgtctatcatctcgatttcttcctcttcacatatgcttggatcgtctaagacctacaccggtaccaaatttaacttatcaagatcgcattgagatgctaattttgctagtgcatctgcattagagttttgttctcttggaatttgttcaattttaaaataatcaaacttttccaagttcttctgaaccttctctaaatattttgccattttaggcctttctcttggtattctcccaagacttggtttacaattagttgtgagtcactatagcacgttatatttttgacttttaatgccttgactattcttaagcctgccaacaaggcctcttactcttcctcactattcaaagtatcaaactgcaatctcagtgcgtagtggaacttgaagttatctagcgacatcattataactcctgcccccgagccattctcatttgaagccccatcaacatatagtttccatgtttttaactcgcgctcaacatcacggtcttcttctaagtttatttcttctattagaaagttagctaaagcttgtcctttgattgacactctcgagtgataagttacatcaaattgtcccaactcaatcgaccactttatcaatcttcctgaagcatcatgttttgataaaacttgccttaatggctgatttgttaggactttaattggatgtacctggaaatatggtcgtaacttgcgagatgcatgaattaagcatagtgtaagtttttccaatggggggtacctcgactctgcccccagtaaccttttactgacatagtaatgttgggttttatgccct

SEQ ID NO: 71794 - DNA, 956 bp, Cannabis sativa
ttttatgaataaagaaacagagacctaatatacctgtttcaattcgcattttaatgaaatgtactttgtttgtttctagcattttatttcttgacaatatataagtccatgaataagactgatccctattcaaaacaaagccctctttcattgttaagttcttatatattacatatatgagcgcagtccaaagcattttaggctatgtttgttaggaaggatggagaataaggaggatagacagttggtggaggattttgaataagaatgagggagatgagagtagcaattctttttaagttatttagtagaagggatgaattgatggaaggatggagagtatttatttatgaaattataatattctcagtaatttcttaataatatattatgggagtatttttgtaattttaataattgaggaagaagagcatgaatccttccattcataaattggggatttagaagagttttctctccatctacctatcactttcctcccccaatccttcttgccaaaacaagtagatttattgtatccttccatctctctccctcatctcctctctattcattcacttctccctcttaatgttaattgtggtgagtttgtgaatatttttttgattaaaaaaatgaaaatattttctaaaaacttgttctataaaaaaataaaaatatttttatgcttttcaatttttatttgagaatcaaaatttttaacaaaataaaaaattactttcaaaatttttataaatattttttttcttaattaatatttaggactccgaccccaacctgaatcttggttcacagactccaaccgtggctccagtctcggattaagaccacgaccccaaactcagatacggacctgaactcgacttaaataaaatcaaaaaataaaactgaaaataaaagttatagaacacgtttttattttttatttttaaaat

SEQ ID NO: 71795 - DNA, 1020 bp, Cannabis sativa
ggctaaaacacttttcaattctttgaatttaggtggtgtttggttggatgtaatgaaatggaatggaatgaaaagaaaacaatcttctttcttttgtttggttgcatatttattaaaatttcgctctaatagaacgaactttctaccattttagtgaaatgactattctattttaaaataagaaaagattatttcaatgcataataagaaaaaatttaataatatttttatcaattttatttatgtattttaaattttattccatttttatttctatgtttttattcctcccaaccaaatattacttcaattttctttccgatgtttctcatatgggattacttaatagtactggaacaccttcctctcttaagctagcttattggagtgagttctactcaagtaattgtcaagtgatatcagtttgggccaacttcacgaaaagggcaaccagcaagtttaagcccagatggcccccgcaaagtaggccgcagtggactttgactctaaagggtgatgtattattaggatcccaacttggctaattatgggattagttagtagtatgtaactattggacaccctcctctcttaagctagtttttgggagtgagtttcagctttcacttcttgttagttcaaatggtctgctttgctctgcttctacaatgtttgaggtttgaatccacaggagggtgtttatgtagcaattgatatagcgggagtctagtttttttaaatctatatttatgtatgtataaaggtactatatagatacacacatacaaaatatgtttgctctacattggtgatcactatgacaggtgataaaggtttgtgcttgatatactattttccttatgaattaatatggtcatagaagagtctttgagtagagaaattttgttggtgcctcttgaaactgcttgttgatcttgttctattttgtgctttgttaataggcgaggccccccaccaagatttttggaaagaaataaaaccgaagcacctacaaacaag

SEQ ID NO: 71796 - DNA, 1891 bp, Cannabis sativa
caacttgtacttcctacttcggtacctgtcacgacattgatccatgaaaacttctttgtcttcctcttttactttaaatatttcctgaaataataaaaaaaattcaattaagtaataagttgtatcatgcaaatctaaaactaaaagggaggtaaagaaggttttttgtaaaagaaagcattaaattatatatttttaaagactaaaaggcttttcccatattgcaataatctttgaaacttacctttacaagctcccaaattttattccttttagattgcttaatacaattccaagtttgaacattcagcggagcatttgaagtatttttcaaaagctctccaagttgagtaataaaatattaagcagatttctctacagattttcccatcttgaattgtacatatactttcttatttttgcattcttctaacaccttaagattgcgagtttcagaacgaactttcttctgactgcatctgtttttcaaaatagcatatgttatttaatataaatgacctaaaataatgaacaaaaaaaattagaagttcttaatagatatagtactgataaaaagccttaacagttaaagatgcaatacttagaagtatattcactctatgcgtgatcatttttttccatacatcttgatatgtttgatgcataaccatcaggaaccttgatctcctttaaaaacttgcacaaaatacttttctcactagatgataaagtgtaacacgcggttggaatcaaaagtttatcacccttttgtattggatgaaatgcttctctaatacacgtgtctttgactagtcaagctttcacattatctttagattttccttcaacattcattatagtgctaagtaccttttcacatatattttttttttcaatatgcataacatctaaattgtttcttaacaacaatgtatgccaatacggtaactcaaagaaaatacttttcttcttccaactattttgatgtaaagattcttctcattttctttccaaatggagcaaattgaagataacgtaattgattgagcacatcatttcccaaaagaggccttggtgcactattcttttcattagtaccatcaaacaaccaatattgagtacgccatctatgtcttataggtaaaaagtgatgatgtcccatgtaacattcattattactatacttcaagcgtctgaaatgggtatctctattacaactaggacaagctaacttctctcaatttacccaaccagataagtttccataagctggaaaatcattaagagtccacaacactgttgcatgaagattaaaattcaattttctaaatgcatcatatgtattaacaccaacatcccatagcattttcaattcctcaactaaaggttgcaagtatacatcgatattattttctggagctgtaggaccaggtattaacaatgacaacataaaatatggttgtttcaagcacatccatggaggtaagttgtaaggaactaaaaccactagccaagtactatgactactgctcatattgcaaaacgaattgaatccatcacttgctaacccaagtctaacattatgaggttctttggtacaatttacatcatcatgtcaaaatatttttgtaaagaccgcttagctttgttttggaaataagcagataattagggtttaattatgaaactataatattaattatgatttatcattttacggaaatttattagaattcagggtgtattatttatgctacatatggaattttatgtttttgcatgtttttgtgcccgaaaatattggaacgcggcgtttggccaatgaaatcacattttagtattttgtagtcgcaggcaaaatagttacacattgggaatgtcagaaattatt

SEQ ID NO: 71797 - DNA, 1709 bp, Cannabis sativa
tggtgaagtcattgattgtgttgatatatacaaacaacctgcttttgatcatccacttctcaagaaccacatcatcgaggtttttgcttttttcgcaccttatcatcatcgatacatttatatatttcttttcaatacacatttatgttttatatacatcataattataattgactttcacttgtttttttttttttttacaaaatagctactttggacacatagaaaaaaatgttttcgacataataaaggaatgtttttgacataataagtgcatgtttgatagcataattaaaaaaatattttttgcaaaaaaacaatttagtttgtttggtcttattttttaaaaacagttttcagaaaacaaaaatcttgaaaacaacaaaatgttgttttttgttttaaaaatcaattcactgttggtcaacattatttttaaaaaacactaatcaaatatgacttgtgttttaaaaacttcaaaaattattttttgttcttatttctaaaaataattttttaaaaacaataccaaacatgctctaaattatttaagttttaagctataaaacatatcgagggatagagaaaaaaaaagtggttatgctttggtagaattttgtaataaatatattttattatatatgtggcctcaagtttttgcaagagcctagctaattgaacaactcatttatatgtgacatatgcatacagccaagttcaattcaaataaatcagttagaaggggaaaacgatgattcactaaaagcattacaagtgtggcgtaagtatggagaatgcccaaagggaacaattcccattgttcgtgcaccaacgtcttctaaatatggtcgaaaaacccatttcaaatctcactatagatataatcagagccactttgttgcacctggtcacgaggtaccaataccattatatatatatatatatgctaattatttgggtggttgatgttgtttatacaattgtatctatttatatatatatgtatataaatatataacatatgttaaatatgtatagtatgctgaagtgacgatgaatggtggaacatactttggagcaaaagccaatattaacgtatggactccagtatcacatggaacaatcagtgtagctcaaatttgggttgtgtcatcaagccaagtagagactgaaattaatactgtagaagctggttggatagtaagttgaataatttcacactatttttataaatggctctgccggtaatataacttagttttaattaaaattacatcaaaatttggggttcttgaacaggttcgtccaaatgccacacaaacagaattcttcatttattggacagtgagttctcttattcctttaagtatatataaatataatttttaaaggacgcctaacatataaaaaaaaagctcattgtgctaagcatcacgagaagaatggtgcaatttaatatcgagctccatatattttaatttaataaataatataacaatctattaactattgaaaatacgccactaataatttaacacagtgttggacactttaaaagtaactaatgtgaatgctcatgaatgagtgacgcccatatacttttattatacacttaagtctctatatatacacttatatattataagcttcatctctagtgttgggcatatataataaagctaactatacatataatattaattacatat

SEQ ID NO: 71798 - DNA, 1355 bp, Cannabis sativa
  modified_base (1324)..(1328): a, c, t, g, unknown or other
tactattttagaaaatacatggtcaattttgtcatttaacaaaacacatggtctaattggtaacttttgtaaaaaaaagagtccaaaatggtatttacccgaaaaactaaacacaaaggcttgaaggtggtctaagttcaattttgtcattttgcattaaatgaaaagaaaataaagtaaagtaaatggtcccaaaaggggatgattttgcaaataaatatcaatacatatcacgtacctctcactatcttatgtgtctttttcttattcttgaaatgaaatgattttatatgtagacatttatagtggtaaagaaataaccttcaaagacttctttttcttttctagaaaagaatctttttaaacttatttatttatgtatatttttaaaaaattaaataacttagtttaactttttaaattacattttccccctcaatataagctaataataatttaccataaagactttctaagatttagaaagaagtaaagaatttaagatatgttttcaaagaattttttcatgtagttcagagcattcacaatggattttttactttaatttttaaaatatatcattaaaatctaattttttaaaagtacatcactcaaattttatttctttttataatattttatttatttgaaatatataatattaacatttatacatatctctattaaaaaataattattaaaactaaaacaattaataaaacatatttagaacaataaataatattttataaatatagaacatgaataataaattttaaagaaactttaaactgaaaaagaaatttagtttatatgatgtagtgcatttagtaaaagtactcacaagtcacaacaacttatctaagatagagaaattttaaaaaatttaaagaattgtactaaaatttagagcaaatgttctaaatttcttattcattttaatatttatttaaaattcattattcatgttctacatttattaaatactatttattgttttaaatatattttattctttgttttagattttaataataatatttttgtaaagatatatatatatatattaatattatatatttaaatgaataaaaaataataaaaaaaataatgtaatttaaagaaactaatgtcgaacgtaatgtaaaaatatgttataacttagaaaaaaaataaaattttaattatgtattttaaaagatatagtagagaaactattaagtgctttaagtttaaagttcataaatattttaaaaattctctagagaaattgttatgagtactcttagggctcgtttggaatgccgtattaggtcgtattgtnnnnnattatattgaattgtattttatgcaat

SEQ ID NO: 71799 - DNA, 977 bp, Cannabis sativa
taagcaagcttggagaattttcacatttcccgattctttggttgcttcacttttgaaagctaaatactttaaacacaatgattttctgcatgctgctattggtcactctccctctttctgttggcgtagtatcctttggagtagggagcttctcattaaaggactaatttagaaaattagggatggcacctctgttagcatcactgaatccaattggcttcctcactggaatagtgttactttcaaacctggcctttctcccccttcctcaactgtttcttttttcattactgaggacaaacattgggatattagcaagctccaacattactttgatgagggggtgtttaattccattctcagtgttcctattgatccttgccataatgactgccttatttggaattaacacccttctggctgcttcaccgtcaactctgcttaccacttggctaattctttttcttctgctcctggttcctctaatccagctgcttataaatcatggtggttttctgtttggtcagctaatatacctcctaaaattaaacattttgtgtggaaagcttttaatcatgtccttccttctaatcttaaccttttccatcgtaagtctaggtcttcttccttttgttctatttgtctttctcatcctgacaccaacactcattccccagtaacgtgttccagagcaggtaagtattggaagaaatcttcattttctcagttttattttactaataataattgtgacattaaggaatttttgcatcgtggttttgaacattttgacaaggaaacgtttgcttgttttttggatttgttatgggcaatatggaatagcaggaataaggccattttcaatgctcaccactatcttgatttgaatttggaagcttctgtcagcagttacttgcaggaatacagggatgctcaatgtaatatcccggaaattaatatattatttaatttgacat

SEQ ID NO: 71800 - DNA, 566 bp, Cannabis sativa
  modified_base (402)..(419): a, c, t, g, unknown or other
aaacgaaaacacaataaataaattgaaaccaattttatcatacaacaacaaatgaacactatgaaaccaaataaacactactataaaaaaccccttttaagtccattaaagttagactagataagtttttggagtcccttttgtgttggacatgatatccaggcacataaaaagggtatttttctagtccaatcaccgttgaatgctgtcaacgtcctcctcctgtccccgccggccacagcctgcaaaataagaagtgatgagatgagagaagagagatgtggaagtgagcggctgagtagatgagaagaggagagaagggtttttttaggtttaaggttattaaatgattaaagaaaatagagagaaaaaagagtagatgatgataataataataataannnnnnnnnnnnnnnnnntaataataataataataatgggctgatcaattttgttttaaactcgcgtccagcagtacatgttgggcgaaaattacatcccaattttttttttaaaaaaaaattaattaaattattaagtatataatgttgggaattattttacca

SEQ ID NO: 71801 - DNA, 1485 bp, Cannabis sativa
aaataattatatgtatagatataattaataataataatgtatatatgaatagcaaacaaataaaaatgggtttggtttatgttttttcctttttttgtcgttggaggaatctcatttagagagttctaaaatttaattctaattaattaatattaaaatatgaattaaataacaaattatgtaacccattaagggaacctaatgcaattaattattcattaatatacaaatcaccaccaccccctctctaatctctatatatatatatagtctttatatacacagaagaatataaatggatcttatttctctctatatatatagccccaaaaaataaacctttataaattaagagcacataaattatactctctctcaaaaaaaaaaatcatcataaaaaaccctagttctttgatcaattttagttcatattaattaatatatataattaattatgacaggttctggttctccttgtggagcttgcaaattcttgagaagaaaatgtataagaggttgcattttcgcaccttatttttgccatgaacaaggcgcttctcacttcgccgccattcacaaggtcttcggggcaagcaatgtgtctaagcttctaactcaccttcccgtcagtgatcgtcctggggccgccgtaaccatctcctacgaagctcaagccagactcaaagatcccatctatggttgcgtttcacatattttcgctctccaacaacaggtaaaaaatatataataattaaaaaataattactgttataaatacgtacgatcctgaatagtcaggatcgtatgtaatttatcaaaaaaattgttttgataattgatttcaattatttaattaatgataattattattgattattaggttattaatctacaagcacaactagcatcaatcaaggaacaagcagctcaaaattttgggaacaacattaatactaccaatggattaaaccctaatgaaaagtacattaaagatgtgcaaaattggtttcaattagaaactaataacatgatgatgaagatgcctaatgccaacaacaatatggtgacaagtgataataatcataatcatgatcatcatgatcacatgatgatgatgatgatgatgaaccctaattacaatattgatcatcatgagaacaaggtgcagccaatgattaataattctaactcaggtgggagtagtagtactagtaattgtgacaataattctatgtttggatcagaagaaaataataacaataataatgaacaattttatggtaatagtaataataatttgggaagatttgatgaagcttatcacttcatgtcttcactcgatacccttcaagcggttcatgactactcagatcacgatcttcatcatcatcatcgtcgtcatcactatgagtcggtgccctataatagttataatcgccattgagaattttttttattatttttagatttatatgttagaaatat

SEQ ID NO: 71802 - DNA, 1576 bp, Cannabis sativa
cgaagagcaaatctagttaaaccacgagtagctctattagcatcaagcctaacatgagaaacaacaactctaacaaaagtaggatagtaaaagaaaaatatcatcaatcaaatcatgaaaatgagatacacaagctaatacacaatttatttattttccaataaaatttatacattttttttttttctttacatacttttattttatttttatgtctacaaaaattatattttcattaatctcttttaaccaaaaaaataaaaataaaaattgctcctttaaaaattgtggctgactgcaaattcgtattaatttttaacaaattatttttagttagcatattaatatattattatttaaataacaaaatatcccccttcaagttcaatccttcgccatatttatatgatttttttttttgaaaaaaccataataatatatatataaaaacgagatgtatataataaataaataaatatatatatattaaaggaagttaatgaaaacataataaaaagctcatgagtagaacttcaagtaaaaaaaatatcgatataatacttatagcactgtacatgtcatgtccttatccgtcaactacatgtaactccgcattaaattcctctccaaaaaaatcagtcgctctaattgcgaaaacaatataataaattaatttaactaatagaattttcaaatttgtcttaatactcatcctgtataactagtgtctatatatagtggtccgctaatttattttataagcaagtgaaggaaaataatgaagtgtgatgtttagcatagcataaacaacataatattattttgtttgcgtgctacatgttttaattaatattagtggctgttaatttagttattattcgacctattaaactaattaaaattatatattagtttattaataatcgtgaaagcagttagggaaaaccaacggtcctaacaaacaattattcgttgatgaattaacagtagaagttttagatatttagacaatccattgaaattaaaaataaaaaacataaaagcaaggtcgaaaaattagctgcttatttgaaaaggtttaatttaatattttaatgagttgagcaagaaagtatggccaccaataaaagcagtttaaccatttaagccattcaaggtttccaactaccccaactaactataaagaaaatttaagtatattgctatccttaactaaagttacctatttccaacttccaacactcaaccttctctattttttcaattctagttactgatttttattttttattttattgtaagtaaacttttgttaattattaatatttgtaaaatcaaattaaaccaaagggttatgatatttgcaaacagagatatatatacatgcactacgtaaatctccattgttttgtctttttcaactacaattatcaaatatattttaatgagcggagtcggtttttttccatgaaacattcttaatgatcatgaccgacattaattaatgcattatattcttaagatttatgattcataaacaaaaaatagataaaattgtataataccaaatcaaact

SEQ ID NO: 71803 - DNA, 575 bp, Cannabis sativa
tcttggtattaatttctttattttctgcatttattgtttttagtttttacatactctgtttgcttctattttcatttgattgatgttctcaattttattaatcttgtcattgctaattagttaattgttttaagttgatttatttattttgatttttccctattaatcataattttcccatagtaattagttactctaaacaatatataaggtaattggttaccttaaattgtttttatatatactgtatttatatattttttaactttttttaaaaaaaaaaaattacacaaaatatatatatttttttttatgaaaaagaccatatttttgtaaatttgccaaatatatatcatgaaaatgaaaattccccaaagaattattacctttccaaattgttttgtgacaagtcttacttagacaaatactcaattagtaccctatacttttaacaatgtccatattgtaatttaagaatttgaatttaaaacccatatagctgaaagtaatttagtcatattgataaaagtaggggtgtttcaaactgcctgcaccgcatattgccaaaaaataca

SEQ ID NO: 71804 - DNA, 1265 bp, Cannabis sativa
  modified_base (575)..(583): a, c, t, g, unknown or other
aaaaaaaaaaaaagaaagaacctttatttttattatttaaaaaaaacaaaacaaacaatagtatttaaaaaatagtattgtcatattacaaaacgaaatgaactagtctaagataatttaaatactgacccattcaaatctgtcaaatagtaaatttttagaaagaataaaataaaaacttcaaataattaatttttaaatatatgtataataattaatgccgtatatatttttactgaaaagaatattatatatttaagtatataaaccacaaagttgaagttagaaggggccatggcccagcatccatcaacatagttccgccaccgtgggattacattgtaatcataattacattatacaagggaatcccattacattagcaaagctatgtaatgagaattacattacaaaagattaaataaagtaaagctaaaatgactctaataccttttttatatatatttaaaaattaaagtaggagataattttgtcaatttatcatttatttcaatattcattccaataacaaaccaaacatcttaatcaatttccattactattcttattccatnnnnnnnnnattaccattaccattactattacattattttactaaaaccaaacatcacctaagtcttaagagacattggtaaggaaagagaaacagacaaaacaatttttgttctcaattttgcttttagtttttgtaatattattattaaaaattgttttatcaaaacaaaaccaaacttgtttaaatgttttagaagtagaacaaattaatgaaaacacaatgaaaattgttcaaaatcaaataataggattaggaacctctccactccacccatggtgcaaagaaatatgctttttttttcccttcattccatcatagaatacaatactaataatatgaatttgttcaccaaaattatagcaatacctaattttccatttctataaagaagaaaaggtacataattctacacataaacactcaagctcactcaaacaaaacaaacaagtccttattttcttagcctttattccaattttgctatcccaaatttcaccatctcagctttgcagggaaatactgcaagacaatactccaaaatcataatcaaacaacaaataatgtataaaggaaaaaaaaaaaatctaaattaagtttccaaaaggaaatggaaattagtagtaagaaaataatggataattagccaacaaaagtgacaatattgtttttaccttttcaattagagaaa

SEQ ID NO: 71805 - DNA, 719 bp, Cannabis sativa
caatgaattgcttaacttcattttatttatgttgattgttgattccccggacgttccaacttagaattttatccattgcattgaggaggttctccccctcctccatttattacctctgcaaccctttcttcatgatcccggacttcaaattcttgtagcttttgtgctatatcattctgaagcacaacaaactgattcgatgatgatggatcagcaggagctttctgctctttaggtcgccaacccttcacaacctgcttaaatccctcttcatcaactattgttttcatctcatcgttaccctgcctttgtttacctttgactaccaacttttgcttctttgcttccttctttctgcactcctcagtagaatgccccattcctttacaatgcttgcaaagaataggctttcattcatatttgacaatcactgatgtatcatccccatactcattttcaaagtagatcagcccaggaaattcttgttccagtgaaacctctatgaggatttgtagaaaaagaagcttgtccctttcccttgtaacctcatccaccaatattggttttcctaactgacctactatcttaaacggtgatttttggcctcaatatttgagttccaaatcctccaattggatccaaatgggaatggttccaaaattttattaaatattaaaattaagtggtaactacccaatttaagaatattccattttaag

SEQ ID NO: 71806 - DNA, 695 bp, Cannabis sativa
atatatatatttgttttaaaaaattagaattatgtataacatcaaaaacacggttcaaacatatagttggacaaatgatttatttccccgaacttttttagatcgttaaaaattcttccaaactattgggagatagttggattcaaggacgtttgtccagtttcgtttaattttactaatgtgacaattgtctatatatgtaccatatcatgcactcaaactttgatatgtacaaaattgtatgcctaaacttccatcaacatcaagtttcctttagtaaaataggacaaacattctagaatttaacaatcctaatagtttaggagaatccaaaatcgtaacgccctaaaaatttcgaaatgtataatttaatacataaaactttaggtgtaaaaatcttaatttaccgtgtaagtaactatttttaaactctgtttctaactttataaattagaattttttgaaatagagtagaatatagctactataatataatgtaataatcatcatataaaaaaaaaaaaaaatagagttatacttatacctttctctaaatgacaaaaagaaaaatgtccctgcggaacaaaatgagactaattataattgtcgcttatattatatatacatctatatggaaggtgttttttttttttttttttttgggttaattagaattaaattcaaagtgcaacacc

SEQ ID NO: 71807 - DNA, 756 bp, Cannabis sativa
ggcatggaatcatcggcgacaatgtctaaggtatttttttttcaattttctcatgcaatttttggttcttaaattcatgaaatcgattaatatgttgcaatgttctgttaaatatgttagttagggttagatttaggataagatctgttagttaattgagttgaagatggtgattttttggtcgggcctgatgccgtccgatgacagtctgattgttgtccgatggcatgagttttttgttgaaaatggatttgtttaggtcgggctcgaagccgtccgatggcagtccgattgctatccgatggcatgagttttctgtcgaaaatggatttcttaggtcgggcccgatgtgagcccaatttcgtccgatggtgcgcccaatggtacacgagtttattttttttaggttttcaaggtcaggctcgatgtgggttcgatgctgtccgatgggtacccaattttaagttttatttgggttttttggtcgggctcgatttggtcctaatgccgtccgatgggtgcctgatttacatgtgtttgtgctcaatataagttttttaggttgggtttgatgtggacctgatgcccgtccaatgtgggtgctcgattgtatgtgaattggtaaaatatgggtattttgagtcgggcccaatggagcccgatgggttttaaatttgatatttttttaagttgctatagaattgctaacttttattttgttatttttttttgcagagacctccacagctaataatt

SEQ ID NO: 71808 - DNA, 1127 bp, Cannabis sativa
atataaaatgtataaatgttgtccacaccttatagaagtatttttgtaaataaagtgtcaatttatattttttatgtaataattccaaatttttatgatatatattcttaattttatttgagacattattttttttcaaaaatatataggtaataggtgcttgatgggaattcttcccttgtcgagtaatcttctcgctccgttctcgctttaaattaaacgagtattaaagcgaatatataataaatttaaaaaacgaatataactccccgcccccgtcccgtttaattcctactctttttgtatttcttttcaattaataacacaaagaccaacattgaattatcccttcaaatttttgtataaatatgataagaacatgaattaataatttaatgtcttaccatgttcttggaaattggaatacttactaaataaataaataataataataataatgaataattgactatataataaattgaacgtgtacaagagacgtgttactctatcatattatttttgtactagattctatatgttgttttgttagttcttgtaatgttgtaattcttattaagatatatattttaatttcatttcaaattatttatagatatatatatatatgcagtggtggattcagaattttaagcgagggagactaatttttttttttataaaacaggagggcaaaaataaacttaaaaagaataaaataatgttgctagtgagatttaaacctttgacctctaacatatataatctagcttaactattacaccaaatctactaaatattatcttttattataaatatatgttataactaattaaaatacatatatatttttttcttgattttttttttcacagagcgacggcctcctttcgctacaatgtaggcccgtccctgtatatatgtaccactacccatttatggaataatactatatactattataatttatgacatatatatcatttaaaatattttgtaaaaatatatttcataattacccaaaataccaaataaaaaaaattaaaaaatatagattcatggaattttaaaaaaaattgatgaaccgaaacttttttacaaagttataaattattattttcatattg

SEQ ID NO: 71809 - DNA, 995 bp, Cannabis sativa
  modified_base (48)..(49): a, c, t, g, unknown or other
ccatgaatttctcataaacaaaaatttagttatataggcacactttanntagaatagatatatatatataatgcgaataaattaatgaagcaagtgctgttgagagaatgcatcctaaatttttgagttaggcctaattaggattggggcattgtgtagctgtacagttttgttggttcagtacttcttttaaagagagacgtatacagttaagtatgggtttcactcattttaattgcctaaattatcagttcattgatttgaatcaatatttgtcaacattaacagaaggaatatcaatttggttaggccacgctacttataacacaaaattccgacgtcacaatacaaggcttacctatcattcctatgtaaatttacatattgcaccctattttttttttttcttttttccttaataatagtattgtctcgattttttttttttttaatgtagcataatagtttaatagcttaaggttttgagttcaaactcatgatctctcccttagcttagtggcttagtattatctcgattttatttataatggtactctcttacaccatttaaataagaataataaaaaattcccctgaactttgtcactaaaaaattatactcaatacatgagtattaaatatgctacttaaactatctatctttatcaaaaattagtattcagctacattatgtcaattttctctattatgttgctgatatgatataatattctctaatttaatttcttacctaataagcaaaataaaataaaaataaaattttgtaaaataaacttaaatttgggcggtaaaactcccaaaactacaataccgttagcaaattacaacttctatccaaatttagctgttaactgccaggttggattgtccacgtggacacagtatacacgtgacacaattttattgactcacataaataattatatttaaaaaatttaaattaaaaaatcattaaaaaaaaaaacttttttttt

SEQ ID NO: 71810 - DNA, 786 bp, Cannabis sativa
ttaacatcactgataattataacagaacgtttgaccaactgaatgtacatggtcgatttagaaaatatatgggcctaaggtcatttaaattttggagccctcactttcagaatacataaaaaaatatttaaaaagagtactatcatggaacttgaacttgtaccattatgtaatgtatcatacactttaattgactaaactgtaaatatttatttacaatacacttaattttaattaaataaaaatctaaacctttcatcttatattttagactcttgaaaaatatgaatcctaagtaccaacttagtccgcttatacttaaagctgaccctttacatgtgcggtatagtagttggctatcaaatcgaactataaatctctccaccactagcttactatctatcaacattaatcctttttatacgtataccatttataaataatttacttttcatcttaagaaatatttgtgatgaaaaaaaatatatatttttgtctgtttgtactttgacacatttcatgatgctatttgttttgtgtttgtttttaccatttgaaatttatgattatatataagaaaattttacacaatgcgccctttggatacacccttatttattttggtatctagaaaagaaatttagtcctaattttttaatagtcatatacgttatagttatttaagacattttgtaaaaatttgagaaattcgaaaaattttaacataccaaaaataggatttaaagagtttattgcacacgtcttttttattttatacgcatgtaa

SEQ ID NO: 71811 - DNA, 1599 bp, Cannabis sativa
aaaagcaataaaaaaaaaaaaaaaaaaaaaaaccaaaacaagcgataatgactttgtatcgcaccattgtcgaacagaacttcttttagtctgaaagtcagcttttggaccacctccttgtgcccagatcctggccggccatataagctcatcctaggcagcctgtaggctcccctcggtcagccagatatgatggtacaactcattgacagattgcttaacttgtttcgcttgctacttgacggttttgtcatgctttgtagggagactatatcttgctgttggcaaagctatatcctacatgtactttatcttggcttacgtggacataccacatcaggtaaataaaagttagctaggataatatatatatgtgtgtttgttttcctgaaagagaaacttttatatatatatatatatattgtttgttcatagaaattggagaatggaattgtggaggtcatgagtgtacaactgcttcaaagtgcaattaattttttctgaaaaaaacatagaactgatgaagaagactacacaagggcagcttatggagaagaagagttgaagaccccttgccctaattatctcaggcgatttttttgttgcccctaatagtatatttagacgcaaattattagaggcaattttttagggcaacaattactattaggggcgaaatgatctatagctttaggagcgacttttgtcgctcctaatactcatatatatatttgtagtagtgattggagcctaacaagctcaattataattgacttacataatttcataattttagaaataattttgaattttccctttcggttgcattcaagctaatctactgtaattagagagtgatgatccatgcgaaaaataattgcataagtactattcgataaaattaaaattgtatctctataattttagagttagtgtatagtgtataagttcattatatttagttttagctatcttaagttagttaattaattaggccataacgagcattgcaactttaataaattatctcaaaaataaacaaaatgtaactaaaggggaaaatttacaactttattactgaaagtgagagacaattgctaactgaagtgagaaataattaattgtgtggttagattgcttacatacatgggtccatattccgtctataaacattggtagagctataaagcaccacaaagactattaaaatttggcattattattttgtttaattgggtgggaatcagatcaccaaaattggattaagaaactgcaaatattccaagttcagaagatagtgtataaagctgtagttaatgcctatcatatttgggcaaaaggaatatgattctttttgaaaaatcagaaagttaatttgtatgtaattcaaacaagtgtgaatagaattagtagtgaagttagtttaaagttttcccattaacatgtataaggaaaataattacatcacatagtaattttagttaactaagcaagatcttctataccatgttttctcctcttacaaatttaagttttgagtatataacacatatccataatatgtaatatggttacactacaaaaaacagctaattttag

SEQ ID NO: 71812 - DNA, 1704 bp, Cannabis sativa
ccagttggtcggtacgtctgagaaacggggtattgaagacttgcacccaaagaggaattttgagaaggctgtctccattgagagtatccaccgagcccgggatatccataaggataggctgattgagatatgtccaaggctgctgaagtagaactcgacgccgatcgccttcacacccaaactcaatgaggaaaagacccctcgaacgttcagttatggtgacgggaaaacgggatatattattccagttgtctgtcattttgtccataaaaactttcctgttgaaagttttgacagtgtagagtttggctacaagaaagaaagggccagcagggagttgctcatccacgtttccatcagctggtatgggttcatagagagtttggacagtgctttctgtatctgtgaggttaagagcaatggagagagaggtggttaagtcatccatgggtgagtgtatgtgtgtgcactgggggaaacaaatgagacgcacgcaggtgagacacaaagaatgtttgcctaattggggagcttcgtacagacagagaaaaagaagcaaagtgccttttatagcataatggatagaaatggtaatggctaaggattctgtgtctttgaaagtctttcctatatttatatatagggatgggtataaaatccttagtttaggcgtagcatttaattgggaaaacagatatacatcttgtcttctataggcaataggcagatagcaaatagactgaacgccattaaattcaagtacaatcacaatactacataaataaagccatttctgaaaattctgggcacaaagaggtttcacattagcttgtgaaatgcaattacaagaccggtcaggaggaaatttatggtaaagcttgtaattaaaagcaaaattacaaattataatcttttctgacagaagtgatttgacagagtgaagaaaaatggagaaaggtactcgattacctgaatgggtttcattaatgaggaaggttgagagtgtccttgagcttgcatctgagtgaagaggggctttagagttaatgttgatacgacggggttggttgagcttcggtttcttgacgcgacaggggcggttggagctcactgaactgggttgttcgacggagaaaatgggaacggagtcaccaagatcactagatctgggacttgggatgggtttcacaatgtggaaactgttaggatataggtgtgaaaaggaaaagattgctgggcttctgttcatctgcatggttctcaagagagagagagaacagggacggtcgaagtgtctagagagtattcctttatagccttaacaaattcatatatattaaggataacctttttcatcaacttgttaatgaacttttacactatgtgttgtatggtggaaataaaatggttgagaaaaaaaaatatagaagaaatagtaaataggagagatagaaggttaaataaatggggatttatatttacatcccaaaaatataggaatattctataatgcacccttttaaaagagatgaagcgatacatatttatctgttttagtctccgaaataattttttagtcaaattttttctcatattcatgtaaattataattatttaagatatcatgcaaaattttaaaaaattcagaaaattttaacacgccgaaaactacattcaaatactgtgttgcacgcgtgactaatt

SEQ ID NO: 71813 - DNA, 1002 bp, Cannabis sativa
tggatattaaaaatacaaaaggaatgtttggtacacttaattttaggaaatggaacatagaatttctctaaatcaattataatgttgttttattattatttttgattatctatatttaattttcataattttttgggttgtgtttatttattttttgataagtttactttttagtttttattataaatttattagaatgagaatataagattatatttttttatttaagtaataattatttattatagtaaaaaagtaatcatataataaacttgttttatgctgttaaaatgaattatgtattatgtgtttttttttttataaatatgttatttagaaaaaaactctttaataatatatatgatgagagagaaagacattaacgatctctcaaaatagttgaggggctattttgtaaattattacttgttagaggactaaattttttgacacttttattatagttatagattatagattatagattatagctatacacgtacttatgagaaagtggtacttgatcatccatagagaaaaagaaagccacaaaatttggatatacataaattgcctacaaaataatcatatatataattgagtttggtaatattatatatgatcgttttggtgagattctctcgaatcttctagtttggagcctcacgttgcatgtgcatgcagaaactataaatacacacatacattagatacgtacttaattatacatatacacatatatagctttagagctttgcaagttgaatttgagattgtgtccgagttattattcaagctatcaattatatgaatatataattataaaaaagataaagatacttttaccatgcaccctttaataaaagggatccacatgtatgctctcctatttattttggtattttatagaattttttagtctattttaatttttcaagacatcgtgtaaaattttaagagattttaaaaaatttaacacgttataaatatagttcaaacaaa

SEQ ID NO: 71814 - DNA, 898 bp, Cannabis sativa
gcacttagtgcggattggatgttgtttgaccaaaaaagtgcgaattggatcgaatgaacacccctaggtgccattatgtgccgagaaaaaccaaacataggtggaaagtaagagcctaaatcctcccatcgagggataaaataatttttgtcaacgcaaaagttttgtgcatttttcatttgactggtaaaggtttttccaacgcaacaatgtgttagaaaaacttttacccgccaaatggatttttacgggaatgacctatactagcgtactcgtgcactcaaaaaagagggtttagggtttagggtttaggcttaagttttactggcgcataaaagcctttgttttattttatctttttttaaaaaaattgataatttattttattttaataattcgtgatagtattaaaattaattttaaatattaaattagatttgaaataaatataattaaaaaataacggtattcacatttataattaaaatagtatcccaatcgaactaaaatatataactatgttcgatttgtacttagtaactaaacaaagtttctatagttattagtaactaaacaaaatattaaaagatttcaaaaaaagtaaaattcgaaagttaattataaaatatatattattctaaagtcgggtaatgtcatcgtcgttgttgttctgagtcttggaacgatgcgatgacgatccaacaccaggaggagtggggaatggcggaagatccataggagacatgttgaaaataggcacaacctgagagagatactcaaacttatctttgaatcgcttgatgtagagttgttgtgtttcatactgctgcttcgaatactgagattcttgttgttcctcctccagtttttctataaggcctcatactgttccataata

SEQ ID NO: 71815 - DNA, 1213 bp, Cannabis sativa
ctcatacatatttaaacccataaatatgtaaaatactttccgctaaaaaaaaataattacaaaaataccctttcggagttagcgggtattacacccaagacaacaaagcttgggacgtcggggttctacgaataccccggcatttccaagataggagcctcatagcgacggagggggcttgataagggccgcctcctcgcccgtcagactgtgagactcatgaatagttatatcaaccaaattgttatcaaaattcagacctttcatacttgggttaatcgattccactttactcccactgctcagcttttcacctcccttacttcccacttttgagcctctggacgctcttcctgaacttctccctccccaacttcgagaataagttctttttttgatgctcgccgtatcacggctactacttccaggaacaaaggtattaacctccaatgtaggtagcatagtaattggggtcgccagcgttttctcccccagagtttccactttgtctccatgggcaataactggaacgatagacacgcacgccttttaatctactaagttttgaaagacatatcaacgacattactacatgaactataagttttgtaacacttaatcccgtaaattgattttttttcgtggaaaaccccttcaaactaccattccgttttggtttttactttttcatcctaaatgttctattaagttccaagtgaactacccaagtgtacacaactgtacacgtggtaaatttttagtggtccacataaattaattattaaaatattttaaaaattataaaaaataaataaaattaaaatctaaaataaataaattaattattttcttttcttcattttttttctattgttttttctttctttttcgttgttcttcagttataccaccacatcatcgaccattattatcaccagaaccacaattaccataaggccttgaccatcacaccaccactatcattatcacattcccaccacaactaacacctttaacaaatctgaattaaataataaaaaaaaaagggatattggatggtaaaccacctgaacattaaattttttaacacttaactacaaaagtcaattttttgagggcagaactacctaaattcccattctgttttgttctgtacctctccgtccaataatcacagttaagtgccacagtggactgcccacgtgtacacact

SEQ ID NO: 71816 - DNA, 979 bp, Cannabis sativa
cctcttattggagtgttcaattcaagaatacattgttcatatcaagttgcctgacctttccacccctttgatagagcaacagtcaaaactactttgattgtaacaggtttgaccacaagactaaatgtctctgtgaagtcaaatccaagctattggtggaagcctttagcaactaaccttgccttatacttatttatgttgccatttggtttttcctttattctatgaacccatttgcatccaatagcattctttccttcaataaaggaactaagatccatattccatttctctcaagtgccaaaatttcatcaaacatagcccaattctactatcctgatagaagagcttattgtattgtctctagaattttagaaaccataaatgtcttttgttttcaaataccaaattttaatcttgttttcatatggtgcctgttttcatcttagaaagttgtagtagcaggagcaactggtgtaggagcatctgatactggagcagtttgagcatctgatgcaacaacttttgcaaattgagttggactttcaatgacaatagctacaggaggaatatgagcagcttgttaaacagaagacataacttcagtaggcaaagaagagataggcaatgcatcaacaacgtgttgaccaggtctaacagttgtagaagttgaaagagcagtggaagttgaggggccatgatgttgaggtactgtgaagaaagtgcattcatcatgtagagcaactgttgggtaatattgagtatttgcaataggtatattggttgctacaaacttagtgtacaaattttgtgatataggctacttacgagaagtattttggcatagggaaagattctttcattaaatttacatcactttttatatatatatatttatatataacctgccattcgagttaaggcatttgtagcctttatggttgtgactgtatccaaaaaagatacaaggataggatct

SEQ ID NO: 71817 - DNA, 1693 bp, Cannabis sativa
tgaaattgaaagtttctttcactatttggctatacctaatcttatcttattcaacccaattcacatcatcttccatgtatttcattaacaaaaacaacttacaatttcatctttcattctagaccactcaactcactactaattaaggctaagataacatatcgagttttttaaaattaggcaaattggaaagcaagactaaagttatagtaagaatttttaacccagaaaaattaaagagaaagataacatacatacattcataagatagtcaagctagaaagtattgtaatcctctttaacatttgaaagtaaaatcaattttatcaaaccaaatcattatcgtatttccaaagtttttgattccaagtaagtgtgaaggtaataatttatggggtgtttacaaaataaggttacaacacaacatttccttaatatcaaatctattaagaaagattattatcattaaagagatccaattttataaactagagcactattcattgattttaagttaaaaaaagagtttaaaaagatcttcttgtatataatttcttctttataaatgagatatgcttgaagagctagaacaataaaaaagcatgtaactaagatatcaaacaccatttctctaaagttagtgtaaaacatggattggagatcactattgttatagagtcccatattgacaattgatttatgtgtcaaaacttaataccatgtataaattgttttggttacttcactcatttttaattaactttcaaatctcatatattctaatattctagacactactacatgaattattagatttactttcattagcaactaaacctctaagaattaaaactttaaaaatttgtgcataataaatatcatcgtctgtgatgatgaagtatagagtatgttttcacagtagaatggatattcagttttgctacatatttggtgtgaagaatgataacatggaagataatgagaagagaaaattagtagtagtagccataggataagagattgaatatctatatataaattaattttataaaataataaaaaaatgtaatagtacttttgattaaaatattatttataaaatttaacaaaaaattaagaagctccctatatttaaaaagttttctattcatttatttattataaaaagttattttttgtatgattgaaagttattttttcagtttcactttctttttgttttaactaataaatgtgtttgagtatgtggttgactggacatgcttttaggaacctataacaatgctctcctaaatgaccagaagagattttagagtgacaaataagagtaaatgagaatgagaatgaatctttcacttcgatcttaaattcaaaaaaattgagatattattaaatttggcaacttgtaatttgtacaattttacaaaaaaaaacttagaaagaatctattttctttaatttctatttcagaaattgatccatttgtttcaatgttagagccaaatgaaattaaaattagtcactactgaaaaaaaaaagttttgcatagattaacataatggttaacattggactaacacaattagtctattcttagccatgttgggaaaacaagcttggaggttagttacaaatgctcattctcttgttagtcgggtatataaggcccgatattatcctcagggttcttttt

SEQ ID NO: 71818 - DNA, 831 bp, Cannabis sativa
gtttgccacaaagtatttttttaagggttaaccaaattagaatgtgaccagagattatttttaaaattactaaaaagaagaagaaagctaaaagaaaaaaaaatgaaaagtgagacaatgaaaattttgtgaaaccttaaacattaaataaatatgaaaaaaaataaaaattaatgggaaaattataaaaatttacttttttatggcataaataaataatgctaaggggttatggtttcttttttatatatatatatttatattgacttttttatgctatatttttgtaaaaaacgatagagatcccatatttgtaaacaataataaattttgtcgaaaaagtgaccagcgccaaaaaactcatcggaaaggttagtgtcgccgaaaaaattgccagaaaaatcaccggaaaaagttactgtcgccggaatagtcactggaaaacttatcgttgccaaaaaaagtaactgaaaaagtcaccagaagtagatgtctcaaatataaacaaaaatataactggttctataacataatggataaaaataaataacacaaaataactcaagcagactataattaaaatataaatagttctgtaacataatgaataaaaacaaataaaaaaataactcaaactaattataattaaaatagaaccggttctataacaatgttataatgaataaaaaaaataacacaaaataactcaaaccggttataactaaaaaggaacacattatataacataatgaatgagtatttttaaggtagatatggtatgagtataattatttggtgggttggagcatgttgtgtaaagcccgcttagtt

SEQ ID NO: 71819 - DNA, 1549 bp, Cannabis sativa
  modified_base (1224)..(1231): a, c, t, g, unknown or other
  modified_base (1327)..(1331): a, c, t, g, unknown or other
cacccgcaccgcgaacacccctacgcttaaccatgcaatggtactaaaaactaaccatggttaagctatcaataaaactaattaaatagttactaaactttcattttcaaaataatcatcctatatatatagtttctctcaagctcttatttattggaattgttacaaaaatactagatttggggtcaaagtttacaattttactgtcacacggatttttttacaaaagtactatctttttataaaacaactgtaaaacaacaaaacaaaacagttaaaaataacagtagaacagctaaaaaataaccgtaaaacaacaatgaaaatttaacacagtatatagtatgaaacttacacagtatttttgaaaaaaattccgccccacagtataaaagtaaaaaaattaacaatttcagtatgtggtgtaattatccctatctatttccacctataatcacaaggcccacaacagacaaaaatggtctccaacctaattaattctcttttatcatttatctatccgtaattgctcactaaaaataatttatcaatcttaattaaattgtaacaatcagatctttatctccaataaataattagataaaatatgtatatacatattttgtaaagcccacttcaaatactaattatggcccaatctaaatacaaactatggcccaattctaatatttttaggataagttgagaaataccactttttttgtgtccattaatcaaaaatatctttatatgatattttattaagatatatccaattttgtgactggattgcccaatactctcaccctgcacttaagtttagcatataatttacattaacctaagggtataatgagggtatcatctataaaagtaggtatatcttaaataatatagaaacaaaggtaaaaattaaaacaagtaaagtaaagtaggtataacttgtattgtttttaattgtcttctttgtgtaacttatgaagtaatattactttataactttagtttattatataaacagggccgctcctgagggtaggcaggctaggcgtgcgcctcgggcccccgaacgctcaaggtcccgaaattgtgaaaaaaaaaatattaatatctagataaaattttaaataagaagaaaatataataaaaattatttggtgtagtggtaaaatgtttaacttccctctatgaggtcatgggatcaattcctaacctttacatttnnnnnnnnttaaaaaaatatttaatgtgtagttatgacttatgagggattgaaccttagagctcttaagagtttttaaaagctttaccattaaactaagcactnnnnntataatttttataatagttaaactatatatgtaggggccccaaaatttgatttcgtcataggccccatataccttaggaccggccctgtatataaatttgtattacatcatatgttatggacaatcaattaactattgtgcactgctatatcttaggttggtgttgtagaaataaagtttgcaattgagtgcgagtattttgggattttagatagact

SEQ ID NO: 71820 - DNA, 1011 bp, Cannabis sativa
  modified_base (747)..(756): a, c, t, g, unknown or other
ttgaccgagttgaccgggtcaacctgccaactcggtcaacccggccaacccctgacccgtcaacacgtgccctattcggatccgtgttcggttttatttttttgaatctgaaacccgcgaacccgaaacccggtaaaccctcccaatgtttagccctaacgtgaataatttaacatgagttaatatcaattttagatctattttctaacacaggcaagacctatatatgtcacaggaaaatgctcatatagaggggtaggtggtctggtgttgccgatggtgtgtttaagaagagaaataaaatagagtgagcgaggaattgtcggacatgtgatgaggattcaggaatgagaaagacacatgggcaacccaggtgggtcctatacccaccagctctgagaaagtaataaaaaaaaaatgttgtttttttaagtatatatatgtagttcgtcgacaaatatcatcttcgttataaattattattaatattattattattatctcggtaggaaatgattaagaagctttgttatatatgtatatacatgcagagctagtgactagtgactagtgagctacgaacgtacagctattttaagtgaagtgaattccaataaagcttggtaatgcatccaaaaggctacttgacaaaaacttaaatatgagaatgtgtgagagaccgacatccaaccccaacagtgggctcgtgaactaataataggaccacattattattattattattannnnnnnnnntattattattattattattcatttcaactacttccaatcacgtctcactacaaatatctcttcaaattgactattttgccacctgaaatataaagatatatagaataattttattgccgtaggtattgttttatcttgatattatacgtacactccttttttttttttgtaagatggaatatcaacttcattaactaatttagcattcttaatacaaaagatgtaaaactttatcagaaatactacaatcagatt

SEQ ID NO: 71821 - DNA, 884 bp, Cannabis sativa
aaggtgttaactaaatttgagtaacctatgactgtttaatttgtatagatagatgcctttattaaaatattaaattttcatgtggtagacaaataatatgttgatgaagtgaaatataatagtggaaaatggattattgttagttgtggaaccgtaactatttaattttatctaagttttgttggaactgattctttcttattttttaattaaaaataattttttaaattattatgtattatttgattttactcattttattgtagatttagttctattttaatttatgtatcagtattttaggaattgattctttttttaattataattggtttctgagttattgtatgttatttattttagtcatttaattgtagaaccgattctattttaatttatgtctcaactgttttatttttttattttttttttatttcagtcatttcagaaagcaattcttgaattattattttagaaatcggtttttgatttaattgattcaagtagctgattttcaatttagttatttcgagaaccgatatttgatttagttaattcaaggaaccgattttaattaatttattttatttaattggtttttgtgtgtaatttttttatcttggttgttttatggaaccagcttctttgttttaaatttttaactagttgataaatatagccggtttttttatcttatattttgagttattatgtgtaatttatttttgtatattttgttatggaatcgattcagtttagatttatgcttcagtagttttgtaattgatccccacctttttcttttaaattatactcggttatagggtattatgtattatttgtttttactctttttattgtagaactagttttttttttttttt

SEQ ID NO: 71822 - DNA, 2972 bp, Cannabis sativa
gtgttgaacttttcatctcatttcccattctctctcctctcatcctcattgtgtattgatgatgtatatttttttcattctcaattctcatctttgttaagttctatctctccattaacatataagttttttttttcttcttcttaatcttctttttttttttcttttagtttttaaaattttcaatcacgttttttgggaagataaaagtgatttttttgttctgattttcgaggactggatttgcaaatatcctctattgcatctggtgttgaggttgtgcaaaagatgattagtttttttttaatcaatttttgttttatttttgttttatttatttagtgttgttttacagttgttttaccataatttatttatttaacgccggtttcactgcttttgctccatctcaccagacttaatggttattttctaggtattctcgtgttgcagtggtggttctgtccgtggatgtggaagattgaggctataaatacattttttcttcattttctttggctatttttgtattttttattctagttctcttataaatacatttaacgagctcaatgaccaaaaattttgaggtgtgtgggtcttttatgtttttctaagtgattatatttgcttcattgttttacatttatttttgttttaataatttttttattctaaatttgtaggattgtgcatgcaaatatagtcgttattgcatttggtattgaggatgtgtagaaattttttagtttttttaatcatttttttcttttatttttctgatttgttttagtattgttttactgttgttttatcatgattatttatttgacatcgatttcactattttggttcaatctcgtcggaattaatgattgttttttgactgtcctagtgttgatgtagtggttctgtccatggatagaagttggagaccttatattttttttggtgtttacaatataaaaaaaaaaaaaaagaagacagcataaatttaatttctgccgtgcgacagtaaaattaaaattttttacccaaaatctagtatttttgtaaaaaaattcttttttaaaagttattttagcctttaaaatacaattaaagaaacttgcaatatttgtgcatgaatttttttttttaacttagaattttattttagaataattagtaattttatcgctaagttgtttatactattaattttgcccctaaaatataccaattattaaaaattctctctaaacttttatatttataaaaatttagtcattatgttaggtttcatcctattattcagtttaaatattgaagtatcattgtaaattaataattttgcccctaaattttgacaactatcaaatcgtacccgtcaaaataaaaataaaaagatacaatattttttgtagtaaattttaaaaattaatttattagatctttaaaaaaatcattttcaatgattaaaaaaattaaaaacgaaattaaaattttaaaactaattaagcaattttaaaaaaaaattattatttttattaaaataagatacatttagatataaaaaaaaagtaaattaaacattcaatttttgtaaaaaaaaaaactatattttacaagaacaagtttaaatctattttttaggagtgcgagcagcacatgcagttttacaatttcttaaattggaactgcagtacaaaatctcaaaatcgcaaaaatgcagtgcggtgcgggtggtctatactatcatcaaataaataaacaaacaatatattaaagtttaaccaacacaataaaaatacacatgttaaaattttaataacaccaatttaaaatacaacaaaattcaaactaaaacatatacaatcttttaccacatgaaaaaaaaatgaaatataatatttaatgctttaaactcaccaaatacgttaattattatataatatacataaatttttttagggatttcaaaaaaaaaacataaatattttagaacatacaaaaattaaaaaaaataatattaaaatcttactctataattatatagataaattcaataattattatttatacaagaaataagatcattatattttgaaactcaaatcaaaatttacttagattaatatgagttatggtataattttacaaaagttggtatgatgtgatttgaactgcaataattaaatttaaaactgtaaaccgtacggttgtctacaaccacactgcaaggtgtttcaaattgtatttttatgcgatgtgatgtaggtagttttatgaacacccttaattttttctcgaaaaatctaaatttgtttaataaagataaccattttttagtttaatttcttaactttttttaaaaataattttacatttttattgaatttctaattatttttctttattttttaagatatgaatttataaatatacataaatttgattttttttctcacaaaatcttagtttgttcaaattaatttttagatttttaataattttagtttgattttttaaaatatgtattcatcaataaaattaaatttgaaaatatacatatatttttttttggaatagtatagattttttaagtaaacttaatatatatttttttaataatttaatactttctcaggttttttaataatttttctaattttttaagaattaatagaaaggtataatttttcaaattatttttttaaaaaaataaaaatggtaaaattttatattggttaaagtgaaaggggtaaaaatattaatttttaaacaaattctaataatagacacaattgttatattttagaattttttttaacaaactatatattttagaggtagaattaggtaatattaaaagttcagcggtaaaaatattaattattttttattttattcttaggtttttaagttaaaactaaaaaaactagggaaaaaaacaaaaaaatacaaaaaaggaaaaaaaattacaaaaatac

SEQ ID NO: 71823 - DNA, 1165 bp, Cannabis sativa
tatcgactcaccctcagttttgcaatttgaacatcttagtatgatttaagcttctgattctgtctctcaatcagttggtagatttcattcattttagtttaccattagtgtttagttctagatctgcaatatcttacacttataaacgagaataagattaagataaagctttggaaggttaaaagaccaaatttgtttttgctgacgaaatacttcatttttatcttttagttaatgaaccttgctgaaaataatattacacgacatcacacagttgtaggcaaataaccattgttgcataaaattatgtttttaaaaccattgcagtgtgtttgttcatagttattttctcttgtaaaatcttttatttcattacaactcaattcaattgtatattcttttacgtgttttcttattttgggatatgcccatgacaatgttggatgcgcatcaaattgcctatactaaactaacattacaagagggcataagcttatttctaattccatgaaccattataggtgtttcctcctgtgaaccccatcttttcttagcccaacttatgtttcatcaaaaaaaaaaaaaatctttaagggtcgtcacgttgtatatttaccgctatcgtatatttttaataatgctgatttttcaaattcaaatttaattacgtattacatatgagcaaaaatagatttgtaaaatataatttcaaatgaaagaaatatcaaatgatcattattggaaatattctaaataagtatttactcaaaaatgtatgtaaaataatgtaaatttatagtgcacatatcactacttattttatttacaacgtcacaaaattcccacactaaatctacaacaaactctaactatttaaggggaataggtttttgtatccaataaacaaatagtagaacttttatttaagaatatactaggaatcaaaaaataaatagagttgcactaaaaaaatcaaaataccaaaaaatatcaatattaacaacaataaaaataaataatttttaatactatattataataatattacttttaagtaaatatgatatttatacatgtattacaatttaaaataaatatatgtatatattttattaaaatataattataactagcttgggtcctaatttttttttatatataataa

SEQ ID NO: 71824 - DNA, 1549 bp, Cannabis sativa
tttgagttgttctgctttgtgttttactggtgttttacaaaaatacagtatttttgtaaaattaattaaaattccagtatttttttacaagtttcccattttttatagctatttgaattttatattcaaatttaattatattgatgaaagcagtttaattgtattaataaaattttacataattttgcaggctatccaaccaaacaacaaataattcaattatctagtggcatgcctactatgcacacatcaaagttaccatggaatgttggtgaccttgctacacaaaagatggtgtttcatggttatcttaaagtaagtgaaagtttaaaaatgatagattggtggctttgcaatacatcttatgacatcgaaaattgtgtgttttctttacttcccaagcttcttccaataggtccattaatggaaatcgaatcagctagtcatttagatactaatccaggttcacaattttgggtcgaagattcatcttgcttaagttggttggatcaacacaagcctcgctcagtcatatacattgcatttggtagtttcacaacacacgaccaaatccaatttcatgagcttgctcgtggacttgagctaactagtaggccatttctctgggttgttcgcccaggatctgtgtcaggtgagcaaaaattgggactcaactcacatggatttggaggcaatgacaatcttagaaaaataatcaattgggcccctcaacaaaaggttttaagtcatccttctattgcttgttttgtgagtcattgtggttggaactcaactattgaaggtttaagtaatggagtgcctttcttgacttggccttattttgctgatcaatatatggatgagagttatatatgtgatgtttggaaagttggaatgaagcttgtgcctaatgaaaatggaattgtcacaagtgaagaggtgaaaaataaagtggacaaattgttgtacgataaagatatacaaagaagatctttagaattcaaagaaataatgatgaagagtatttctaaagatggtcaatcttcaaaaaacttcaacagctttgtcaaatggattaaggaggcataattattaattgggacataccctaggagtgatatcaatatgtattgcgtactaatactatctttttttcgttgaataatacttaataatcttttctttattatcatatgatgatgatgtgattttgttgttagaaatttatttgtatgataggaagcatatatatgattattaattaatcgaatatatatgcactatgaataaaggaataaaatatttcttgacattgaatttttgagctttaatactacacaagttttgaatctgcaaaagaaaaagaaactgataagtacagtaatcggactttcaagctctctctactctctttaaatggatttactatattttatagaataaatagtgagctcaaagatcgagaccctatatttatataggtgagacattccatcaaagtctctgtcacaattaatcgtcataatattttgataattaatttaaaaaa

SEQ ID NO: 71825 - DNA, 548 bp, Cannabis sativa
ttaaatactattttaatctggatattacactaggccagcctagggcccttccccctacttcatcttggacgccaactatgctgttccccttccccaagagggttgttcccttctaccctctagagatgcagagggagaaggaagtgaataaggccctaaaagggcgtcttgaagcggagaggctctaagtccggtgacaggcggccgtgatgtctgcagttcgcaaggcggagatcgctaatgacatgcacgatgtgcctccatcgggacaaattgtggaggtcgaagcccaagagaatcggctggcctatcggttagggggagaggctactccgtttgctgctaagcttttagaccaagtggccggaagtgccttggaactactcccggaggtttgggcgtcttgcagtagtgcagacgccttcgcactgacccattttgcaaataggcaggccatcggggtaaggctttgaaattttttgctttttatttggtttgccatgtcccctgtttttgaatcttcagcttctttgacttggccttgtgat

SEQ ID NO: 71826 - DNA, 1493 bp, Cannabis sativa
taattttgtaactgtttttcttttctattctaatggcagtaacgaaaatggttaggtttttccaacagaaaaagcaaataaaactcagaaaactccccgtaactcaagccaaaaatcgaaaccgaaaaacaataacacaaacacacacacaaatacaaatatcaagtgagatgagagaatacaaaccgtgatgaaactaggagaaaaacaccaactttgatctcggagttcacccaaaaggtttgatcttttgtaacttcgctctctcttttgtttttcttaggtttgatcttttgcagctttactctctcttttgtttttcttaggtttgatcttttgcaactttgttctctcttttgtttttcttatgagctatgcaaactctttaggactaatagctaatttcttttggtgaaatctgtctgctgcggtaaaatccccacattatatatatcttttatattatttcaacggctatttttgttatttctcactgcaacgactattttttttttgctacatactgtagatttttgtaaaatcccaacattatatatatcttttatattgctgcaatggctatttttttatttctcattgcaacggctatttttttttttttgctacatattaaaatgtaggttgatagatatggtacaatttttgagtccaaataattaataatgtggctggaaaagtttttaaaacttttgataaaaaaaaataagaaagaaagagggagagggagagggagagggagactgtgtgtgtgtataaatgggcgttcaaataaaaaaacaaaaatagcaattaatctctcggaatcccacaacaacattattacaaaatgatccttatttctcaataattaaatgctgccggtgagttgtataaataatttttatttttgttagtaggcataaattccccttaaaaataacaaagtctaataggttttaccaaataacaaactctactttgagaagattacaggtgattatagcagagtactttgtatgctttggatatggctagagggttagttttagttatgatcacttcttacttcttcagttctgcttggttcttaacattagtatttcttttgcttcttatgtttgcagtctaagttaccttcattcaaaagtatcatacaccgtgatgtaaaaactgaaaatatgttgttaagacactcatagaactcttaaaattgctgattttgattttgtttttttttttcctttgtttgtttgttctttttcatgaacaaagttaagtctaaaaagaaaacttgtgcaggtgattgatggcaaatcatacaacataaagtgtgatgtttatagttttggtatatgcttatgggaaatctactgctgtgccatggcttatcctaatatgaattttgctgagatgtcatctgcaatagttctacaggtttgttcttatgctacacgctctctaagtcattagttttttgtgtgacataaaaaaat

SEQ ID NO: 71827 - DNA, 1237 bp, Cannabis sativa
gttgatgaattcattataaaactagtagatgatgaagaaagttttgagaagtatcctgaaggtcgtcgttcattcaacgaaactattaaagaccttactagtgcaaacattttaatgacataaaatgtgtactagtttctcgaaactattaaagatcttaccagtgcaaacattttctcaaaactttcttcatcgtctaatggtttcataatgaatttatcaattgtggtgattcctctcttactttctaaaatgtttgtcactgtaaacaccttagtcattttaatggcatcatcatcatccttgattgcttcagacaacataaattctttcaaattatcccttgaaacaaaattcttccaaagaaaatattactccattaacctattaggcgggttgctaatttgaatatgctctgaaaacttagaacagtttaagctttttatcaaagcaaattcatccagttcaaactttgttttcctcccattaaaactcaactttagctctgttttattgtctgtataattttgatgtaacaagagtgaatggatgatcatgttagctggttgaagggatgcattcaaattaaaaagaaacccaaaataacaatctctaaatatctcattattgatcactaatttttttttaattattattagtgacttttggacaaattgctaaagaggtagacaaaagtgtaataattaaatttcctttcctattttttattttttttgctactgtagtttggtatgatgccttccttgtgcttttaatcggatcaaattatagaataaagctaaagacaatatataggagtcctataggttaaagtgtccaacatagataatatatttatgtcaagattatgataagaaaaataaatgagctaccctatctgtggctgaataagtgtgaaagaaccataatatttaaaactatataaaatagtcaatataaccagggaaccatgaaaattcaataaaactttatatattatatatatataaatatatatataggttgagtgatatacctttttcatgtaaaaattctcgagcttagatcaactattgcatttttgcaaccatcacaaacttcaaacaaaacatcatttgttaatgcacctaatgtttcaaagtattagtattagaatttatagtcaagttaagtaacttctaatttaaaattgagaataataccatcatcttcaatgagtatttgtagttatcattta

SEQ ID NO: 71828 - DNA, 552 bp, Cannabis sativa
cctagttcagatattaattaaaaatataaatacaaacttgagtgtatatatgctaaacacaaaatataaattattttgctatgaaattacatttagttttaatataattataatatgtaatatagataaaaaaaaataataaaaaaaaaaagttaaaataacttttaaaaaaatatatatatatattcgggcttggtcaaactcgacccactccggctcaaaaagctttaatggattgggtggggtgaaaagataacaggttgggttagtgttggattaatggcgctattataaaagcttgatagtcattgatatctaattctaaagaaatgtttaggttattgtaatagtaataaatagatctattatattttttatttcttctttataacttttgtaatctattacaattcacaatggacaccaaaaaaacaactgatagaatttaacttttataaatatgtaatcaatgtattgaaaatggtgaatggcatttttatttttatttttctaattcacgtttctttctttctctctctcacttcctttatc
